United States Patent Application Publication US 2024/0327476 A1 - sequence listing, part 130

SEQ ID NO: 246849 - DNA, 3129 bp, synthetic construct
  misc_feature 1..3129: note = Description of Artificial Sequence: Synthetic coding sequence
  source 1..3129: mol_type = other DNA
atggaggctgaagatcttagtaaagcagaagaccgaaatgaagacccgggatcgaaaaatgagggacaattagccgctgtgcagcctgacgtcccacacggcggacaatccagtagcccaaccgcactgtgggatatgctggaaaggaagttcctggaatatcagcagctcactcacaagagcccgatcgagcggcagaaaagcctcctgtctctcttgcctctgttcctgaaagcatgggagcattctgtgggcattatttgttttccctccttgcaacgccttgcggaggacgtctccgaccagttagctcagcagctgcagaaagctctggtaggaaaacccgctgaacaggccagattagctgctgggcagctcctgtggtggaagggggatgtggatcaggatggttatctgcttctcaaatctgtttacgtgcttacaggtacagattccgagacacttgggagggtggcagaatcagggctccccgctctcctactccagtgtctgtatctgttcttcgtgtttcccctcgacaaagatgagctgctggaatccgatctccaggtccaaaagatgtttgttcaaatgctccttaacatctgcagtgactcccaaggattagaggggctgctctccggttctgaactgcagagcctcctgattgccaccacctgcctaagagagcacagctgttgcttctggaaagagccaactttctgcgtcctgagggcaattagtaaagcccagaacctctcaattatacagtacctccaggctacagactgcgtgaggctgagcctacagaatctatcacgcttgacagacaccctgccagcacctgaggtgtctgaagcagtgagtttaattctgggattcgttaaggactcttatccagttagctctgccctttttctcgagtttgaaaactccgaaggttacccactgctcttaaaggtactgttacgctacgacgggctcactcagtccgaggtggatccccatctggaggaactattaggactggtagtctggctgacgacttgcgggaggtctgaactcaaagtcttcgatagcataacatacccccagttggaggggttcaagtttcaccatgaggccagtggggtcactgttaaaaacctacaagcatttcaggttctacagaatgtatttcacaaggcatcagactccgtgctgtgtattcaggtgttgtctgtcattcgaacgatgtgggcctggaatgccagaaattttttcttacttgagtggactcttcagccgatttcacagttcgtcgagattatgcctttaaagcccgcaccagtccaggagcacttttttcaactcctggaagctctcgtatttgaattgcactatgtgccgcatgagattctcagaaaggtccagcatttgatcaaggaatctcccggtcccagctgtactctgatggccctgcagagtattctttctatagcgggtggtgatccactattcacagatatctttagggattcgggcctgctgggcctcttgctggctcagctccgcaagcaggccaaaataatgcggaaaagcgggaacaaagtgtccacgcccggagtgcaagatcccgagagggagctgacctgtgttatgctgcgtatcgtggtaacactcttgaagggctctgttcggaacgctgtcgtcctcaaagaccatgggatggtcccattcattaaaattttcttggacgatgaatgttatagggaggctagtcttagcattttggagcaactgtcggctataaatgcagaggaatacatgagtatcattgtcggtgcgctctgcagctccacccaaggggaacttcagttaaaactggacctgctgaaaagcctgctcaggattctggtgacccccaaaggtagagctgcttttagagtgtcctcaggattcaacggactgctgagtctcttgtccgacctggagggcagccttcaagaaccgccactgcaggcctggggggcagtttcaccacggcagactctggagcttgttctgtataccctctgcgcggtgtccgcagctctgcattgggaccctgtcaacggatacttctttcggagaaatggcctcttcgaaaaacttgcagaagatctgtgcctgctcggctgctttggagctctggaggaggaaggaaatctgctgaggagctgggtggatacgaaggccaggcctttcgccgacttacttggaaccgcattttcaagctctgggagcctaccaccaagaatacagagttgtctgcagatactgggcttcctggacagcatggcgagcgggactctgcacctccggggagatctgaaagaatctctgcgaacaaagcagggcccagtcgtggacgtacagaagggggaaacggggagcgacccccagcgcaacttcaagcagtggcccgacctggaggagaggatggatgaaggagatgcagccattatgcatccgggtgttgtctgtatcatggtaagactcctcccacggctgtaccacgaggaccacccacagctctctgaggagattcagtgttcccttgcgagccatattcagtcactcgtgaagtcggaaaaaaaccgacaggtaatgtgtgaggccggactacttggaacactcatggccagttgccacagggcacttgtgacgtcaggtagccccctgcacagtagattaattcgtattttcgaaaagctggcctcgcaggctatcgaaccagatgtgctgagacagtttctggggctcggcataccatcgtccctgtctgctaccactaaaatattggacagctcgcatacacataggggtaacccgggttgttccggcagccaaacagcccagggcctagccgaagggccttggcccgctgcccctgatgctggcctccaccccggagtcacgcaggcaccccagcctctgggggagtctcaggattccacaacagctctccagaccgctttgtcgcttatttccatgacttccccgcacatttggaagcccaacatctggaaagataacctcgcacagaagcctgtggcgggtgatgctgctcagtgcaacattttccctcccgcttcgagtgttctctag

SEQ ID NO: 246850 - DNA, 9530 bp, synthetic construct
  misc_feature 1..9530: note = Description of Artificial Sequence: Synthetic coding sequence
  source 1..9530: mol_type = other DNA
atggaagcagaggacctgtccaaagccgaagatagaaatgaggatcccggttcaaaaaacgaaggccaactggctgccgtccaaccagatgtgccccacggtgggcagagctcttcccccactgcgctctgggacatgctcgaaagaaaatttctggaataccaacaactgacacataagagtcccatcgagaggcagaagagtcttctaagcctactgcctctctttctcaaggcttgggaacactccgtcgggattatctgcttcccaagcttgcagagactagcagaggatgtgtcggatcagcttgcacagcagctgcagaaggccttagtgggtaaacctgcagagcaggccaggttggccgcaggccagttgctgtggtggaagggagatgtagatcaggacggctacctactgctgaagtcggtttacgtgttaacgggaacagattcagaaactctgggacgcgtggcggagagcggcttacccgcattgctgctccagtgtctatacctgttttttgtatttccgctggacaaggacgagctattggagtccgacctacaggtgcagaagatgtttgtgcagatgcttctcaacatttgctcagactcccagggcctggaagggctgctgtccggcagcgagctgcaatctttgttaattgcaaccacgtgcttgcgcgagcatagctgttgcttctggaaagaacccaccttttgtgtcttacgagctatatcaaaagcgcagaatctgtccattatccaatatcttcaagctactgactgcgttcgcctctctctacagaacctgagtaggctgacagacacactgcccgctccagaggtgtcagaagcagtgtccttgattctcggctttgtgaaggacagctatccagtcagtagtgcactctttttagaattcgaaaatagtgagggctatccattgttgttgaaagttcttttgagatatgacggcctgacccagagcgaggtggaccctcacctggaagagctgctgggccttgtggtgtggctaaccacatgcggcagatctgaattaaaagtgtttgacagcatcacctaccctcaactggagggcttcaagttccaccatgaggcatctggtgtgactgtaaagaatctgcaagcatttcaagtcctacagaatgtcttccacaaagccagtgactccgtgttatgtattcaggtcctgtcggtcattagaactatgtgggcgtggaatgccaggaatttctttttactcgagtggactctgcagcccatctcccagtttgttgagatcatgcccctcaaaccggctccagtgcaggagcactttttccagttgcttgaggcattggtgttcgagctgcattacgtacctcacgaaattctccgtaaagtccagcatctcataaaagaaagccccggaccgtcatgcacccttatggcactacagtctatcctgtccattgcgggaggcgatcccctgttcacggatatcttccgggacagcggattgctcggactactactggcacagttgagaaagcaggccaagataatgagaaaatctggcaacaaagtgtctacaccaggagtacaggaccccgagcgcgagttaacctgtgtgatgctgaggatcgtcgtcactctgcttaaagggagcgtccggaacgcagtcgtgttgaaagaccatggcatggtcccttttataaaaatattcctggacgacgagtgttaccgtgaagcctcactctccatccttgagcagttgagcgcaatcaatgccgaggaatatatgagcatcattgtcggagccctgtgttctagtactcaaggagagctgcagctgaagctcgatttgttgaagtcattgctgaggattctggtgaccccgaagggcagagccgctttccgagtgtcatcaggctttaacgggctgctgtccctgctgtccgacctagaagggagcctacaagagccgccattacaggcttggggagcagtttctcccagacagacactggagcttgtcctttacacgctgtgcgctgtatccgccgcacttcattgggatcctgttaacgggtacttctttcgccgaaacggtcttttcgaaaaactcgctgaagacctctgtttactcgggtgtttcggtgctctggaggaagaaggcaatttgctgcggagctgggtggatacaaaggcgcgaccgttcgccgatttgctgggtacagcttttagctcttccggctcacttcctccacgcattcagagctgtctccagatactgggattcttagattcaatggcttccgggactttgcacttacgaggggatcttaaggagagcttgcgtactaagcaaggacccgtggtcgacgtgcaaaaaggtgagaccggtagtgacccacagcggaacttcaagcagtggcccgacctggaagaaagaatggatgagggtgatgctgctatcatgcaccctggtgtggtttgcataatggttagattactgccaagactctatcacgaggaccatccccaactctcagaggagattcagtgtagcctggcctctcacatccaaagtctcgttaagagcgagaagaacagacaagtgatgtgcgaggccggattactggggacccttatggcctcttgccaccgtgccctcgtgacctctggcagtcctcttcactcccgactcattcgtattttcgaaaagcttgcctcccaagctatcgagcctgatgtgttacggcagttcttaggccttggcatacccagttcgttgtctgccactactaagatccttgattccagccacacccatcggggaaaccccggatgtagcggctcacagaccgcccagggactggctgagggcccatggccagcggcacctgacgccggactgcacccgggtgtcacccaggcccctcagcccctgggagagagccaggattcaacgacagccctgcagaccgcccttagtcttattagcatgacaagccctcgtaacctgcagccccaaagggctgcactggcaccatcatttgtggaattcgacatgagcgtggagggctatggatgcctgttcatacctactctctctacggtaatgggcacatccactgaatactcagtgtctggtgggattggcaccggtgctaccagacctttccctccgccagggggattgactttttcgtgttggttcctcatttccaggcacggcgcagcaactgagggacatccgctgcgatttctcaccctggtgcgccacctcgcgaggacagaacagccatttgtgtgcttctccgtgtccctctgccccgacgatctctccctcgtagtgtccaccgaagaaaaggagtttcaacccctcgatgtgatggaaccagaggacgattccgagccgagcgccggatgtcagctgcaggtgagatgcgggcaactgttggcctgcggacaatggcatcatctggccgtggtcgttaccaaagagatgaagagacattgcaccgtgtccacttgcctcgacggacaggtgataggcagcgcgaagatgctgtatatccaggcattaccaggcccatttctgtcaatggatccatccgctttcgtcgatgtctacggctatatcgcaactcccagagtttggaaacagaagagtagcctgatttggcgcctgggccctacctacctgttcgaggaggccatctcaatggagaccctggaggtcatcaataaactgggacccaggtactgtggcaattttcaggctgtccacgtacaaggtgaggaccttgattccgaggccaccccatttgtcgcagaagagagagtgtcatttggccttcacattgcatctagcagcataacaagcgtggcggatatccggaatgcctataatgaagtggactccagacttattgcaaaggagatgaacatcagtagccgggataatgcgatgccagtctttctcctaagaaactgcgcaggacatttatctggatccttaagaacaatcggcgctgtcgcggtcgggcaactgggcgtgcgcgtttttcatagctcacctgccgcaagcagcctggattttattggcggaccagccatcctgctcggactgatctctctagctactgatgaccacactatgtatgccgctgtgaaagtgctacacagtgtgctcacctcgaacgctatgtgcgactttctcatgcagcatatttgcgggtaccagataatggccttcctgttgcgcaagaaagctagtctgctgaatcacagaatatttcagttgatcttgagtgtcgctggcacagtcgagctcggattccgttcaagcgcaataaccaacacaggtgtctttcagcatattttgtgtaacttcgaactctggatgaataccgcagacaaccttgagctgtctttgttctcacacctgctggagatactgcagagtccacgagaggggccacggaatgctgaagcagcacaccaggcccagctgattcctaagctgatctttctgtttaacgaaccttccttgatccccagcaaaattagtaccataataggcatattagcctgtcagctgcgtggtcatttttcgacccaagaccttctacggattggcctatttgttgtgtacacacttaaaccatcaagcgttaacgagagacagatctgtatggatggtgccctcgatccaagcctgccagcaggctctcaaacatccggaaagacaatttggctaaggaaccagcttctcgaaatgctgttgagcgtgatctctagtccacagctgcacctgagcagcgagagcaaggaagagatgtttctcaagctgggcccagattggttcttgctgctattgcagggacaccttcatgcctcaacgacagtgttagctctcaagctgcttttgtatttcctggcttcaccttctctgcggacccgctttagagacgggctgtgcgccggttcttgggttgaacggtcgacggagggtgtggacatagtgatggacaatcttaagagccagagtccacttccagaacagagcccatgcttgctgcctgggttcagggtcctgaacgattttctggcccatcacgtccatataccagaggtttatcttatcgtttctacttttttcctgcaaacacctttaaccgagcttatggacgggcctaaagattccctggatgccatgctgcagtggctgttacagagacaccatcaagaagaggtgcttcaagctggcctgtgtacagagggagccctattgctcctggaaatgttgaaagcaactatgtcacaaccgctcgcaggatccgaggatggcgcatgggctcaaacattcccagcatccgtgcttcagttcctgtccttggtgcatcgaacctacccccaggaccccgcatggcgcgctccagaattcctgcaaaccctcgcaattgcagcctttcccctgggagcccagaagggagttggcgcagagtctacccgtaacaccagctcacctgaagccgcagcagagggagatagcaccgttgaaggcctacaagctccaactaaggcccaccctgcccgtaggaaacttcgcgagtttacccagttgctgcttagagagctgctgttgggtgcctcaagccctaaacagtggctgcctctcgaagtgctgttggaggcgagccccgatcatgcaacctcacaacagaagcgggactttcagtctgaggtgctcctttccgctatggagttatttcatatgacgtctggtggagacgcagccatgtttagggacggcaaggaaccccaaccttcggctgaagctgcagccgctccttcactggcgaacatttcttgcttcacccagaaactggtggagaagttgtactctggtatgttttccgccgatcctcgtcacattttgttgtttattcttgagcatataatggtggtcatcgagacagcgtcctcgcagagagatactgtgctgtctaccctctacagttccttaaataaggtgatcctttactgtctaagcaagcctcagcaaagcctctcagaatgcctgggcctgctgtccatccttggttttctccaggaacactgggatgtggtcttcgcgacctataatagtaatattagcttcctcctttgtttgatgcactgcctgcttttgctaaatgaacggtcttaccctgagggttttggcctcgagcccaagcccaggatgtcaacataccatcaggtcttcctgtccccaaacgaggacgtgaaggagaagagagaggacctcccgagcctgtctgatgtccagcacaacatccagaaaacggtgcagacgctttggcagcagcttgtggctcagcgacagcagaccctggaggacgccttcaaaatcgacttaagcgtgaagcccggtgagagagaggtgaaaatagaggaggtaacaccactgtgggaagaaactatgctaaaagcgtggcaacactacctcgctagcgagaagaagagtctggcttcccgtagcaatgtggcccaccatagtaaagttactttgtggagcggaagtctctcatctgcgatgaaactcatgcccggtagacaggccaaggatccagaatgcaaaacagaagatttcgtctcttgtattgaaaattacagacgcagagggcaggagctgtatgcaagcttgtataaggaccacgtacagagaaggaagtgcggaaacatcaaagctgccaatgcgtgggcaagaatccaggagcaactctttggggagctaggcctctggagccagggcgaagagactaagccctgttcaccatgggagctggattggagggaggggcctgcacgcatgaggaagcgcatcaagagactttcacctcttgaagcgctctcatcaggacgccacaaagagagccaggataagaacgaccacataagccagaccaacgccgaaaaccaggacgaactgaccctgagggaagctgaaggagagccagatgaggttggcgtggattgcacacagcttacattctttcctgcacttcatgagtccctgcactcggaagacttcctggaactttgtcgcgagcggcaggtgattctccaagagctgctggacaaggaaaaagtgacacagaaatttagcctggtgattgtacagggccacctcgtgtcagaaggcgttctgctgtttggacaccaacacttttatatctgcgagaatttcacgctgagccccactggagatgtatactgcactcgacactgcctcagtaatatatccgacccatttatctttaatctgtgctccaaggacagatccaccgatcattactcgtgccagtgccacagctacgccgatatgagagaactgcggcaggcacggtttctgctgcaggacatcgcgcttgagatattctttcacaacgggtactccaaattcctggtattctacaacaatgaccggagcaaggcatttaaatcattttgctccttccagcccagcctcaaaggcaaggctacctcggaagacaccctttcccttagacggtaccccggatccgatcgcatcatgctccagaagtggcagaagcgcgatatctcgaattttgagtatttgatgtatctgaacacagctgccggtaggacttgtaacgattatatgcagtaccccgtatttccatgggtgctggcagattacacgagcgagaccctgaacctggctaaccccaagatcttcagggacctgagcaaacctatgggggctcagaccaaagaacgtaaactgaagttcatccagagatttaaggaagtggagaagacagaaggagatatgaccgtgcagtgtcattactacacacactatagttccgccattattgtggcctcttacctcgtgcggatgccaccattcacccaggctttttgcgccctgcagggcggttccttcgacgttgcggataggatgtttcacagtgtgaaatccacctgggagtccgcttccagggagaacatgtcggatgtgagggaattgactcccgagttcttttacctgccggagttcctgaccaattgcaacggggtagagttcgggtgcatgcaagatggtaccgtattaggcgacgtgcagctacccccatgggcagatggcgatccaaggaagtttatctctcttcacagaaaagctctggagagtgacttcgtgagcgctaatttgcatcactggattgacctgatttttgggtataaacagcagggcccagccgctgttgatgcggttaacatttttcacccctacttttacggtgacaggatggatctcagttccatcaccgacccactcataaaaagcacaatactcggcttcgtatccaacttcggacaggtgcctaaacagctgttcacgaaaccccatccagccaggaccgcagctggaaagcccctcccaggcaaagacgtgtcaactccagtaagcctgccagggcaccctcagccatttttctactctttgcagagtctcagacccagtcaggtgaccgtcaaagatatgtatctttttagtctaggctccgaatcccctaagggtgcaatcggtcatatagtcagtaccgagaaaactatactggcagtggagaggaataaagttttgctcccccctttatggaaccggactttctcatggggttttgacgacttcagttgttgtcttggttcctatgggagcgataaggtcctcatgacgtttgagaatttggcggcatggggcagatgcctgtgcgccgtctgtccctcccctaccacaattgtgacgagcggaacctcaactgtggtgtgcgtttgggagctttccatgactaaagggagacctcgcggactgcggcttcgtcaggctctgtatggccatacacaggctgtgacgtgcttggctgccagcgtgacctttagcctgcttgtgtcaggctcccaggactgtacttgcatcctatgggatctggatcacctcacccatgtgacacgactcccagcacatcgcgaaggcattagcgcaattaccatctcagatgtatccggaactattgtgagctgcgcgggagctcacttgagcctgtggaacgtgaacggtcaaccactggctagcatcacgactgcctggggcccagagggagcgatcacctgctgttgtctgatggaagggcctgcttgggacactagtcagataattatcaccggtagccaggacggaatggttagagtctggaagaccgaagacgttaagatgagtgttcccggactgcaaatgggaaggaagcgagaagccgcagaagctctggcgcagcagtgccaggcagagggcggtcgcggtgactggggtttgtccagtgcctatcgaagaaatccacagggtctgctaccacactcatcccagggaagagctagtgggaaccatagctctgccgctcaacctagcccttggccgatgggactgctgta

SEQ ID NO: 246851 - DNA, 3159 bp, synthetic construct
  misc_feature 1..3159: note = Description of Artificial Sequence: Synthetic coding sequence
  source 1..3159: mol_type = other DNA
ttgaactccgaccttctgtgccacggtatggaggccgaggatctgagcaaagctgaggaccggaacgaggatcctggatctaagaacgaggggcagctagccgcagttcaacctgatgtcccccatggtggacaatcttccagtcccacagccctgtgggatatgctggaacgcaaattcttagagtaccaacagcttacgcataaaagtccaatagagcggcaaaagagcttactatctctattgccgctcttcctcaaagcttgggaacatagcgtgggcatcatttgtttcccatctcttcagcgcttagccgaagacgtatccgaccagctggcgcagcaactccagaaggcgctggtgggtaaaccagccgagcaagctcgattggcagccggtcagctactgtggtggaagggggacgtggatcaggacgggtacctgctgctcaaaagtgtatatgtgcttactggcaccgactcagaaacccttggtagagttgcggagtccggactgccggctctccttctgcaatgtctatacttattcttcgtcttccccctagataaggacgagctgttggagtctgacctacaggtacaaaaaatgtttgtgcagatgctgctgaatatatgtagcgattcacagggtctcgaaggattattgtccggttccgaactccagagcctgctaatcgcaactacatgcctccgggaacactcatgctgtttttggaaggagccaaccttctgcgtgctgagggcaatttctaaagcccagaatttgagtatcatacagtacctccaggccaccgactgtgtacgcctgtcccttcaaaatctctcccgattgaccgatacgctccccgctcccgaggttagcgaggcagtgtcgttgatactgggattcgttaaagacagctatcctgtgtcctccgctttgttcctcgagttcgaaaatagcgaaggctaccccttgctgctgaaggttctcctacgctatgacggtctaactcagtctgaggttgacccccacttggaagagctgctggggttggtggtgtggcttaccacgtgtggcaggtctgaactcaaggtatttgattcaatcacctatcctcagcttgaggggttcaaattccaccacgaggcttccggcgtaactgttaaaaatctgcaggccttccaggtgctgcagaacgtgtttcataaagcgtccgatagtgtcttgtgcattcaagtgttgtccgtgattcggacaatgtgggcatggaatgctaggaatttttttttactcgaatggacgctgcaacctatcagccaatttgttgagatcatgccactgaagccagccccagtacaagaacattttttccagctgctggaagctttggtgtttgaactgcattatgtccctcacgagatactcaggaaggtccagcacctgatcaaggaatcaccgggtccgtcatgcacgttgatggctctgcagtccatcctgtccatcgctggaggggacccgctgtttacagacattttccgggattcaggactactgggcctcctactggcacagctgagaaaacaagcgaagattatgagaaaaagcggaaacaaagtgagtacacctggcgtgcaggaccctgagagggagctcacctgtgtgatgctcaggattgtggtcacgttgttgaagggttccgtgaggaatgcagtggtgctcaaagatcacggcatggtgccttttatcaagattttcctagacgatgaatgttaccgggaggctagccttagcattctggaacagttgtccgccattaacgctgaagagtatatgtcgattatcgttggcgcactgtgcagtagcacacaaggggagcttcagctgaagttggatctgctcaaatcgctgctgagaatcctcgtgaccccgaaaggacgggctgcatttagggtgtctagcggctttaatggactcctctccttgctgagtgacctcgaaggatccctccaggaaccacccctacaggcatggggcgcagtgtctccccgacagaccttggaactagtgctgtacactctttgtgctgtaagcgcagctctgcattgggatcccgtgaacggctactttttcagaagaaacggcttgtttgaaaagctcgcagaagatctgtgtcttctcgggtgttttggggctcttgaagaagagggcaacctcctgcgttcctgggtagacacaaaggcaaggccgtttgctgacttgctgggcaccgctttctcttcttctgggtctcttcctcctcgaatccagtcctgtctccaaatccttgggttccttgacagcatggcgtctggtaccctccatctgagaggagacctcaaggagtctttgcgcaccaaacaagggccagtcgtcgatgtccaaaaaggcgaaaccggttcggacccgcagcgcaatttcaaacagtggcctgacctagaggaacgcatggatgagggcgatgccgctattatgcaccccggagtggtctgcattatggttcggctgctgccccgactgtaccatgaagatcacccccaacttagcgaggaaattcagtgcagtctggcaagccacatccagagtctcgtcaaatccgaaaagaaccgccaggtcatgtgtgaggccggtctgcttggaaccctgatggccagttgccaccgagcactcgttaccagtggcagcccgctccattctcgccttatcaggatcttcgaaaaattagcatcccaggccatcgaacctgacgtgttgaggcagttcctggggctggggattccgtcatcccttagcgctactaccaaaatactggatagctcccatacccatcgtggcaatccaggttgtagcggaagccagacggctcagggtctagctgaggggccttggccagcagccccagacgcgggactgcatcccggtgtaacgcaagcccctcagcccttgggcgaaagccaggatagcaccacagcgttgcaaacggctctgtccctcatctccatgacttcccccgtggctggtagtcaaacctcaggcaagaccatctggctccgtaaccaactactggagatgctcctgtccgtaattagcagcccgcaactgcatctgtcatctgaatag

SEQ ID NO: 246852 - DNA, 1875 bp, synthetic construct
  misc_feature 1..1875: note = Description of Artificial Sequence: Synthetic coding sequence
  source 1..1875: mol_type = other DNA
atgctgcagaagtggcagaaacgggacatttccaatttcgagtatcttatgtacttgaatacagcagccggacgaacatgtaacgactatatgcagtatcctgtctttccatgggtgctagctgattacacaagcgaaacacttaacctggccaaccccaaaatcttcagagacttgagtaagcccatgggggctcagaccaaggagcgcaagttaaaatttattcagaggttcaaggaagtggaaaagacagagggggatatgactgtgcagtgtcattactacacacattactcttcagcaattattgttgcctcctatcttgtgcgcatgccgcctttcacccaagcattttgcgcccttcaagggggatccttcgacgttgctgacaggatgtttcatagtgtgaagtccacctgggagtccgcgtcccgggagaatatgagtgatgttcgcgagcttactcccgagttcttttacctaccagagttcttgaccaattgcaatggcgtagaattcggatgcatgcaggatgggactgtattgggcgacgtccaattgcccccatgggcagacggcgatccccgtaagtttatctcactgcaccgtaaagccttggagtcagatttcgtgtccgccaatttgcaccactggatcgacttgatttttggatacaaacagcagggccctgccgctgtcgatgctgtgaatatctttcacccatatttctacggtgatcgaatggacctttcttccattaccgaccctctgatcaaaagtactattctggggttcgtgtccaattttggacaggtgccaaagcagctatttacgaagccacaccccgcaagaactgccgcagggaagcccttacctggcaaagacgtctccacacctgtctctctgcctggacatccgcaaccatttttttacagcctgcaaagcctgcgaccctcacaggtgacggtcaaagacatgtacttgttttctcttgggagcgagagtcctaagggtgccattggacacatcgtgtctacagaaaagaccatattggccgtggagcggaataaagtgttgctgccaccactgtggaaccgaacttttagttggggtttcgatgacttttcatgttgcctcgggtcttacgggtcagataaagtcctgatgacatttgaaaacctggccgcatggggtagatgcctttgtgccgtgtgcccgagtccaaccaccattgtgacatcaggaacatccaccgttgtgtgcgtttgggagcttagtatgacaaagggcagaccccgtggattgagactgcgtcaagcactgtatggacatacccaggccgtgacatgtctggccgctagcgtgacattttcactcttggtgtccggtagccaggactgcacctgcattctgtgggacctggatcacctcactcatgtgacacggctgccagcccatagggaagggatctctgcgattacgattagtgacgtgagtggcacaatcgtatcttgtgctggagctcacctgtctttgtggaacgtaaacggccagcccctagccagcataacaactgcttgggggccagagggtgcgataacctgttgctgcctcatggaagggccagcatgggacactagccaaatcattattaccggctcccaggatggcatggtgcgggtttggaagactgaagatgtcaagatgagtgtacccggtcgccctgcgggtgaggaacctcctgctcaaccgccaaccctctccatggctgacgggacttccatgaaaagaatgagcacgcataccagacgggcagagcagcacgcagggaactgcgacctggtgatgccttcctgtacgcggaattacacctag

SEQ ID NO: 246853 - DNA, 1704 bp, synthetic construct
  misc_feature 1..1704: note = Description of Artificial Sequence: Synthetic coding sequence
  source 1..1704: mol_type = other DNA
atggatgataaagatatagacaaagagttacgtcaaaagctgaattttagctactgcgaagaaaccgaaatcgaggggcagaaaaaagtcgaagagtctagagaggcctcatctcagacacctgagaaaggagaggtccaggactccgaagcgaaaggaacgccaccgtggacgcctctctcgaatgtccacgagctggacacgtctagtgagaaagacaaagagagccccgatcagatccttagaacccctgtatcccaccccctgaagtgtcccgagactcccgcacaacctgattctcggagtaaacttctgccctccgacagcccttctacaccgaagaccatgctgagcagactggtgatctctccaaccgggaaactcccctcccggggaccaaagcacttgaagctgaccccagcgcctctgaaagacgaaatgacttcactcgcgctggtgaatatcaatccatttacccctgaatcctacaaaaaactgtttctgcagagtggcggaaaaaggaagatccgaggcgacctggaggaagctggaccagaggagggtaaaggtgggcttcccgcaaagaggtgcgttcttcgggagacaaatatggcgagccgctatgaaaaagagtttctggaggtggagaagatcggggtcggagaattcgggaccgtatataagtgtatcaaaaggcttgacgggtgcgtgtacgccataaagcgttcaatgaaaacattcacggagcttagtaacgaaaattctgctctgcacgaggtctatgcgcatgccgttctgggtcaccacccgcatgtggtgcgctactatagctcctgggctgaggacgaccacatgattattcagaatgaatactgcaacggagggagcctccaggcagccatttcagaaaacacgaagtctggaaaccacttcgaagaacccaaactgaaggacatcctacttcagatctccctaggcctcaactatatccacaattcgtccatggtacatctggatattaaaccctctaacatcttcatctgtcataagatgcagagcgaatcctccggggtcattgaggaagtcgaaaacgaggcagattggttcttgagcgccaacgtgatgtataaaatcggtgatctaggccatgccactagcattaacaagcccaaggtggaggaaggcgactcccgttttctcgcaaatgaaattctgcaagaagattatagacatctgccaaaggctgacatctttgcattaggcctgaccatcgcagttgcagccggagccgaatctctccccactaacggcgctgcctggcatcacatcagaaaggggaacttccctgacgtgcctcaggaactgagcgagagttttagctcgcttctaaagaatatgatccaacccgacgccgagcagcgtccctctgctgcagccctcgctcgtaacaccgtcctgagacctagcctcgggaagactgaagagttgcagcagcaacttaatcttgaaaaatttaaaacagccacactggaacgcgaattacgcgaggcccagcaagctcaatcaccacaggggtacacccaccacggcgacacaggggtgtcggggacccacaccggttctaggtctaccaagaggctcgtgggaggcaaatctgcgaggtctagctcttttacatccggcgaacgcgaacccctccattag

SEQ ID NO: 246854 - DNA, 846 bp, synthetic construct
  misc_feature 1..846: note = Description of Artificial Sequence: Synthetic coding sequence
  source 1..846: mol_type = other DNA
atggtcacaattctgatgagagcgataaactctctaggaattcacgtcctagattccagccggcctacagacccgctgagccatagttctaatagtagttctgaaccggcaatgttcatcgaagacaaagcagtggacactctcgcgtacttatctgatggtgacgccagggccggtctgaatggcctgcagctggctgtgctggctcggctgagcagcaggaagatgttctgtaagaagtctgggcagtcctacagtccatctagggtgttgattacagagaacgacgtcaaagagggactacagagatcacacatactctatgacagggccggtgaggagcattacaattgcatctcagccctgcacaaatccatgcgtgggagtgatcaaaacgccagcctttactggctggctcggatgctggagggtggcgaagaccccttgtacgtcgccaggagactggtcagatttgcctccgaagacataggattagccgacccatccgccctgactcaggcggtggcagcatatcagggctgtcatttcatcggcatgcctgagtgcgaggtcctcttggcacagtgcgtcgtctatttcgctcgcgctccaaaatccatcgaggtgtactcagcttacaataacgtcaaagcctgtctacgtaaccatcagggcccacttccccctgtgccactccacctcaggaacgcacccacaaggttgatgaaagatttgggttatggtaaagggtacaagtataatccaatgtacagtgagcctgtggatcaggagtacctgcccgaagaactgcggggagtggatttttttaagcagcggaggtgttag

SEQ ID NO: 246855 - DNA, 1338 bp, synthetic construct
  misc_feature 1..1338: note = Description of Artificial Sequence: Synthetic coding sequence
  source 1..1338: mol_type = other DNA
atgctgcagggtaagccattggcagatacaatgagacctgacactctgcaggactacttcgggcagtctaaggctgtaggacaagacacccttctcaggtctctgctcgagacaaatgagattccttcactgattctttggggccctcctgggtgtgggaagactactctcgcacacattatcgctagtaactccaagaagcattctatccgctttgtgacattgagcgccaccaatgccaaaactaacgacgttagggacgtgataaagcaggctcagaacgaaaagtctttcttcaagcgcaaaaccatccttttcattgacgaaattcatcggttcaataagtcccaacaggatacgtttcttccacacgttgagtgtggcaccattacactgatcggggctaccaccgaaaacccttctttccaggttaacgcagccctgctctctcgctgccgtgtgatcgttctggaaaaactgccagtggaggccatggtgactattctgatgcgcgctataaacagtctcgggatccacgttctggatagctctcggcctactgacccgctcagccactcgagtaactctagctctgagcccgctatgtttatcgaggacaaagcagtggatacgctcgcttatctttccgatggggatgctcgagcaggcctcaacggactccagcttgcggtgctggccagactgagctccagaaaaatgttttgcaagaaaagtggtcagagttattctcctagccgcgttcttattaccgagaatgacgtaaaagagggactgcagcgaagtcatatcctgtatgacagggcaggtgaggaacactacaactgtattagcgctcttcacaaatctatgaggggttcagatcagaacgcaagtctttattggctggccagaatgcttgaggggggagaagatcccctttatgtggcacgaaggcttgtgcgattcgcctccgaggatatcgggctcgctgacccaagcgcgctgacacaagcagtagctgcctaccagggatgccactttatcggtatgccagagtgcgaggtacttctagcccagtgtgtggtgtactttgcacgcgctccgaagtctatcgaagtctactcggcttacaacaacgtgaaggcttgtttgcgcaatcaccaaggcccacttcctccggtgccactgcacctgagaaacgccccaactcgactgatgaaagacctgggatatggaaaggggtacaaatacaacccaatgtactccgaacctgttgatcaggaatatctgccggaggaacttaggggggtggatttctttaaacagagacggtgttag

SEQ ID NO: 246856 - DNA, 1923 bp, synthetic construct
  misc_feature 1..1923: note = Description of Artificial Sequence: Synthetic coding sequence
  source 1..1923: mol_type = other DNA
atggaggtctccggaccagaggacgacccttttctgtctcagctccaccaagtgcagtgtccagtatgccaacagatgatgcccgctgcgcacatcaacagtcacctggaccgctgcttactgctgcaccctgccggacacgcagaacccgcagcgggatctcatagggctggggaaagggccaagggcccttcgcccccaggggcaaagcggcgtaggctgtctgagtctagtgccctgaagcagccagccactcctacagctgccgagtcctctgaaggagaaggagaagaaggtgacgacggaggtgaaaccgaatcccgggagagttacgacgcaccccctacacccagcggagcaaggcttatccctgactttccagtggctcgatcctcgtcccccggaaggaaaggaagcggcaaacgcccagcagccgcagccgcagctggctctgctagcccacgatcctgggacgaagcagaggcgcaggaagaggaagaggctgtgggcgacggcgatggagatggtgacgcagatgccgacggggaggatgatcccggacactgggacgcggacgctgctgaagccgcaaccgcctttggggcaagcgggggagggagaccccatcctagagcgctggctgccgaggaaatccgccagatgctgcaaggtaagcctttggctgacaccatgcgcccagacacattgcaggactacttcggacagtccaaggcagtaggccaagatacactgctgagaagccttctcgaaactaacgaaataccatctctgatcctgtggggcccaccaggatgcgggaaaacaacactcgcgcatattatcgcctctaactccaagaagcactccattcgtttcgtcacattaagcgctacaaatgccaaaacaaacgacgtccgcgatgtgatcaaacaggcacagaatgaaaagagcttttttaaacgtaaaactatactttttatagacgaaattcaccgctttaataagagtcagcaggtaaatgctgcattgctaagccgttgccgcgtgatcgtcctagagaaacttccagtggaagcgatggtgaccattctgatgagggctattaactcactaggcattcacgtccttgacagtagtcgaccgactgaccctctcagccactcatccaattcctcatcagaaccagcgatgttcatcgaggacaaggccgttgacacgctggcatacctttcggacggggacgctcgtgccggactcaacgggctccaactcgctgtcctggcacgtctctcctctaggaagatgttttgcaaaaagtccgggcagagctattcaccttccagagtgcttataacagaaaacgatgtgaaggaggggctccaacgctcgcacatcctttatgatcgagcaggggaggaacattacaactgtatttcggcactgcataaatcaatgagaggtagcgatcagaacgcaagtctgtactggttagccaggatgctggaaggcggagaagaccccctgtacgtcgctcgcagactggtcagattcgcgagtgaagatatcggtctcgctgatccttctgctctgacacaagctgtggccgcataccagggatgtcacttcattggtatgcccgagtgtgaggttctgctggcccagtgtgttgtctacttcgctagggcacccaagtccatcgaagtatactcggcttacaataacgtcaaggcctgtctcagaaatcaccagggtccactgccccctgtccctttacatctgagaaacgcccctacacggttaatgaaagatttgggctacggaaagggctacaagtataaccccatgtactccgagccagtggaccaggagtaccttcccgaggagctccgcggtgttgatttcttcaaacagcgacggtgttag

SEQ ID NO: 246857 - DNA, 1998 bp, synthetic construct
  misc_feature 1..1998: note = Description of Artificial Sequence: Synthetic coding sequence
  source 1..1998: mol_type = other DNA
atggaagtctctggcccagaggatgacccgtttctcagccagctacaccaggtacagtgcccagtgtgccagcagatgatgccagcagcacatattaactcgcacctcgaccgatgcctgcttctccatccggcaggacatgctgagcctgctgccggaagccatcgtgccggagaaagagcaaagggcccaagcccccctggagccaaacgcagaaggctgagcgagtcaagtgcactgaagcaaccggctacaccaaccgctgcagagagctcagagggggaaggggaagaaggtgatgatgggggagagacagaaagcagagaatcttacgatgcacccccaactcccagtggcgcacgactgatacccgacttcccagtcgcacgctcttcctctcccggtcggaagggcagcgggaagcgcccagccgctgccgctgccgctggcagtgcatcccctaggagctgggacgaagctgaggcgcaggaggaggaagaggccgttggagatggggatggtgatggggacgcggatgccgatggggaggacgaccctgggcactgggatgccgacgctgctgaggctgctaccgccttcggagcaagcggagggggtagaccccatcctagggcccttgccgctgaggaaatcagacaaatgttgcagggtaaacctctcgctgataccatgcgcccagataccctgcaggactactttgggcagtccaaggcggtcggacaggatactttgctcaggtcgctcttggagaccaacgaaatcccgagtttgatactctggggccctccagggtgcggaaaaacaaccttggctcatataatcgcatccaacagcaagaaacacagtatccgtttcgtcacactgagtgcaactaatgcaaaaactaatgatgtgagagacgtcattaagcaggctcaaaatgaaaagtccttcttcaagcgcaagactattttatttattgacgagatacatcggttcaataagtcacagcaggatacatttctgcctcatgtcgagtgtgggacaattactttaataggcgctacgacggaaaatccttctttccaagtgaacgcggcactactatcacgatgccgtgtgatagttctggaaaaacttcctgtggaggccatggtgaccatcctgatgagagctatcaattccctcggcatccacgtgctagattcatcacgcccaacagaccccctaagccacagctccaacagtagctccgagccagcaatgttcattgaagacaaagcagttgatactcttgcgtatctgtccgatggcgacgccagggccggtttaaacggcctccagctcgccgttctagccagattaagctcccggaaaatgttctgcaaaaagtccgggcaaagttactctccttccagagtccttattactgagaatgacgtcaaagaagggttgcagagatcacacattctgtacgacagagctggagaggaacattacaattgcataagcgccctccacaagtctatgcgaggctcagatcaaaacgctagcctctattggctggccagaatgctggagggtggcgaagaccctctttacgtggctcgcaggcttgttcggtttgctagtgaagacattggattggctgatccctccgccctgacacaggcggtagccgcataccagggttgtcatttcattgggatgcctgagtgtgaggtcctgttagcccaatgtgtcgtgtatttcgcgagagcccctaagagcatagaagtgtattcagcttacaacaatgtgaaagcttgcttgcgtaatcaccagggacccctacctcccgtcccattgcaccttcggaacgcccctactaggctcatgaaggacctgggatacggtaaggggtacaagtacaaccccatgtattccgagccagttgaccaagaatatcttcctgaggagctccgcggagtggacttctttaaacagagacgatgctag

SEQ ID NO: 246858 - DNA, 4299 bp, synthetic construct
  misc_feature 1..4299: note = Description of Artificial Sequence: Synthetic coding sequence
  source 1..4299: mol_type = other DNA
atgtccgaaaaaaagttagagaccactgcacagcagaggaagtgtcctgaatggatgaacgttcagaataaacggtgtgccgttgaagaacgcaaggcatgtgtgcggaagagtgtgtttgaggatgatctaccttttctcgaattcacaggttctatcgtttactcatatgacgcgagtgactgctcatttctgagcgaggatattagtatgtccctgtctgatggagatgttgtcggctttgatatggagtggcctcccctgtataaccggggaaagctcggcaaagtcgcactgattcagttatgcgtctccgagtcaaagtgctacctgtttcacgtctcctctatgtctgtgtttcctcaaggcctgaagatgctgcttgaaaacaaagctgtgaagaaagctggagtcggtatcgaaggtgatcagtggaaattgctgcgagactttgacatcaagcttaagaacttcgtcgagttgacggatgtggctaataagaaacttaagtgcacggaaacgtggtcgctgaacagtctggtgaaacacttactaggcaagcaattgcttaaagataagagtatccgttgcagtaattggtcaaagttccccctcacagaagaccagaaactttacgcagcgacagacgcatacgcgggtttcattatctataggaacttggagatactcgatgataccgtgcagcgcttcgccatcaacaaggaggaggagatcctgttatcagacatgaataaacagcttacttccatttcagaggaagtgatggacctggccaaacatctcccccacgctttcagcaagctcgaaaatccacgccgtgtgtcaatcctgctcaaggacatttcagagaatctatatagcttgaggcgcatgattatcgggtccacaaacatcgaaacagagcttagacccagtaataacttgaatcttctcagctttgaggatagtactaccggtggagtacaacagaagcagattagagagcacgaggtacttatccacgtggaagatgagacatgggaccctaccttggatcacctggccaagcacgacggtgaggatgtgctcggcaacaaggtcgaaaggaaagaggacggctttgaggacggcgttgaagataacaagctgaaagagaatatggagagggcctgcctgatgagccttgatatcactgaacatgaactgcagatccttgagcagcaaagccaggaggaatacctgtccgacattgcatataaaagcactgagcacctctcgcccaatgacaacgagaatgatacatcgtacgtgatcgagtccgatgaggacctggagatggaaatgctgaagcacttgtctcccaacgataacgagaatgatacgtcctacgtcattgaatccgacgaagatctggaaatggagatgttaaagagtctcgaaaatttaaattccggtacagtagaaccgacccatagtaagtgcctcaaaatggagcggaacttgggactaccaaccaaagaggaagaagaagacgatgagaacgaggcaaatgagggcgaggaggacgacgacaaggacttcctctggccagccccaaatgaggagcaggtcacctgtctgaagatgtatttcgggcattccagtttcaagccagtccagtggaaagttattcattccgtgctggaggaaaggagagacaatgtagccgtgatggcgactggttacggcaaatcactgtgcttccagtaccccccagtctatgttggcaagattggcctggttatctcccctttgatctctctgatggaggaccaggtacttcagctcaagatgtctaatattcccgcatgtttcctgggcagtgctcagtcggagaacgtgctgaccgacataaagctcggcaagtatcgcatagtttacgtgacgccggagtattgctccgggaacatgggtctccttcagcagttagaagcagatatcgggattactctcatagccgttgacgaggcccactgtatatccgagtgggggcatgactttcgagactcgttcaggaagctaggctccctgaagacagcactgccaatggtccctatcgtagccctgactgcaaccgctagcagctccatcagagaagacattgtccgctgtcttaacctcagaaatcctcaaataacttgcactgggttcgacaggcccaatctttacttagaagtgagacgaaaaaccggtaacatcctgcaagacttgcagccttttcttgttaaaacgagttctcattgggaatttgaagggccaactatcatctattgtccctccagaaaaatgacacaacaagtaacaggagaactgcgcaagctaaatttgagttgtggaacttaccacgcagggatgtccttcagtactagaaaagacatccaccatagatttgtgcgcgatgaaatccagtgtgtgatagcaacaatcgctttcggcatgggcatcaacaaggccgacatccgccaagtcatccactacggtgcccctaaagatatggagtcctactaccaggagatcggccgtgctggcagagacggactccaatcctcgtgccacgttctatgggctccagccgacattaatttaaatagacatcttttaaccgaaattcgtaacgagaagttcagactgtataagctgaaaatgatggccaagatggagaaatacctgcattctagccggtgcaggcgacagataatcttgagccatttcgaagacaaacaggtgcagaaagccagcttgggcatcatgggtactgagaaatgctgcgacaattgtaggtcaagactcgaccattgctatagcatggacgattcagaggatacgtcttgggacttcgggccacaagcgtttaagcttttatcagcggtcgacatcttgggcgagaagttcgggatcggccttccaatcctatttcttaggggcagcaactcccagaggctggctgatcaatatagacggcatagcttgttcggaaccggcaaagaccaaactgagtcctggtggaaagccttctccaggcagctaattacggaaggatttcttgtggaggtttccagatacaacaagtttatgaagatttgtgcactgaccaagaagggccgaaactggctgcataaagcgaacaccgagtcccagtcactaatcttgcaggcgaatgaagaactttgtccaaagaaactcctcctgccctcttctaagaccgtcagtagtggcaccaaggagcattgctacaaccaggtgcctgtcgagctgtccaccgagaagaagagcaacctggagaagctctacagctataaaccatgtgacaaaatcagtagtggctcgaacataagcaagaagtctatcatggttcaatcacccgagaaagcatacagcagttcccaaccggtaatttcagctcaggaacaagaaactcagatcgttctgtatggcaagttagttgaagctaggcaaaaacatgccaacaagatggatgtgcctcccgctattttggccacgaacaaaatcctggttgacatggctaagatgcggccaactacagtcgaaaatgtgaaacgtatcgacggggtatcagagggtaaagctgccatgctcgccccacttctggaggtcatcaaacacttttgtcagacaaatagcgtgcagactgacttattcagctctacgaaaccacaagaggagcagaagaccagtctggtggctaagaataaaatctgcaccctctctcagtctatggcaatcacatatagccttttccaggagaaaaagatgcccctgaaaagcatcgcagaaagcagaattctgccccttatgacaatcggcatgcacctgtcacaggcagttaaggccggttgccctctcgacttagagcgggcagggcttacacctgaggtccaaaagattattgcggatgtcattagaaaccccccagtaaatagtgacatgagtaagatttcacttattagaatgttggtgcctgagaacatagacacatatctgattcacatggccatagagatattgaagcacgggcctgattcgggtcttcagcctagctgcgacgttaataagcgtaggtgcttccccggatcggaggagatttgcagcagctcgaagaggtctaaggaagaggtcggcatcaacacagagacttctagtgccgaaaggaagagaagactccccgtgtggttcgccaaaggatctgatacttccaagaaactgatggataagaccaagcgtggagggttatttagctag

SEQ ID NO: 246859 - DNA, 738 bp, synthetic construct
  misc_feature 1..738: note = Description of Artificial Sequence: Synthetic coding sequence
  source 1..738: mol_type = other DNA
atggctcaggaggaaggtgggtcccttccagaagtcagggccagagtgcgcgcagctcacgggattcccgacctggcccaaaagctgcacttttacgatcgatgggctccagattacgatcaggacgtcgccaccctcttatatcgcgcaccacgtctagctgtcgattgtctcacccaggccctgcctggtcccccacacagtgccctgattcttgatgtagcgtgtggcactgggttggtggccgctgagttacgcgctccaggcttcctgcagctgcacggagtagatggttccccaggcatgctcgaacaggcccaagcgcctggactttatcagcggctctctctgtgcaccctggggcaagagccactacctagtcctgagggcacgtttgatgcagtccttatcgtgggcgcactgtcagacggccaggttccttgcaacgcaatccctgaattacatgtcacgaaacccggtggcttagtctgcttgacaacccggaccaattctagtaatctgcaatataaagaggccttggaagcgactctggataggttagaacaggcgggtatgtgggaaggacttgtagcctggccggtcgacaggctgtggacagcaggttcctggttgccgccatcgtggaggtggtaccccgcttcactgccacggatggcctctagccccgctctgtccacatgtactgagagcggtaggcggccacggctgcgcaagtag

SEQ ID NO: 246860 - DNA, 798 bp, synthetic construct
  misc_feature 1..798: note = Description of Artificial Sequence: Synthetic coding sequence
  source 1..798: mol_type = other DNA
atggaggcattacccccagttagatcgtctctcctgggaattctcctgcaggtcactcgcctttccgtcctgcttgtgcagaaccgcgaccatttgtacaattttctgctattgaagatcaatctgttcaatcattgggtgagcggcctggcacaggaagcaaggggctcgtgtaactggcaggcccatctgcccttaggcgcagccgcatgccctcttgggcaggccctgtgggctgggctcgccctgattcaagtccctgtgtggctggtgttgcaggggcctcgccttatgtgggccggaatgtggggaagcaccaaaggcctcggcttggcccttctgtctgcgtgggagcagctgggtctgtctgtagctatctggacagaccttttcctcagctgcctccatgggctgatgctagtcgccctgctgctcgtcgttgtgacctggagggtctgtcagaaatctcactgctttaggctgggcagacagctcagcaaagctcttcaagtgaattgcgtggtcaggaagttacttgtgcagcttcgaaggctatattggtgggtggagaccatgacagcgctaactagctggcacctagcctatctcatcacatggacaacttgcctggccagccaccttctgcaggccgcatttgaacacaccacccaactggccgaggcgcaggaggtggagcctcaggaggtgtctggctcgtccttactgcctagcctgagtgctagctcagatagtgaaagtggcactgtgctgccagagcaggaaacacctagagagtag

SEQ ID NO: 246861 - DNA, 456 bp, synthetic construct
  misc_feature 1..456: note = Description of Artificial Sequence: Synthetic coding sequence
  source 1..456: mol_type = other DNA
atgacaaacgaggagccgctgcccaagaaggtcagactttctgaaaccgacttcaaagttatggccagagacgagctgattctccggtggaaacagtacgaagcctacgtccaggccttggagggcaaatacaccgatctcaactccaatgacgtgactggactcagggaatctgaagaaaaactgaagcagcaacagcaggaaagcgccaggagagaaaacattctggttatgcgccttgcaacaaaggagcaggagatgcaggaatgtacaacacagatacagtatctgaagcaggttcagcagccatcagtagctcagctgagatctaccatggtagaccccgctattaatttgtttttcctgaagatgaaaggagagctggaacagaccaaggataagctggagcaggcccagaatgagctatcagcatggaaatttactcccgatcgctag

SEQ ID NO: 246862 - DNA, 1191 bp, synthetic construct
  misc_feature 1..1191: note = Description of Artificial Sequence: Synthetic coding sequence
  source 1..1191: mol_type = other DNA
atgacgaatgaggaacccttgcctaaaaaggtccggctgtccgagacagacttcaaggtcatggcccgtgacgagctaatccttagatggaagcagtacgaggcttacgtgcaagctctcgagggcaagtacaccgatctcaactccaacgatgtcacaggtttgagggaaagcgaggagaaactgaagcagcagcaacaggaaagtgccaggcgggaaaacatcctcgtgatgaggttggccaccaaggagcaggagatgcaggagtgcaccactcagattcagtatcttaaacaggttcagcagcctagtgtggcccagttgcggtcaacaatggtggatcccgctataaatcttttctttctgaaaatgaagggagaactcgagcaaacgaaagacaagttagaacaagcccagaacgaattatcagcatggaaatttacgccagacagccagactggtaagaaattgatggcgaagtgccgcatgctcatacaggagaaccaggagctgggcagacagttgagccaaggtcgcatagcccagctcgaagccgaattagctctgcaaaaaaagtacagcgaagaacttaaaagcagccaagacgaactgaatgactttattattcagcttgatgaagaggtggaaggtatgcagagcacgattctggttctccaacaacagttgaaggaaactaggcagcaactcgcacagtaccagcagcagcagagccaggcaagcgccccttcgacgagcaggactaccgctagtgagcccgtggagcagtccgaagctacttctaaggactgttcccggttgacaaacggcccatcaaatggctcctcctctaggcagagaacgtcaggtagcggattccatagggaggggaatacaactgaagacgattttccctcatcacctgggaacggcaacaagtcttctaattcctccgaggagcgaacagggagaggaggcagcggatatgtcaaccagctctccgcgggatatgagtcagttgattcacctacagggtctgagaactccttaacccaccagtccaacgatacggactctagtcacgacccccaagaggaaaaagcagtgagcggcaagggtaatcgtacagtagggagccgccatgtgcagaacgggttagattctagtgttaacgtgcaggggtctgtgctatag

SEQ ID NO: 246863 - DNA, 1083 bp, synthetic construct
  misc_feature 1..1083: note = Description of Artificial Sequence: Synthetic coding sequence
  source 1..1083: mol_type = other DNA
atgaacgctcctctgggcggtatttggctgtggctccctcttctgctgacttggctcaccccagaagtcaactcctcatggtggtatatgagagcaactggaggctcatcgcgggtaatgtgtgataatgttcccggactggtgagttcgcagcggcaactgtgccataggcacccagacgtcatgagagccatcagtcagggagtagctgagtggacagccgagtgccagcatcagtttcggcagcaccggtggaattgcaacaccctggatcgcgaccattcgctgtttgggagggttctgctgcgctcctcgagggagagtgccttcgtgtatgcgatttcctctgccggtgtcgtgtttgccatcacaagggcatgttcacagggcgaggtgaaaagctgcagctgtgaccccaaaaaaatgggctccgctaaggattcgaaagggatctttgattggggcggttgcagtgataacatagactatgggattaaattcgcccgtgcatttgtggatgccaaagagcgcaaaggtaaggatgcccgtgccctgatgaaccttcacaataatagagccggacggaaagccgtgaaacggtttctgaagcaagaatgtaagtgccacggcgtctcaggcagttgcactttgcgaacatgttggctggccatggcagattttaggaagacaggggactacctttggcggaagtataacggggcaattcaggttgtaatgaatcaggacggcaccggctttacggtcgctaacgagaggtttaagaagcccacaaagaatgacctcgtttactttgaaaatagccctgactattgtattagggatagagaggctggtagtttgggaaccgccggtagggtgtgcaaccttacctcacgaggcatggacagttgcgaggtgatgtgctgtggcagagggtacgatacgtcccacgtcacccgcatgactaaatgtggatgcaagttccactggtgctgtgcagttagatgccaggattgcctggaggctcttgatgtccacacatgcaaggcacccaagaacgccgattggaccacagcaacgtag

SEQ ID NO: 246864 - DNA, 1113 bp, synthetic construct
  misc_feature 1..1113: note = Description of Artificial Sequence: Synthetic coding sequence
  source 1..1113: mol_type = other DNA
atgggactttgggctctgctgccgggttgggtttctgctactctactcctggcattggcagccctgcctgctgctttagccgctaattcaagcggcagatggtggggcatcgtcaacgtggcttcttccacaaacctactgactgactcaaaaagcctgcagttagtactcgagcccagtcttcagttgctatcacggaaacagcgtaggctgataaggcagaaccctggcatccttcacagcgtatctgggggattgcagtctgctgtgagggaatgtaagtggcagtttcgtaatagaaggtggaactgtcccaccgcgcctggaccgcatctcttcgggaagatcgtgaataggggttgtcgcgagactgcgttcatatttgccatcacaagcgccggagtgacacacagcgtcgcgagaagctgcagtgagggcagcattgagagctgtacttgtgactaccgccgtagggggcctggcggacctgactggcattggggcggatgcagcgacaacatcgactttggtagactcttcggcagagaatttgtcgattcaggagagaagggcagggatctgaggtttttgatgaacctgcataataatgaggcgggacgcaccacagtattttccgagatgcggcaagagtgcaagtgccacggtatgtctggcagctgcacagtgcgaacctgctggatgcggcttcctacgctgcgtgcagtaggagatgtcctgcgggacaggttcgacggggcttcaagagtgctgtacgggaaccggggttccaaccgagcatcccgagctgaactgctgcggttggagcccgaagatcccgcacataagcccccatcccctcacgaccttgtgtatttcgagaagagtccgaacttctgcacttactccggacgccttggtacagccggtactgctggcagagcctgtaatagcagctcccccgcacttgatggttgcgaattgctatgctgtggacgcggacaccgcaccaggacgcaacgcgtgactgagcggtgcaactgcactttccattggtgctgccacgtgtcctgtagaaactgtacacatacccgcgtgctccacgagtgcttatag

SEQ ID NO: 246865 - DNA, 588 bp, synthetic construct
  misc_feature 1..588: note = Description of Artificial Sequence: Synthetic coding sequence
  source 1..588: mol_type = other DNA
tggcattggggaggatgttcagataatattgattttggtagactgttcggcagggaatttgttgattctggcgagaaaggacgcgatctgcgcttcctcatgaatttgcataacaatgaagctgggcgaacaacagtgttctctgaaatgaggcaagagtgcaaatgtcacggcatgtccggcagttgcactgtgaggacctgctggatgcgattgccaactttacgggctgtaggcgacgtgctgcgggatcgatttgacggggcttccagagtcctatacggcaacagggggtcaaaccgtgcaagccgtgccgagctgctgcggctggagcctgacctggtttacttcgaaaagagcccgaacttctgtacgtactccggcaggctgggaaccgcagggaccgcagggagggcctgtaactcttcttctcccgcactggacggatgcgaacttctctgttgcggcagggggcaccggactagaactcagcgtgtcactgagcgctgcaactgcaccttccactggtgctgtcacgtgagttgtaggaattgtacacatacacgggtgctccatgaatgtctttag

SEQ ID NO: 246866 - DNA, 1254 bp, synthetic construct
  misc_feature 1..1254: note = Description of Artificial Sequence: Synthetic coding sequence
  source 1..1254: mol_type = other DNA
atgggctcggcgcacccgcgtccatggctgcgattgagaccccagcctcagcccagaccagccctttgggtgttgttattttttctcctcctcctggctgccgcaatgcctcggtccgcccctaacgacattctcgatctcagactcccacccgagccagtgctaaatgctaatacagtgtgcctgacattacccggtctgtcccgcagacagatggaagtgtgtgttcgtcatccagacgtggcggcttccgctatccaagggatccagattgccatacacgagtgtcagcatcagtttcgcgatcagcgctggaattgttcctctctcgagacacgcaacaagataccatacgagagcccaatcttcagcaggggtttccgagagtccgcatttgcctacgccattgctgccgcaggcgtcgtccacgctgtgtccaatgcctgcgctcttggcaagctgaaggcatgcggatgcgatgcttctcgacgcggagacgaggaagcttttcgacgcaagctgcacagactccagctggatgcacttcagaggggcaaggggctgagccacggggtccccgaacaccctgccctccctacagcgtctccaggcctccaagattcgtgggagtggggaggatgctcacccgatatgggctttggagagagattttcaaaagacttcctggatagtcgcgagcctcaccgtgacattcacgcacggatgcggctgcacaacaaccgggtgggcaggcaagccgtgatggagaacatgcggaggaaatgcaaatgccacgggacatccggctcctgccagcttaaaacatgttggcaggtgacccccgaatttcggactgtgggcgcactcctgcgcagtcgatttcaccgagctaccttgatccgccctcacaacaggaatgggggtcagctggagcctggtccggctggcgctccgtcaccagccccaggtgcgcctgggcctcgaagaagagccagccctgccgacctagtctactttgaaaagagtcccgacttctgcgaacgtgaaccacggctcgattcagcaggtacagttggtagactgtgtaacaagtcttcagcaggtagtgacggatgtggctcaatgtgttgcggcagaggacacaacatccttagacagacaagatcagaaagatgtcactgccgattccactggtgctgctttgttgtatgcgaagagtgccgtattactgaatgggtgtccgtctgcaagtag

SEQ ID NO: 246867 - DNA, 1170 bp, synthetic construct
  misc_feature 1..1170: note = Description of Artificial Sequence: Synthetic coding sequence
  source 1..1170: mol_type = other DNA
atgctggaagaacctcgaccacgcccacccccttcagggctcgcgggtttgctctttctagcactgtgttctcgggctctctccaatgagattttgggtctcaagcttccaggggaacctccccttaccgccaacactgtgtgcctgacactcagtggtctgtccaagcgccagctggggctttgcttaaggaatcccgatgtgacggcttccgccctgcagggactgcacattgccgtccacgaatgtcaacatcaactgagggatcagagatggaactgtagtgccctcgaaggcggaggtcgtctgcctcatcacagcgccattttaaagagaggcttcagagaatctgctttttccttttcgatgctggccgctggggtgatgcacgcggttgccacagcgtgcagcttgggcaaattggtgagctgtggctgcgggtggaaaggctctggagaacaagacaggctccgcgcaaagcttctacagttgcaagctctgagtagggggaaaagcttcccccattccctaccgtcaccgggacctggtagcagcccctcaccagggccacaggacacctgggagtggggtggatgtaatcacgacatggactttggagagaaattctcaagggactttcttgacagtagagaggcccctcgggatattcaagctaggatgcgcattcacaacaatcgagtgggcagacaggtcgtaaccgagaacttaaaaagaaaatgtaaatgtcacggcacctctggcagttgccagtttaagacgtgttggcgtgccgctcctgaatttagggctgtgggagcagcactcagagagcggctgggtcgtgctattttcatcgacacgcacaaccgaaacagcggggctttccaacccaggttgcgaccgagaaggctgtctggagagttagtctatttcgagaaaagtcccgacttctgtgaaagggaccctactatgggaagtcccggtactaggggcagggcatgtaacaaaacatccagactgctggatggatgcggttctttgtgctgtggaaggggccacaatgtgctgagacaaaccagggtggaacggtgtcactgtagatttcactggtgttgctacgtcctctgtgatgagtgcaaagttacggagtgggtcaatgtgtgtaagtag

SEQ ID NO: 246868 - DNA, 576 bp, synthetic construct
  misc_feature 1..576: note = Description of Artificial Sequence: Synthetic coding sequence
  source 1..576: mol_type = other DNA
atgctcgaagagcctcgcccacgcccaccacctagcggcttggcaggactgctgtttttggccctctgttctcgcgctctgtctaatgagatcctcggactcaagctgcctggcgagccaccactgacagctaacacggtgtgtctgacactgtccggcctcagtaaaagacagctcggtctctgtctccgaaaccccgatgtcaccgccagcgcactccaagggctgcatatagctgtacacgagtgccagcaccagctgcgggatcagcgctggaattgcagcgcattggaagggggaggaaggcttcctcaccattccgcaatcctcaagcgtggatttcgcgaatcagccttttccttttctatgttggccgctggtgtgatgcacgctgtggccaccgcatgtagcttgggaaaacttgtttcttgcgggtgcggctggaaaggaagcggcgaacaagataggctgcgggctaaactgctgcaattacaagctttaagtcggggaaaactgccgggtaccagcagacacgagtgtgagtcaaccacgactggttggggcgctaggtggtag

SEQ ID NO: 246869 - DNA, 309 bp, synthetic construct
  misc_feature 1..309: note = Description of Artificial Sequence: Synthetic coding sequence
  source 1..309: mol_type = other DNA
atgctcgaggaacctcgccctagacctcccccaagcggactcgcaggcctcctgtttctggcgctttgtagtcgagcgctgtctaatgagatacttggtctgaaactgcccggagaaccacccctaaccgcaaatactgtgtgtctcactttgtccggcctgtccaaaaggcagttaggtctgtgtctaaggaacccagacgtcactgccagcgcgcttcagggactccatatcgccgtccacgaatgtcagcaccagctgcgcgaccagcgctggaactgtagcgccctggagggaggcggtcgctag

SEQ ID NO: 246870 - DNA, 354 bp, synthetic construct
  misc_feature 1..354: note = Description of Artificial Sequence: Synthetic coding sequence
  source 1..354: mol_type = other DNA
atggccttggagactgtccctaaagacttacgtcatctgcgtgcatgcctgctctgctccctggttaaaacgatcgaccagttcgaatatgacggctgcgataattgcgacgcttatctgcagatgaaggggaatcgcgagatggtctatgattgtactagcagtagttttgatggtatcatcgctatgatgtcacctgaggactcttgggtctccaaatggcagagggtttctaactttaaaccgggagtctatgcagttagcgtgaccggcagattgccccaggggatagtgagggaactgaagtcacgcggtgtagcatataaaagccgcgacacagctatcaagacctag

SEQ ID NO: 246871 - DNA, 1059 bp, synthetic construct
  misc_feature 1..1059: note = Description of Artificial Sequence: Synthetic coding sequence
  source 1..1059: mol_type = other DNA
atggctcctctcgggtatttcctcctgctatgcagtctcaaacaggctctgggcagttaccccatatggtggagtctcgccgtgggtccacagtactcctccctggggagccagccaattctgtgcgctagtatcccaggcctggtccccaagcagctgcgtttctgtaggaattacgtggaaatcatgccatctgtcgccgaaggcatcaaaatcggaatccaggagtgtcagcaccagtttaggggcaggagatggaactgcacaactgttcacgactcgctggctatattcggaccagtgctcgacaaggccacgcgggaatccgcatttgtacatgcaatagcatcagccggtgttgcattcgccgtcacaaggtcctgcgctgaagggactgccgctatctgcggctgcagcagccgccaccagggatcaccaggaaaaggctggaaatggggcggatgctcagaggacatagagttcggaggcatggtgtcccgagaattcgcagatgccagggaaaatcgccctgacgctcgttccgccatgaatcgtcacaataacgaggccggacggcaggcaatcgcctcacacatgcacctgaaatgcaagtgtcatgggttatccggatcttgcgaagtaaaaacttgctggtggtctcaaccagacttcagggctattggagattttctcaaggacaaatacgattctgcaagcgaaatggtggtcgaaaagcacagggagtcccgtggctgggtggaaacattacggccacggtatacatatttcaaagtgccaacagaacgagacttggtctattatgaggctagtccaaatttctgtgagccgaatcctgaaacagggtcattcggaaccagggaccggacctgcaatgttagtagccatgggatcgacggatgcgacttactgtgctgtggcagagggcacaacgccagggccgaaaggagacgtgagaaatgcaggtgcgtttttcactggtgctgttacgtgagctgtcaggagtgtacgagggtctatgatgtgcacacctgtaagtag

SEQ ID NO: 246872 - DNA, 1158 bp, synthetic construct
  misc_feature 1..1158: note = Description of Artificial Sequence: Synthetic coding sequence
  source 1..1158: mol_type = other DNA
atggccccattgggctactttttactgttgtgctcattgaagcaggcactcgggtcttaccctatttggtggagtctggccgtgggccctcaatactcatcgctggggtcccagccgatactgtgcgcttctatcccagggctggttcccaagcagcttcggttttgtagaaattatgtggagatcatgccttctgtggctgagggcatcaagattggaattcaagagtgtcagcaccagttcagaggccgtaggtggaattgcactacagtgcacgacagcctcgcgatcttcggtcctgtgctagataaggccacccgggaatcagctttcgttcatgctatcgcatccgccggtgttgcctttgccgtcacccggtcctgcgccgagggcaccgccgcaatatgtggttgctcatcccgtcatcaggggagcccaggcaaaggctggaagtggggaggctgtagcgaagacatagagttcggtggaatggttagtcgtgagttcgccgacgccagggagaaccgtcccgacgctagaagcgccatgaataggcacaacaatgaggcagggagacaggctatagcctcacatatgcacctcaagtgtaagtgccatggtctctcgggctcttgtgaagtaaagacttgctggtggtcccagccagatttccgagctataggtgattttttaaaagacaaatatgattcagcgagcgaaatggtagtcgagaaacacagagagtccagaggatgggtcgaaacgctgaggccgcgatacacctattttaaagtgcccaccgaaagggacctcgtgtactacgaagcaagccccaatttttgcgagccgaacccggaaactggaagtttcggaacacgggaccggacctgcaacgtttctagccatggaatagacggatgcgatcttctctgctgcggccgaggccataatgctcgtgctgaaaggaggcgcgagaagtgccggtgtgtgttccactggtgttgttacgtaagctgccaggagtgtaccagagtgtatgatgtgcacacctgcaaaaacccagggagccgcgcaggaaactccgcacaccaacctccccatccacagcctcccgtcagattccatccccctctgaggagggccggaaaggtcccttag

SEQ ID NO: 246873 - DNA, 1056 bp, synthetic construct
  misc_feature 1..1056: note = Description of Artificial Sequence: Synthetic coding sequence
  source 1..1056: mol_type = other DNA
atgtcccccaggtcatgcttaaggtccttacgcttgctggtttttgccgttttctccgctgctgcctccaactggctgtatctggccaagctctcatcagtgggttccatcagtgaggaggagacctgcgagaagctgaagggactgatccagcggcaggttcagatgtgcaaacggaatctcgaggtgatggattcagtgcggagaggcgctcagctggccatcgaggagtgccagtaccagttccgcaatcgtaggtggaattgctctacactggattcccttcccgtgttcggcaaggtcgttacacaggggacgagagaggcggcatttgtctacgctatttcttctgctggcgtggcctttgcagtgactcgtgcttgttcctcaggtgagctcgaaaagtgcggatgcgataggaccgtacatggcgtatcaccacaaggctttcaatggtccggttgcagtgacaacatcgcttatggggttgccttctctcaaagtttcgtagatgtccgagaacgctctaagggcgcttcctccagccgcgcattaatgaatttgcacaataacgaagctgggagaaaagctatattgacacacatgcgcgttgaatgtaaatgccacggtgtatcggggtcctgtgaagtgaaaacatgctggagagctgtcccgcctttccggcaagtaggtcatgcgctcaaggaaaagttcgatggagctacagaggtggaacccaggcgcgtcggctcgtcacgggctttggtgcccagaaacgcccaattcaagccccacaccgacgaagacctggtatatttggaaccatcccccgatttctgcgagcaggacatgcgtagcggcgtgctcggaaccagaggaaggacatgcaacaaaacctctaaggctattgacggctgtgaacttctgtgctgtggcagaggctttcacacggcccaggttgagttagctgaacgctgcagttgtaagtttcattggtgctgttttgtcaaatgcaggcagtgtcagaggctggtcgagttgcacacctgtagatag

SEQ ID NO: 246874 - DNA, 528 bp, synthetic construct
  misc_feature 1..528: note = Description of Artificial Sequence: Synthetic coding sequence
  source 1..528: mol_type = other DNA
atgtcaccaaggtcatgcctcagatccctcagactgctggtatttgcagtgtttagtgctgccgcatccaattggctatacctggcaaagcttagttctgtgggtagtatttcggaggaggaaacctgtgagaagctaaaggggctgatccaaaggcaggtccagatgtgtaagcgaaatctggaagtgatggactcagtgagaaggggggctcaactcgctatagaggagtgtcaatatcagttccggaaccgcagatggaactgctctacattagacagcttgcccgtgttcgggaaggtggtgacacaaggtggcaaggcctggcacgggggagactccgggtgccatttgctgactgaatcccggtcgggggagcggacccagagaagaaaggagggcggaagcctcggccaatgctggcccgaggccatcgtgggcactcaggatccaatgaggagccctccgtatctctggggacgaaaccaaggcggtacacacaccgggagtgcgagcgaaggccactag

SEQ ID NO: 246875 - DNA, 453 bp, synthetic construct
  misc_feature 1..453: note = Description of Artificial Sequence: Synthetic coding sequence
  source 1..453: mol_type = other DNA
tgatacctggcgaaattgagcagcgtggggagcatttccgaggaagagacatgcgagaagctcaaggggctcattcagcgacaggtacagatgtgtaaaagaaacttagaggttatggacagcgtgcggagaggcgcacagttagccatagaagaatgccagtatcaatttcgcaatcgcagatggaactgcagcactcttgactctctaccggtgttcggaaaggtcgtcacccaagggggtaaagcttggcatggcggtgactccggatgccacttactgaccgaatccagaagtggcgaacgcacccaaaggcgaaaggaagggggaagtttaggccagtgttggccagaggccatcgttggcacccaggatccgatgcggtcgccaccatacctatggggcagaaatcaagggggtacgcacacgggatccgccagtgaggggcattag

SEQ ID NO: 246876 - DNA, 159 bp, synthetic construct
  misc_feature 1..159: note = Description of Artificial Sequence: Synthetic coding sequence
  source 1..159: mol_type = other DNA
atgtgcaagaggaacctggaggtgatggattctgtccgtagaggcgctcagctggctatcgaggaatgccagtaccagttccgaaacaggaggtggaactgctccacactcgactcccttcccgtcttcgggaaagtggtgacacaggggggaaagtag

SEQ ID NO: 246877 - DNA, 891 bp, synthetic construct
  misc_feature 1..891: note = Description of Artificial Sequence: Synthetic coding sequence
  source 1..891: mol_type = other DNA
atgtgtaagagaaacttagaagtcatggactcagtgcgccgaggcgcacagttggctatcgaggaatgccagtatcaatttcgtaaccgtagatggaattgttctaccttagattcactgccagtcttcggcaaggtcgtgacgcagggaacacgggaagctgcgtttgtttacgctatttcttccgcaggcgtggcgttcgctgtcacacgcgcatgttcttctggcgaactagaaaaatgcggatgcgatcgaactgtacacggcgtgtctccacagggattccagtggtctggctgcagcgataatatagcgtacggcgttgccttctctcaatcctttgtggatgtgagagagcgttctaaaggtgctagttctagcagggccctaatgaatctccataacaacgaggccggacgaaaagctatcttaacccacatgcgagtcgagtgcaagtgccatggcgtctctggaagctgcgaggtcaaaacttgctggcgggctgtcccccctttcaggcaggtggggcacgctctcaaggaaaagttcgatggtgcaacagaagtcgagccgcgaagagtgggaagttcccgagccctggtgcccaggaacgctcagttcaagcctcatactgacgaagacctcgtctacctggagccgtccccagatttctgtgagcaggacatgcgcagcggagtccttggcaccagaggtagaacatgcaacaagacgtccaaggcaattgacggctgtgaactgctgtgctgcggtagagggtttcatacagcccaggtggagctcgcagagcggtgctcttgcaagtttcattggtgctgctttgttaagtgcagacagtgccagcgcctggtggagcttcacacctgtcgctag

SEQ ID NO: 246878 - DNA, 1710 bp, synthetic construct
  misc_feature 1..1710: note = Description of Artificial Sequence: Synthetic coding sequence
  source 1..1710: mol_type = other DNA
atgaaagtgcttctacgcctaatctgcttcattgctctgttgatctctagcctggaggctgacaagtgcaaagagagggaggagaagattatcctggtttcgtcggccaatgagatcgatgtgcgcccttgcccacttaatcccaacgagcataaagggaccataacctggtacaaggatgattctaaaacacccgtgtcgacagagcaggcgagcaggattcatcagcacaaagagaagctctggtttgtacccgctaaagtggaagatagtggccactactactgtgtggtgcggaacagctcatactgtttacggattaaaatcagcgccaagtttgtcgaaaacgaacccaatctgtgctataatgcgcaagctatcttcaaacagaagctcccagtggccggagatggcggactggtctgtccgtatatggaattctttaaaaacgagaacaatgaattgcctaagctacagtggtataaggactgcaagcccttactccttgacaacatccatttcagtggggttaaggatcggctgatcgtcatgaatgtcgccgaaaaacacagaggaaactatacttgtcacgcttcctacacataccttgggaaacagtatcccatcacccgggtaatcgagttcataaccctggaagagaacaaacctacgcggcctgttatcgtctcgccagcgaacgaaaccatggaagtggatcttggctcccagatccagctgatttgcaacgtgacaggtcagctctctgatatcgcctactggaaatggaatggcagcgtgatcgacgaggacgacccggtgctgggagaggattattattccgtcgaaaacccagccaataaacgcaggtcaacactgattactgttctgaacatctccgagatcgaatcccggttctacaagcatcccttcacctgttttgccaagaatacgcacgggatcgacgccgcttatattcaattaatttatcctgtgacaaatttccagaagcacatgatcggcatttgtgtcactctcacagtaatcattgtctgctctgtctttatttacaaaatcttcaagatcgatatcgtgctgtggtatcgagactcatgctacgatttccttccaatcaaggcttccgacggtaaaacttacgacgcatatatcttgtaccctaaaacagtgggggaggggtccaccagtgactgtgatatcttcgtctttaaagtgcttccagaggtgctcgagaagcagtgcgggtataaactgttcatatatgggagggatgactacgtgggcgaggatatagtggaggtcattaacgagaatgtaaagaagagccgtagattaataatcatcctggtccgggagacctcaggattctcctggctgggcggttcctccgaggagcaaatcgccatgtacaatgcactcgtccaggacggtattaaggtggtccttctggagctagagaaaatccaggattacgagaagatgccggagtccataaagtttatcaagcaaaaacacggcgcaatcagatggagcggtgacttcacccaggggcctcagtctgccaagactaggttttggaaaaacgtgaggtatcatatgcccgtacagcgaaggtccccttctagtaaacatcagctgctgtcccctgccacaaaggagaaactgcagcgggaggcccacgttcccctgggatag

SEQ ID NO: 246879 - DNA, 1050 bp, synthetic construct
  misc_feature 1..1050: note = Description of Artificial Sequence: Synthetic coding sequence
  source 1..1050: mol_type = other DNA
atgaaccgaaaagcccgtcgctgtctgggccatttatttctgagcttggggatggtttacctgcgtattgggggattctcaagcgtcgtggcattgggtgctagcattatttgcaataagatccccggtctggcgcctagacaacgcgctatctgccaatcccggccagatgccataattgtaattggagagggatcacagatgggcctggacgagtgtcagtttcagttccggaacggaagatggaactgtagcgcccttggcgaacggacagtgttcggcaaagagctgaaggtcggcagccgggaggctgcttttacatatgccattatcgccgcaggcgtggcccacgctattacagcggcttgcactcagggaaacctcagtgactgcgggtgtgacaaagaaaagcagggccaataccacagagacgaagggtggaagtggggcggatgcagcgccgatattagatacggaataggctttgccaaagtgttcgtcgacgcacgcgaaatcaagcagaacgctcgaactttaatgaatcttcacaataacgaggctgggcgaaagatcctggaggaaaatatgaaattggaatgcaagtgccacggggtgagtggtagctgtacaactaagacatgctggacaaccctaccacagttccgcgaactggggtatgtgctgaaagacaagtacaacgaggccgtgcacgtggagcccgtgcgcgcttcgcgaaataagaggcctacatttctcaagataaagaaacctctgtcttaccgcaaacctatggatacggacctcgtttatatcgagaaatccccaaactactgtgaggaagacccagtaaccggtagtgtgggaacacagggacgcgcatgcaacaagactgcccctcaggcaagtggttgtgacctgatgtgttgtgggaggggctataatacacaccagtatgctagggtctggcagtgcaattgtaaatttcattggtgctgctatgtgaagtgcaatacttgctcagagcggactgagatgtacacgtgcaaatag

SEQ ID NO: 246880 - DNA, 1050 bp, synthetic construct
  misc_feature 1..1050: note = Description of Artificial Sequence: Synthetic coding sequence
  source 1..1050: mol_type = other DNA
atgcacagaaattttcgcaagtggatcttttatgtgttcttgtgttttggagtcctatatgtgaagctcggggctctctcatctgttgtcgctctgggggcaaacatcatatgcaataaaattcccggtcttgcaccaagacagcgcgctatctgtcagagtagacccgacgccatcatagtgattggagagggagcacaaatgggaataaatgaatgtcagtatcagttccgctttggtcgttggaactgttccgctctaggggagaagaccgtgttcggccaggaattacgcgtgggaagtcgtgaagctgcgtttacttatgccataacggcagccggagtagcccacgctgtgactgctgcttgtagccagggcaatctatccaattgtggatgcgacagggaaaagcagggatattacaatcaggccgagggctggaagtggggagggtgttctgccgacgtgaggtacgggatcgacttttcacgtcggttcgtggacgccagagaaataaagaagaacgccagacggcttatgaatttgcacaataacgaagctgggaggaaggtgttagaagacaggatgcagcttgagtgtaagtgtcacggcgtgtccggttcatgcacgacaaagacttgctggaccacactgccgaagttccgcgaagtgggccatctcctgaaggagaagtacaacgctgcagtccaggtggaagtcgtgcgagccagccgactaaggcagcccacgtttctacgaattaagcagctccgcagctaccagaagcccatggaaactgacttggtgtatatcgaaaaatcacccaattactgcgaggaagacgctgccaccggaagcgttggtactcagggccgactatgcaatcgcaccagccccggtgcggatggatgcgataccatgtgttgcggtagagggtacaatacccaccagtacacaaaggtttggcagtgtaactgcaaattccactggtgttgtttcgttaagtgcaatacatgctcagaacggactgaggtctttacatgtaagtag

SEQ ID NO: 246881 - DNA, 1062 bp, synthetic construct
  misc_feature 1..1062: note = Description of Artificial Sequence: Synthetic coding sequence
  source 1..1062: mol_type = other DNA
atgcttctacttagtcctaggtccgcattggtgtctgtttactgcccccagatattcctgcttctgtctagcgggagttacttggctctgagtagtgtggtcgctctgggtgccaacattatttgcaataagattccaggcctggctcctcggcagcgggctatttgtcaatcccgcccagacgccatcatcgtcattggcgaaggcgcacagatgggcatcaatgaatgtcaataccagttccgttttggcagatggaactgcagcgcgctcggcgagaagacagttttcggccaggaactgcgggtgggcagtcgtgaagctgccttcacctacgccattaccgcagccggtgtggcacatgccgttactgctgcttgcagccagggaaatctcagcaactgcggctgcgaccgggagaagcagggatactacaatcaggcggaaggctggaagtgggggggatgctcagccgatgtgcgatacggaatcgactttagcaggaggtttgtggatgccagggagatcaaaaaaaatgcacgcagactgatgaacttgcataataatgaggccggaagaaaagtgttagaggacaggatgcaactggagtgcaaatgccacggcgtgtcaggaagctgcacaactaaaacctgttggactacactgccgaagtttagggaagtgggccatctgctcaaggaaaagtacaacgcggcagtgcaagtggaagtggtgcgggcaagtcgcctgcggcagcctaccttcctgcggatcaagcagctgcgcagctaccagaaacctatggagacagatctggtgtatatcgagaagtcacccaactattgtgaagaagacgctgcaacaggatccgtgggtacccaaggacgcctctgcaaccggactagccctggagctgacggatgcgacacaatgtgttgcgggaggggatacaacacacatcagtatactaaagtttggcagtgcaattgtaaatttcattggtgctgcttcgtgaaatgtaacacctgcagtgaacgcaccgaggttttcacttgtaagtag

SEQ ID NO: 246882 - DNA, 618 bp, synthetic construct
  misc_feature 1..618: note = Description of Artificial Sequence: Synthetic coding sequence
  source 1..618: mol_type = other DNA
atgcatagaaatttcaggaagtggattttttacgtgtttctctgttttggggttctgtacgtgaagctcggggctctgagtagcgtggtggcactcggggctaacatcatctgcaacaagatcccaggtctggcccctcgccagagggccatttgtcaatcccgacctgatgcaatcattgttataggagagggcgctcagatgggtatcaacgaatgccagtaccagtttcgctttggcaggtggaactgcagtgcgctgggggaaaaaacggtgttcgggcaggagctcagggttggatcccgcgaggccgcattcacatacgcaataaccgccgctggggtggcccatgccgtgactgcagcttgcagccagggaaacctctccaactgtggctgcgacagagagaagcagggatactacaatcaggcagaaggctggaaatggggaggctgctccgctgacgtgagatatggcattgactttagtcgaagatttgtggatgctcgcgagatcaaaaaaaacgctcgtagactgatgaaccttcacaataatgaggcgggacggaagggtctgctcgggcagccaagagtcaccagcagtcccttgttcccctag

SEQ ID NO: 246883 - DNA, 1002 bp, synthetic construct
  misc_feature 1..1002: note = Description of Artificial Sequence: Synthetic coding sequence
  source 1..1002: mol_type = other DNA
atgtcggcccctcctttttatcgggctctgtcctctgttgtggctcttggcgcaaacatcatctgtaataaaattcctggcctggccccaagacagagggccatctgccagtcacggcctgacgccataatagtaataggggagggggctcagatgggaattaatgagtgtcaataccagttccgtttcgggagatggaactgctcggcccttggggagaaaactgtgttcggccaggagctgcgtgtcggatccagggaggccgcttttacctacgctatcacagccgcaggggtcgcccacgcagttaccgccgcttgtagccagggcaacctctctaattgtggatgtgatagggagaaacagggatactataaccaggctgaggggtggaagtggggcggatgcagcgcggatgttagatatggcatcgatttttcccgtcgatttgtcgatgcccgagagattaaaaagaacgctaggagactgatgaatctgcacaacaatgaggctggcaggaaggtcttggaggatcggatgcagttagagtgcaagtgtcacggcgtatccggatcatgcacgacgaagacctgctggactaccctgccaaagttccgagaagtagggcacttgttaaaggaaaagtataacgccgctgtgcaggtcgaggtcgtgcgcgcttcacggcttagacagccgacattcctccgcattaagcagctgcggtcctatcagaagcccatggaaacggatctggtgtatatcgagaagagtcctaattactgcgaggaagatgcggctacaggcagcgttggcacccagggtcgcttgtgcaatagaacctcccccggtgccgacggctgtgataccatgtgctgtggtcggggttacaacacccatcagtacactaaggtctggcaatgcaattgcaaatttcattggtgctgcttcgtcaaatgtaatacgtgcagtgagaggacggaagtgtttacctgtaaatag

SEQ ID NO: 246884 - DNA, 174 bp, synthetic construct
  misc_feature 1..174: note = Description of Artificial Sequence: Synthetic coding sequence
  source 1..174: mol_type = other DNA
atggggatcaatgagtgccaatatcaatttcggttcggcagatggaactgcagcgcacttggagagaagaccgttttcggtcaggagctcagggtcggctccagagaggccgcttttacatatgccatcacagccgctggcgtggcgcatgctgttaccgccgcatgttcatag

SEQ ID NO: 246885 - DNA, 1056 bp, synthetic construct
  misc_feature 1..1056: note = Description of Artificial Sequence: Synthetic coding sequence
  source 1..1056: mol_type = other DNA
atgtttctgtccaagccaagtgtgtatatatgtctgttcacttgcgtcctgcagttatctcacagctggtccgtgaataatttcctcatgacaggacccaaggcttatttgatttattcttccagcgtggccgctggcgcacagagtggcatcgaagagtgcaaatatcaatttgcatgggataggtggaattgtcccgaacgggcactccagctgtcttctcatggcggactaaggtcagctaacagagagaccgcttttgtacatgcaatctctagcgctggagttatgtacaccctgacccgcaattgttcactcggggacttcgacaactgtgggtgcgacgactcacgcaacggccagctgggagggcagggctggctctgggggggatgcagcgacaacgtgggcttcggggaggctattagcaagcaattcgtagatgcccttgaaacaggacaggacgcaagagcagctatgaatctccataataatgaagccggtcgaaaggccgtgaaaggaaccatgaagcgcacctgcaagtgtcatggggtgagcggatcatgcaccacccagacctgttggttacagctacccgaatttcgtgaggtgggtgcacatctcaaagagaaataccacgctgcattaaaagttgatttgctgcaaggtgcagggaatagcgcggctggtagaggcgctattgctgatactttccggtccatttctacccgggagctggtgcacctggaggattctccggactactgtctcgaaaataagacactgggcctcctggggacggaaggcagagaatgtctgaggagagggagggctctgggaagatgggagaggcggtcatgtcggagactgtgcggagactgtgggctggcggttgaggaacgccgagccgagactgttagttcctgtaattgtaaattccactggtgttgcgccgtgcggtgcgaacagtgccgcaggagggttacaaagtatttttgctccagggccgagcggccaagagggggtgcagcccacaagccagggcgtaagccatag

SEQ ID NO: 246886 - DNA, 1209 bp, synthetic construct
  misc_feature 1..1209: note = Description of Artificial Sequence: Synthetic coding sequence
  source 1..1209: mol_type = other DNA
atggatctcgaccgggcatctttggacctgatgatcagactgttggagctggaacaggacgcttcatccgcaaagcttttaaacgaaaaggacatgaacaaaattaaggagaagattaggagactttgtgaaaccgtgcacaataaacatctggaccttgaaaacattactacagggcatctcgccatggagaccttgctctctctgacatccaagagagcaggtgattggtttaaagaggaattacgattgctggggggactcgaccacattgtggacaaagttaaggagtgcgtggatcacctgagccgggacgaagatgaagagaaactagttgcttccctttggggggcagaaaggtgcttgagagtgctcgagtcagtgactgtgcacaatccggaaaaccagtcatacctcatagcctacaaggatagtcagttgatcgtttcctctgccaaggccctgcagcactgcgaagagctaatccagcagtataacagggctgaggattcaatttgccttgctgatagtaaacctctgccccaccagaacgtcaccaatcatgtcggcaaagccgtggaagattgtatgagagcaattatcggcgtcttacttaacctgactaatgacaacgaatggggatctacaaagacaggagaacaggacggattaatcgggaccgctctgaactgtgtgctccaggtgcctaaatatttgcctcaggaacagcggttcgacatcagggttctactgtttctggagagagaacgcgcagctcaattggccgaaagcaagacggacgagctaatcaaagatgctccaaccacacagcacgataaatcgggggagtggcaggaaacgtcgggagagattcaatgggtgagtactgaaaagacggatgggactgaagagaagcacaaaaaggaggaggaagacgaggaattggacctgaacaaagcactacagcatgccggtaagcatatggaagattgcattgtggcttcctatactgccttgctccttggctgtctatgccaggagagccctataaacgtcaccaccgtaagagagtacctaccggagggcgattttagtattatgactgagatgctcaaaaagttcctctctttcatgaatctcacatgtgctgtcgggacaacaggccagaagagcatttcgagggtaatcgaatatctggaacactgctag

SEQ ID NO: 246887 - DNA, 3573 bp, synthetic construct
  misc_feature 1..3573: note = Description of Artificial Sequence: Synthetic coding sequence
  source 1..3573: mol_type = other DNA
atgacctcgcggttcgggaagacttactcccgaaagggcggaaatggctctagcaaatttgatgaagtctttagtaataaacggaccacactctctactaagtggggagagacaacattcatggccaagctcggccagaagcgcccaaattttaaacctgatatccaggaaatcccaaaaaagcccaaggtggaggaggaaagcaccggtgacccatttggcttcgactccgacgatgagagcctgcctgtgagcagcaaaaacctcgcgcaagtcaaatgtagttcctacagtgagtcctccgaagcagcccaactcgaggaagtgacctcggtccttgaagcaaactccaagattagccacgtggtggttgaggataccgtagtctctgacaagtgcttcccgctggaggacactttactcggcaaagaaaagagcactaatcggattgtggaagacgatgcctccattagcagctgtaacaagctgatcacctccgacaaagtggagaatttccacgaagaacacgaaaagaattctcaccacattcataaaaatgctgatgactcaacaaagaaacccaacgccgagacaaccgttgccagcgaaatcaaagagaccaacgatacgtggaacagccagtttggcaaaaggcctgaatcaccttctgagatctcacccatcaagggctcagtcagaacaggcctcttcgagtgggacaacgattttgaggacattaggtccgaagattgcatcctgagcttagactcagacccccttttggaaatgaaagatgatgacttcaagaacaggttagaaaatttgaacgaggcaatcgaggaagatattgtccagtccgtcctccgccctacaaattgtcggacttattgccgcgctaacaagacaaagtcctcacagggcgcaagtaattttgacaagctgatggacgggacttcacaggctctggcaaaggccaacagcgagagcagtaaggacggcctgaaccaggctaagaaggggggtgtctcttgcggaacaagtttccgtgggactgtgggaagaacgagagattacaccgtactgcaccccagctgcctgagcgtgtgtaacgtgacaattcaagacaccatggagagatctatggatgaattcacagcttcaaccccggcagatctaggggaggcgggacgcctgagaaaaaaagctgacatcgctacaagtaagacaacgaccaggtttagacctagcaatacaaagtctaaaaaggacgttaagctggagtttttcggcttcgaggaccacgaaaccggaggagatgaaggagggagcgggtccagtaattacaagatcaagtactttggcttcgacgatttatccgaatcagaggacgacgaggatgacgattgccaggtagagcggaaaaccagcaagaaacggacaaaaactgctccgagcccatctcttcagcctcctcctgagagtaatgacaattcacaggatagccaaagcggaaccaacaatgcagaaaacttggattttacggaggacttacctggggtgcccgaaagtgtcaaaaagccaatcaataagcagggcgataaatctaaagaaaacaccaggaaaatctttagcgggcctaagcgctctcccaccaaagcggtatataacgcgagacactggaaccacccagatagcgaggagttgcctggaccgccagtggtaaagcctcagagtgtcaccgtgcgactgtcatccaaagagcccaaccagaaagatgatggggtgttcaaggcgcctgcaccacccagtaaagttatcaaaactgttaccattccaacacagccctaccaggatattgttaccgccttgaaatgcaggcgtgaagacaaggaactctataccgttgtccagcacgtgaagcactttaatgatgttgttgagttcggtgagaatcaggaatttaccgacgacatagaatacctactgtcaggcctcaaatccacacagcccctgaatactcgctgtctctctgtcatcagcctggctacaaagtgcgccatgccctcgttcagaatgcacctgagagctcacgggatggtggctatggtctttaaaacccttgacgactctcagcaccaccagaacctaagtctctgcacggcggcactgatgtatattctgagtcgagaccgcctgaatatggacttggatagggcatctctggacctcatgatccgactactggagttggaacaagatgcttccagcgctaagctactgaacgaaaaggacatgaataaaatcaaggagaagatacgtcgtctttgcgagaccgttcacaataagcatttagatctcgaaaacattaccaccggccacctggcaatggaaactctactgtcgctgaccagtaaaagagccggtgattggtttaaggaggagctgcggctcctgggcggactggatcatattgtcgataaggttaaggagtgcgtggatcatctcagcagggacgaggacgaggagaagctggtggcatcattgtggggcgcagaacgctgtctcagggtgttggagtctgtgacggtgcataatcctgagaaccagagctacctgatcgcatataaggacagtcagttgatcgtgagttctgccaaggctctccagcattgcgaagagctgattcagcagtacaaccgtgcagaggattctatatgtttggctgattctaagcccttgccgcaccagaacgtgacaaatcatgtaggtaaggctgtggaagactgcatgcgcgcaatcattggagtgctgttaaacctgactaacgacaacgaatgggggtccaccaaaactggcgagcaggatggtcttatcggaaccgccctcaattgtgtcctgcaagtccccaagtatctgccgcaggagcagcggttcgacattcgggtactgggcctagggttgctgattaatcttgttgagtactcagcacgcaatcggcactgtttagtgaacatggaaacaagctgttcctttgactcatccatctgtagtggcgaaggggacgactcgctacgtatcggcggacaagtccacgcagtgcaagcgcttgtgcagctgttcttagagcgagaacgcgctgcgcaactggctgaaagtaaaaccgacgaactgataaaggatgcccctacgactcagcacgacaaatctggcgagtggcaggagacatcgggagagattcagtgggtgagtactgaaaagactgacgggactgaggaaaaacacaaaaaagaggaggaagacgaagaactggacttgaataaggcactgcagcacgcgggtaagcacatggaggactgcatcgtagctagctacaccgctttgctgctgggctgcctgtgtcaggagtctcccatcaatgttaccactgtcagagagtacttgcctgagggcgatttctcaatcatgacagagatgctcaagaaattcctgtcctttatgaacctgacatgtgctgtaggcacaactggccagaagtccatatctcgcgtcatcgagtacctggagcattgttag

SEQ ID NO: 246888 - DNA, 3828 bp, synthetic construct
  misc_feature 1..3828: note = Description of Artificial Sequence: Synthetic coding sequence
  source 1..3828: mol_type = other DNA
atggtccagggccctgttcagacccccgctctgactatccaccgtcggaagcggcgaaggagttgcccacctaatagagcctcatatctccccaaagccgagagcctggcctcgttgggctcccacttacccgctttgctgtctagggccagagtgccccgtcctccagccggtcgtcgggaaagagaaagaagaaggagacctgtggctaaggccccagctagactccgcggagagtacgagacaggggtgaaaatgacaagcaggttcggtaaaacctattcaaggaaaggaggcaatggatcgtctaagttcgatgaagtattttcgaataagagaaccaccctgtcaactaaatggggggagaccacatttatggccaagttgggacaaaaacggccaaactttaagcccgatatccaagagattcctaaaaagcccaaagtggaggaagagtccaccggagaccccttcggcttcgattctgacgacgagtcactgccagttagttccaaaaacctggcccaggtcaagtgctcctcttatagcgaatcctcagaagcagcccagctggaagaggtcacgtcagtgttggaggcaaacagcaaaatttcgcatgtcgtggtcgaggacaccgtcgtctccgacaaatgctttccccttgaagatacactgctaggaaaggagaaaagcacgaatcgaatcgtagaggacgacgcaagcatctcttcctgtaacaagctgattaccagcgacaaagtggagaactttcatgaagaacacgagaagaatagccaccacattcataagaacgcagacgattcaacaaaaaagcctaatgcagagacaacagtggcctccgagatcaaggagaccaacgatacatggaacagccagttcggcaagcgacctgaatcacccagcgagatctcccccatcaaggggtcggtgcgcacaggactcttcgaatgggataacgatttcgaggacattcggtccgaagattgcattctcagcctggattccgaccccctgttggagatgaaagatgacgatttcaaaaaccgtttggaaaacctgaatgaggctattgaggaagatatagtgcagagtgtattgaggcctaccaattgccgtacttactgcagggctaacaagacaaagagctcacaaggagcttcgaattttgacaagctgatggacggcacgagtcaagctttggctaaggcaaatagcgaaagcagtaaggacggcctgaatcaggcaaagaaaggcggtgtcagttgcggcaccagctttcgtgggactgtcggaagaaccagggactataccgtcttacacccgtcgtgtctatccgtgtgcaacgtgaccatccaagacactatggagagaagtatggacgagttcacggcttcaacgcccgctgacctcggggaagctggcagactgcgtaagaaagctgatattgccactagcaaaacgaccacaaggtttaggccctccaacacaaagagtaaaaaggatgtgaaactggagtttttcggtttcgaggatcacgagacgggaggcgatgagggtggcagtggctctagcaactacaaaataaaatactttggctttgatgacctttctgaaagcgaggatgatgaggacgatgattgtcaggttgaaaggaaaacttcgaagaagcggactaagactgctccttcaccgtcgctgcagcctcccccagagagcaacgacaactcacaggacagccagagcggaacaaataacgcagagaacctggattttactgaagatctccctggagtgcctgagtctgtaaagaagccgattaataagcagggtgacaagagcaaagaaaacactaggaagatattctctggcccaaaaagaagtcctacaaaggccgtgtataatgccagacactggaaccaccccgactctgaagagcttcccggtcctcctgtggtgaagccccagagtgtgactgtgcgcctgagctctaaagagcccaatcaaaaagatgacggagttttcaaagcacctgccccaccgagtaaggtgattaagactgtgactatccccacccagccctatcaggacattgtgactgccctgaaatgccgcagagaggacaaggagttgtatacagtcgtccagcacgtgaagcatttcaacgatgtggttgagttcggcgagaaccaggaatttaccgatgacatagagtacttgctctccggactgaagtccacacagcccctcaacacacgctgcctgagcgtgatcagcctggccaccaaatgtgctatgccatccttccgaatgcaccttcgagcacacggcatggtggccatggtctttaagacgttggatgactcacagcaccaccagaatctgtctctatgcaccgctgctttgatgtatatcctcagcagagaccgactgaacatggacctggatagagctagtttagacctcatgatccgcctcctcgagctagaacaggatgcatcctccgcaaagttactgaacgagaaagatatgaacaagattaaagagaagattcggcgactctgtgagaccgtccataacaaacacttagacttggagaatatcacaaccggccatctcgctatggaaacactgttgtctttgacatcaaagcgtgctggcgattggtttaaggaggagcttcgattgctgggagggttggatcacatagtcgacaaggtgaaagaatgtgttgaccatttgagccgcgatgaggatgaggagaaactggtggcttctctgtggggagctgagaggtgtctccgggtgctggagtcagtcactgtgcacaatcccgagaatcagtcttatctgatcgcttacaaggactcccagttgattgtctcctcagccaaagcacttcagcactgcgaggaactgatccaacaatacaaccgagctgaagactcgatctgtttagccgacagtaaacctctcccacaccagaacgtgaccaaccacgtggggaaggccgtagaggactgtatgagggcaatcatcggcgtacttttgaacctcactaatgacaacgaatggggctccacaaagactggcgaacaggacgggctaattggaacggctctgaattgtgtacttcaggtccccaagtacctccctcaggaacagcgcttcgacatacgggtgctgggtctcggcctgctcattaacctcgtagagtatagcgccagaaacaggcattgtcttgtcaacatggagacatcttgtagttttgactcatcgatctgttccggggagggcgatgactcactgcgcattgggggacaggttcacgccgtccaggccctggtgcagttgttcctcgagagagaaagagctgcacagctggctgaatctaagactgacgaattgatcaaggatgcaccaaccacccagcacgacaaatctggggaatggcaggaaacctccggagaaattcagtgggtatctacggaaaaaacggacggtaccgaagagaagcacaagaaggaggaggaggatgaggagctagatttgaataaagccctgcagcacgccggtaagcacatggaggactgcatcgtggccagctatacggcccttctactggggtgcttatgccaggagagccctattaatgtaactacagtcagggaataccttccagaaggcgatttttcaattatgactgagatgcttaagaagttcttatcctttatgaacctcacctgcgcagtcggcacgacgggccagaaatccatatctagagtcatagagtatctggagcactgctag

SEQ ID NO: 246889 - DNA, 1209 bp, synthetic construct
  misc_feature 1..1209: note = Description of Artificial Sequence: Synthetic coding sequence
  source 1..1209: mol_type = other DNA
atggatctggacagagcatcactggatttaatgattagactgctggaattggaacaggatgcttcttccgccaaactgctaaacgaaaaggacatgaacaaaatcaaggagaaaatccgccgactgtgtgaaacagttcacaataagcatctggacctggaaaatatcactaccggacacctcgctatggagacacttctaagcctcactagtaaaagagctggcgattggttcaaggaggagctccgtttgctgggcggattggaccatattgtggataaagttaaggagtgcgtggaccacctgagcagagacgaagatgaggagaagttggtggcaagcctatggggcgctgaacggtgtctgcgcgtgctggaatcggtgaccgtgcataaccccgagaaccagtcctatctcatagcttataaggactcccaactcattgtaagcagcgcaaaagcactgcagcactgcgaagaattgatccagcaatacaacagagcagaggatagtatctgcctggcagactccaaaccactacctcatcaaaacgtcactaaccacgtcgggaaagccgtagaggattgcatgagagcaatcataggtgttctcctgaatctgacaaacgataacgagtggggcagtactaaaaccggcgagcaagacgggctgataggaactgccttgaattgcgtgctgcaggttccaaagtatttgcctcaggaacaacggttcgatatcagagtcttgctgtttctagagcgagagagggctgctcagctggcagagagtaagacagatgaactgatcaaagatgcaccgaccacacagcacgataaaagcggtgaatggcaggagacatccggagagatccagtgggtgtccacagagaagaccgatggtacagaggagaaacacaaaaaggaagaagaggacgaggagcttgaccttaacaaggctctgcagcatgcgggaaaacatatggaagactgtatcgtggctagctacaccgccttgttactgggttgcttgtgtcaggaaagccccataaacgtgacgacagtaagagagtacttgcctgaaggcgatttcagtatcatgacggaaatgctaaaaaagttcctctcttttatgaacctcacctgcgccgtgggcacaaccggtcagaaatctatctcgagggttattgagtatttagaacattgttag

SEQ ID NO: 246890 - DNA, 3828 bp, synthetic construct
  misc_feature 1..3828: note = Description of Artificial Sequence: Synthetic coding sequence
  source 1..3828: mol_type = other DNA
atggttcagggacccgtccagacccctgctctgacaatccacaggcgaaaacgtaggcgctcatgccctcccaacagagctagctatctccccaaggcagagtcactagctagcttggggagccacctacccgctctgctcagcagggccagggtgcctcgccctccagccggtcggcgagaacgcgaaaggcggaggaggcctgtcgccaaggcgcctgcccgtctgaggggtgagtacgagacaggcgtgaagatgacttcacggttcggaaagacatactcaagaaaaggcggaaacggcagttccaagtttgacgaagttttctctaacaaacgtacaacacttagcactaaatggggggaaacgacattcatggctaaactgggccagaaacgaccaaacttcaagcccgatattcaggagatccccaaaaaacccaaggttgaagaagaatctactggagatccctttggattcgattctgatgacgagtctcttcccgtgtcaagtaagaacctggcccaggtgaagtgtagttcttactccgagtctagcgaggccgcacagctggaagaagttacctccgtgctggaagcaaattctaagataagccacgtagttgtagaggacacggtggtatcagataagtgttttcctcttgaggataccctactggggaaggagaagtctacaaaccgaattgtggaggatgatgccagcatctcctcctgtaacaagctgattacgagcgataaggttgaaaatttccacgaggagcatgaaaagaacagccatcacatacataagaatgccgacgacagtacgaaaaagcctaatgccgagaccaccgtggcaagcgaaattaaggagacgaatgatacttggaactcccagtttggaaagcggccagaaagcccatctgaaatctcccccattaaaggaagcgtgcgcaccgggctgttcgaatgggataacgatttcgaggacattaggagcgaggattgtatcctaagtcttgattctgaccccctcctcgaaatgaaagacgacgatttcaagaatcgtttagagaacctgaacgaagccatcgaggaagacatagtgcagtctgtacttcggcctactaattgccgcacatattgcagagctaacaaaaccaagagctcccagggcgcatccaacttcgataagctaatggacggtacttcacaggccctcgccaaagcaaacagcgaatcctcaaaggatggtctcaatcaagccaagaaagggggagtctcatgcggcacatcattccggggaacagttggcaggacccgcgattacacagtactacacccttcctgcctgtcagtgtgcaacgttaccattcaggacaccatggaaaggagcatggacgagtttacggcatctacgcccgctgatcttggggaagccggtcgattgcgaaaaaaagcggatatcgccaccagtaagacaacgacaaggttcagacccagcaatacgaagtctaaaaaagacgtgaagctggaattttttggattcgaggatcacgagaccggcggagacgaaggcggaagtggaagttctaattacaaaattaagtactttggcttcgacgacctgtccgagtcggaagacgacgaggatgatgactgtcaggtggagagaaaaacgtctaagaagcggaccaaaaccgccccaagcccctccctgcaacctccacccgagtccaatgataactctcaggatagccagtcgggcacaaacaatgcagagaatctcgacttcactgaagatctgcccggagtgcctgaaagtgtgaagaagccaatcaacaagcagggtgataagtccaaggagaataccaggaagatcttttcagggcctaagagatccccaacaaaagcagtttataacgctagacactggaaccatcctgacagcgaggagctgcccggtcctcctgtcgtgaagcctcagtctgttaccgtgcgattatcctctaaagagccaaatcaaaaagacgatggcgtattcaaagccccagccccaccttccaaagtaattaagacggttactatccccacgcagccctaccaagatatcgtgacggccttaaaatgccgtcgagaagacaaagagctctacactgtagttcaacatgtcaagcactttaacgacgtggttgaattcggcgaaaaccaggagtttacagatgacatagagtacttactgtcaggcctaaagtctacacagccacttaacactagatgtctcagtgttattagcctggctaccaaatgcgctatgccctccttccgcatgcatctgagggctcacggtatggtcgcaatggtcttcaaaaccctagatgactctcagcatcatcagaacttgtccctgtgtacagctgctttaatgtatattttgtcgcgtgaccggttgaacatggatctagatagagcatccctggacctcatgatcaggttgcttgagctggaacaagatgcaagttcggcaaaactgctaaatgagaaagatatgaataagattaaagaaaaaatccgtcgcttgtgtgagacggtgcataacaaacacctcgatctcgaaaatatcactacaggccatttagcgatggaaactctgctgtccctcacgagtaaaagggctggcgactggttcaaggaggaattaagacttctagggggactggaccacatcgttgataaagttaaagaatgtgtggatcatctgagccgggacgaggatgaagaaaagttggtggctagtctttggggtgctgagcgttgtctcagagtcttggaatcagtcaccgtacacaaccctgagaatcagagctacctaatcgcgtacaaggactcacaactgattgtctctagtgctaaagccctacagcactgtgaagaacttattcagcagtacaacagggccgaggactccatctgcctagccgattccaagcctctcccacaccagaacgtgaccaaccatgtcgggaaagctgtcgaggactgcatgcgcgcaatcattggcgtcttactaaatctgacgaacgacaatgagtggggctctaccaagactggcgaacaagatgggctaattggaaccgcgctgaactgcgtcctgcaggttcctaagtacctcccgcaggagcagcgcttcgatatccgtgtgctgggcttgggccttctaatcaacctggtagagtactccgctcgcaaccggcattgtctcgtgaacatggagacttcttgttccttcgatagcagcatatgctctggcgaaggcgacgattccctgagaatcggtggacaggtccacgcagtccaggctctggtgcagctattccttgagagggagcgggcagcccagttggccgagagtaagacagatgaactcattaaggacgcccctacgacccagcacgataaatccggtgagtggcaagagacaagcggcgagattcaatgggtgagcaccgagaagacagacggcaccgaagagaagcacaagaaagaggaggaggacgaggaactggacctgaataaggctctccagcacgccggtaaacacatggaagactgcatcgtcgctagttatacagccctcttgctgggctgtctctgccaggagtctccaatcaacgtgacaacagtcagggagtacctccctgagggcgatttctccattatgactgagatgctcaagaagtttctctccttcatgaacctgacgtgcgctgtggggacaactggacaaaagagtattagccgggtcatagaatatcttgagcactgctag

SEQ ID NO: 246891 - DNA, 1509 bp, synthetic construct
  misc_feature 1..1509: note = Description of Artificial Sequence: Synthetic coding sequence
  source 1..1509: mol_type = other DNA
atgtcgggaggccctatgggtgggcgaccaggaggtagaggcgctccagcagtgcagcagaacatacccagcacactcttacaggaccatgagaatcagaggctctttgagatgctaggcaggaagtgcttaaccctcgccaccgccgtggttcagctttatctggcacttcctcctggcgcagaacactggactaaggagcattgcggggcagtgtgcttcgtaaaggacaatccacagaaatcttactttattcgcctgtacgggctgcaggccggacgcctgctctgggagcaggagctgtattcccaactagtctattcgactcccacccctttcttccacacttttgcaggggacgactgtcaggctggtctgaactttgccgatgaagatgaagctcaagcatttcgcgcactggtgcaagaaaagatccagaaacgaaatcagcgtcaatcaggggaccggagacagcttccgcctccacctactccggctaatgaggagcgcagaggaggcttaccgcctctgcctctgcatccagggggtgatcaaggaggaccaccggttggacctttgagcctgggacttgcaactgtagacatccagaaccccgacataacttcttcacgctatcggggactgcctgctccagggccaagtccagctgataagaaacgatccggaaagaagaaaatatctaaagcggatattggggcaccctcaggctttaagcatgtctcccacgttggatgggaccctcagaacggatttgatgtgaataatctggaccctgatctgagatcactttttagccgggctgggatcagtgaggcccaactcactgacgcagagacaagcaagctgatttacgactttatcgaggatcagggcggtctcgaggccgtgcgacaagagatgagaaggcaagaaccactaccacctcctccacctccttcgcgcggtggcaatcagcttcccagacccccaatcgtcggcggaaacaaagggagatcagggcctcttcccccagtgccgctgggaatagctcctcctcctccgacaccacgaggaccccctccaccgggaagaggcggtcctccacctccccctccacccgctaccggcagaagtggccctcttccccctccccctcctggtgctggtggccctcccatgcccccaccaccaccccctccaccaccgcctccctctagcggaaatggcccagcacctccgccactccccccagctctcgtgccagcgggaggattggctcctggagggggtcgtggcgcactgctggaccagattagacagggaattcagctgaataaaacccccggagcacctgagtcttcagctctgcagcctccaccccagtctagcgagggcctagttggggctctcatgcatgtgatgcagaagagaagccgtgcaattcattccagcgatgagggagaggaccaggcaggcgacgaagatgaggacgacgaatgggatgactag

SEQ ID NO: 246892 - DNA, 654 bp, synthetic construct
  misc_feature 1..654: note = Description of Artificial Sequence: Synthetic coding sequence
  source 1..654: mol_type = other DNA
atgagcggtggtccgatgggaggtagaccaggcggtcgcggagctccagctgtgcagcaaaatattccaagtactctcttacaggatcacgaaaaccagagactcttcgaaatgttaggaagaaaatgcctgaccttggccaccgcagtggtgcaactctacctggcgctgccccctggcgctgaacactggacaaaagaacattgtggtgcagtgtgcttcgtgaaagataatccccagaaaagttacttcattcggctgtacggcctgcaagctgggagactactttgggaacaggaactgtacagtcagcttgtgtacagcaccccgacacctttctttcacactttcgcaggagacgattgtcaggccggactgaatttcgcagacgaggacgaagctcaggcctttagagcattggtgcaggaaaagattcagaagcggaaccaacggcaatcaggcgataggagacagctccctccccctcctacaccagcaaacgaggagcgacggggaggtctgcctcctttgcctctccaccccggaggtgaccaggggggtccgcctgtgggtcccctgtccctgggcttggccaccgtcgacattcagaaccccgatattacttcatcgcgatacagggggttgcctgcgtag

SEQ ID NO: 246893 - DNA, 4668 bp, synthetic construct
  misc_feature 1..4668: note = Description of Artificial Sequence: Synthetic coding sequence
  source 1..4668: mol_type = other DNA
atggcaaaagctattaaggacagggtctcactgattaagagaaaaagggagcagcggcagttagtgagggaggaacaagagaaaaagaagcaggaggaatctagtctcaaacagcaggtggaacagtccagtgcctcccaaaccgggataaaacagctgcccagcgcttccaccggcatcccaaccgcctccaccacaagcgcctccgtgtccacacaggttgaaccagaggagcctgaggctgaccaacatcaacagctccagtaccaacagccatctatttcggtgctgtccgatggcactgtggacagtggccagggaagttctgttttcactgagagtcgtgtctcttctcagcagacagttagctatggcagtcaacatgaacaggctcacagtactggcaccgtcccaggacacatccccagtacagttcaagcacagtcccaaccacatggagtgtacccaccctcctctgtacagcagggcatccaacagacagcccctccccagcagacagtccagtattccctctctcagacctccacaagcagtgaggcaaccactgcccagcctgtctctcagccacaggcaccccaggtgctgcctcaggtctcagctggtaaacagtctacacagggcgtgtcccaggtcgccccagccgagcccgttgctgttgctcaaacacaggccacacaacccactaccttggcttcatctgtggactcagcccactccgatgtcgcaagcggtatgagcgatggcaacgaaaacgtcccttccagcagtggtcgacatgagggaagaaccactaaacgacactacagaaagagcgtgaggtccaggtcccgccacgagaagaccagcaggccgaagctgagaatactgaatgtttccaataagggtgatagagtggtggagtgccagctggagacacataataggaaaatggtgacgttcaagtttgatctcgatggcgataatcctgaggagatagctaccattatggtcaacaatgattttatcctggccattgagcgagagagctttgtggaccaggtccgcgagatcattgaaaaagctgatgagatgctttcagaggatgtgtctgtggagcctgagggcgaccagggactggaatcccttcaggggaaagatgactatgggttcagtggttcacaaaagctcgaaggcgaatttaagcagcccattcccgctagtagtatgccccagcagataggaataccaacttccagtctgactcaagtggtgcattcagccggacggaggttcatcgtttctcccgttccagagtccaggctccgggaatctaaagtcttcccaagcgagataaccgataccgtcgccgcatctaccgctcagagccccggaatgaacctgagtcactcagcatcaagtctatccctgcagcaggcattttccgagctgcggcgtgcacagatgacagagggccctaatacagccccacccaatttttcccacaccggaccaactttccccgtcgtacctccattcctgtccagtattgctggtgtgcctacaacagccgcagcaacagcgccagtgcccgctactagtagccccccaaacgatatttcaaccagcgtaatccagtctgaggtgacagttccaaccgaggaggggattgctggcgtggcaacaagcactggcgttgtcaccagcggcggtctccccattccacccgtctccgaatcacccgtactgtctagcgtcgtcagtagcatcactattcccgcagtggtctctataagtacaacctcaccctcacttcaagttccaacgtcaaccagcgagattgttgtgtcctccacagcgctgtaccctagtgtgaccgtgagtgcaaccagcgcttcagcaggcggtagtaccgccactcctggcccaaaaccgcctgcagttgtgagccagcaggctgctgggtctaccacggtgggagccactctgacctccgtgtccacgaccacctcctttccgtcaacagctagccaactttgcattcagctcagcagctctactagcacgccaacactggcagagactgtggtcgtgagcgctcactccttagacaagacctcacatagctccaccacaggattagcattctctctgtcagcgccttcatcctcctcttctccaggtgctggagtctcgtcttacataagccagcctggcggtctccatccactcgttatcccctcagtgatcgcttctacaccaatcttgcctcaggcagcaggaccgacctccacccccctgttaccacaagtgccctctatccccccactggtccagccagtcgctaacgtgccggctgtgcaacagactctaatacactctcagcctcagccggctctcctgcccaaccagccacacactcactgccctgaggttgacagtgacacacagcctaaggcgcctggcattgatgacattaagactctcgaggagaagctcaggagcctgttctctgagcattcctcatctggcgcacagcacgcatccgtgagtctcgagacaagcctagtcattgagagtaccgtgactcccggtatccccacaacggccgtggctccatcaaaattgctcacaagtacaacatcaacatgcttaccacccacaaatctcccactcggaacggtcgcccttcccgtgactcccgtggttacaccaggacaggtcagtacaccagtgagtacaactaccagcggtgtgaaacccggtacagccccatcaaaaccccctctgacaaaggccccagtgttgccagtcggaactgagcttccggctggcactctgcccagcgagcagctacctccatttcccggaccatccctaacgcagtcgcagcagcccctcgaagatttagatgcccagctgaggaggactctgtcaccagaaatgattaccgtcacatcagctgtcggaccagtaagcatggcagcacctacagccatcaccgaggctggtacgcagccacagaagggagttagccaggtgaaagagggacctgtattagccaccagctccggcgctggagtattcaaaatgggaaggtttcaagtctcggttgcagcggatggcgctcagaaggaagggaagaacaaatctgaggacgcgaagtctgtccattttgagtcctccaccagtgagtccagcgtcctgtctagtagtagccctgaatcaacattggtgaagcctgaaccaaacggtatcactatcccaggaatttcatcagacgtgccagagagtgcccataaaactactgcatccgaggctaagagtgacaccgggcaacccaccaaagtggggaggttccaggtaactactacagcgaacaaggtagggcgattttcagtgagcaagacggaagacaagataacagataccaagaaggaaggcccagtggcctctccacccttcatggatctggaacaagccgtgctgcctgcagtaatccctaagaaagagaagcccgaattatctgagccgtcccacctgaacggcccttctagcgaccctgaggctgccttcttgtcacgcgacgtagatgacggatcaggaagcccccatagcccccaccagctgagcagtaaaagcttgccttcccagaacttgtcacagagtttgagtaactccttcaactcttcctatatgtcgtcagacaacgagtctgatattgaggatgaggacttgaaattagagctgcgcaggcttcgtgacaagcatttgaaggaaattcaggatcttcagtctcgacaaaaacatgagatcgaatctctttacaccaagctcggcaaggtgccacccgctgtcatcatccccccagctgcacctctgagtggaaggcgaagaaggcctacaaagtctaagggctccaagagttccagaagttcctctctaggcaataaatcacctcagctaagcggcaatttgagtggtcagtccgcggcatctgtgctgcacccccagcagaccttgcacccacctgggaacatccctgagtctggccagaaccagctcttacaaccactcaagcccagccctagttccgataacctgtacagcgccttcacctctgatggagcaatcagcgtccctagcttatccgcccctggccaagggactagtagtacaaatacagtcggcgcaacagtgaatagccaagccgcacaggctcagcccccagccatgacgtcctccagaaaagggactttcactgatgacctgcacaaattggttgataactgggctagagatgccatgaacctgtccgggagacgtgggagcaaggggcacatgaactatgaagggcctgggatggcgaggaagttttcggccccagggcaactgtgcatttcgatgacctctaatctgggcggatcagcacccatcagtgcagcctccgccacatcccttggccacttcaccaaatcgatgtgtcctccccagcagtatgggttccccgctacgccatttggggctcagtggtcggggacaggaggaccggctccccaacccttggggcagttccagcctgtgggaaccgccagtctccaaaacttcaatatcagcaatctccagaaaagtatctcaaacccaccaggatccaatctgcgaacaacatat

SEQ ID NO: 246894 - DNA, 7148 bp, synthetic construct
  misc_feature 1..7148: note = Description of Artificial Sequence: Synthetic coding sequence
  source 1..7148: mol_type = other DNA
atgtccgggggagccgcagagaaacagtcgagcactcctggatcgttatttctgagtcctccagcccctgctccaaagaacggaagtagctctgatagttcagtgggggaaaagctcggagccgcagccgctgacgcagttacagggagaaccgaggaatacagacgccgtcggcatacgatggacaaggacagccgaggagcagcagccaccactacaaccaccgaacatagattttttaggaggtcggtcatttgtgacagtaatgccaccgctctagagctgccaggcttacctctttctctcccacagccttctattcctgccgcagtgccccaaagcgccccaccagagcctcaccgggaggaaaccgtgacagccacggctaccagtcaggtggcccagcagcccccagccgctgccgcacccggagaacaggccgtggccggtccagctccaagcacagtgcctagctccacctccaaggaccgtcccgtatcacaacctagcctcgttggaagtaaggaggagccacccccagctcgcagtggctctggagggggatccgctaaggaaccacaggaagagcggtcccaacagcaggatgacatcgaggaactcgagacgaaagcggtgggcatgtctaacgatggacgctttctgaagttcgacattgagattggccgagggtccttcaagaccgtatacaagggtctcgacaccgagacaaccgtggaggttgcctggtgtgagctgcaggaccgaaaactgacaaaatccgaaaggcagagattcaaagaggaagccgaaatgcttaaagggctgcagcacccaaatattgtgcggttctatgatagttgggagtctacagttaagggcaaaaaatgcattgtactcgtcacagagctcatgacatccggcaccctgaagacctatctgaagagattcaaagtaatgaaaataaaggttcttcgctcgtggtgcaggcagattctgaagggcctgcagttcctccatacaaggactcctcccataattcatagagacctcaaatgcgataatatttttataacaggtcctacagggtcggtcaaaatcggagatcttggtcttgccaccctcaaaagagcgtcttttgctaaatccgtgataggcacgccagaattcatggccccagagatgtacgaagaaaaatatgacgagagcgtagacgtgtatgcctttggcatgtgtatgctggagatggctacctctgaatacccttactcagaatgtcagaatgctgctcagatctatcgtcgtgttacatcaggtgtaaaacccgcttcattcgacaaagttgccatcccagaagttaaggagataatcgagggttgtatcaggcagaataaggacgaacgatacagcattaaagaccttttaaatcatgctttcttccaagaagaaaccggggtccgggtggagctggctgaggaggatgacggtgaaaagatagccattaagctctggctccgaattgaggatatcaagaagttgaagggaaaatacaaagataatgaggccatcgagttttcattcgatttggaaagagatgtgccggaggacgtggcgcaggaaatggtggaaagcggctacgtctgtgaaggcgaccacaagaccatggccaaagccatcaaagatagggtgagcttgatcaaacgaaagagggagcagaggcagttggtgagagaagaacaggagaagaaaaagcaagaggaatctagcctcaaacaacaggtcgaacagtcttctgcctcccagaccggcatcaagcaactgccctcagcctctactggtatccccacagctagcaccaccagcgcaagcgtttctacacaggtggaaccagaggaacctgaagctgatcagcaccagcaacttcagtaccagcagccgtcgatttctgtcttgagtgacggcaccgtggactctgggcagggatcgtccgtgttcactgaaagccgcgtctctagccagcagactgtgagctatggaagtcagcacgagcaagcgcattctaccggaactgtgcccggtcacatcccttccactgttcaggcacagtctcagccacacggagtatacccaccttcaagtgtggcccaggggcaatcccaggggcagcccagtagctcttccttaaccggcgtgtcgtcctctcagcccatccagcaccctcagcaacagcagggcattcagcagacagccccaccgcagcagaccgtccaatacagcctaagccagacaagcacttcttcggaggcaactactgcgcaaccagtcagccagccccaggccccacaggtgttgcctcaggtttcagccggtaaacagttaccagtgtctcagcccgtgccaacaattcagggagagccacagatccccgtggcaacacagccatccgtagtccctgtccattctggtgcgcacttcttaccagtgggccagccactgccgactcccttgctcccccagtacccagttagccaaatccctattagcacacctcatgtgtctaccgcccagaccggtttcagctcgctgcctattacaatggctgcaggcatcacccagcctctgctgacgctagcttccagtgctaccaccgcagcaataccaggagtctcaactgtcgtgcctagtcagctaccgacactgttgcagcctgtcacccagctgccttcccaggtgcaccctcaacttctgcagcccgctgtgcagtctatgggtattcccgctaatctgggccaagccgctgaggtgccgctgtcctcaggcgatgtcctgtaccaggggtttccacccaggttgccaccgcagtatcctggcgactcaaacattgcaccctcctcaaacgtggcatctgtatgcatccattcaaccgtcctgtcaccccctatgcctacagaggtgcttgccactccaggctacttcccaactgtcgttcagccttacgtagagtccaacctactggttcccatgggtggagtgggtgggcaagtgcaggtgtcacaaccaggaggctccctcgcgcaggcgcctactacttcctctcagcaggctgtgctcgaatctactcagggagtctctcaggtggcgcctgccgaacccgttgccgtagcccaaacacaggccacccagcccacgacacttgccagctctgtcgacagtgcccatagtgatgttgcatctggaatgtccgatggcaacgagaacgtcccaagttcctcagggcgacacgagggaagaaccaccaagcgccactaccggaagtctgtgcggtcccgctcccgccacgagaagaccagccgcccaaagctgcggattcttaatgttagtaacaagggagaccgcgtggtggagtgtcaactggaaacccacaataggaagatggtaacttttaaatttgaccttgatggcgataatccggaggagatcgctaccattatggttaacaatgactttatcttggccatagagcgggagtccttcgtcgatcaggttcgggagatcattgagaaggcagatgagatgctatctgaggacgtaagcgtggagcccgagggcgaccaggggcttgagtcactgcagggcaaggacgattatggcttctccggttcgcagaagctcgagggggaatttaaacagcctatccctgctagctccatgccacagcagatcggtatccctacatcaagtctgacacaggtcgtgcattctgcaggcagaaggttcattgtgtccccggtgcctgagtccaggctgcgcgaatcaaaggtgttcccaagtgaaataactgacacagtcgccgcatcgactgcacaatcacccggtatgaatctaagccattcggcttctagcctgtctttacagcaggctttctctgaactcaggagggcccagatgacagagggcccaaatacggcgcctcccaacttctcccatactggtcccacttttccagttgtgccaccatttctgagttctattgcgggagtgcccaccactgcagccgcaacagcaccagtccccgctacttccagtccacccaacgatataagtacatctgtcatccaatccgaggtcacagtccccactgaggaagggattgccggtgtggccactagcacgggcgtagtgacctccggaggactccccattcctcccgttagtgaatccccagttctctcatcagttgtgtcgtccattacaattcccgcagtggttagcatctccactacatctccatctctccaggtgccaacaagcacgtcagaaatcgtcgtgtcctccacagctctatacccctctgtcacggtgtctgccacctccgcttccgccggaggtagtacagccacacctggacccaagccacccgcagtggtgtctcagcaggctgctggatctactaccgtaggcgctactttgacttccgttagcacaacgacttcctttcccagcaccgcctcccagctctgcatccagctctcatcgtcaacttctacgcctacacttgctgaaaccgttgtcgttagcgcccattctctagataagacttcccactcctcaactacggggttagccttctccctttcggcccctagttcctccagctcacctggagctggggtgtcatcttatatttcccagcctggtgggcttcaccccctggtcattccaagcgtcattgcctctaccccaatcttgccacaagccgcaggacctacatctacccctttgctgccacaggtcccctccattcccccactggtgcagccagtggcaaacgtacctgccgtacagcaaacactgatccacagtcagccacaaccagcattgctgcccaaccagccacacacacactgccccgaagtggactcagacacacagcccaaagctcccggaattgatgatatcaaaaccctggaagagaagctaagaagccttttctccgagcattcgtcctcaggtgctcaacatgcctccgtctctcttgagacttccctagtcattgaatccaccgtaacacccggtatcccaacaaccgctgtggcaccttctaagctgctgacgtcgactactagtacctgcctaccgcctactaatttacctctcggaaccgtcgccctgcccgtcactcccgtggtgacccctggacaggtgtcaacgcccgttagcaccaccacctcaggcgtcaagcctggaaccgcacccagtaagccccctttaacaaaggcaccagtcctcccagtgggaaccgagctccccgctggcactttacctagtgaacagctccctcctttccctgggccaagcttaacccagagtcaacagcctttggaagacctggacgcacagctgcggagaacactatctcctgagatgattacagtcacctccgcagtcggacccgtgtcaatggcagccccaaccgcaatcaccgaagcaggaacacagccccagaaaggcgtttctcaggtcaaagaaggtccagtgctggccacctcctctggggcaggcgtctttaaaatggggcgatttcaggtgagtgttgccgcagatggcgcacagaaagagggaaaaaataaatccgaagatgccaagtccgtgcattttgagtcaagcacttcagaaagctctgtgctaagtagttcctctcctgagtccactctggttaaacctgagcccaacggcattacaatccctggtatcagcagcgacgtgccagaaagcgctcacaaaaccacagcctcggaggcgaaaagcgacactgggcagcccacaaaggtgggccgattccaagtaaccacaacagcaaacaaagtaggaaggttttccgtctcaaagactgaggataagatcacagacactaagaaggaaggacccgtcgccagccccccttttatggatctagaacaagctgtcctgccagctgtaattccgaagaaggagaagccggagctgtctgagcccagccatctgaacgggccaagctccgatccagaagcagcctttctaagcagggacgtggatgacggcagcgggtctccccatagtccacatcagctgagctctaagagtctcccttctcagaatctgtcccaatccctctctaatagtttcaactcgagttacatgtcatccgacaatgaaagtgatatcgaggatgaagacctcaagctggaattaaggcgcctccgcgataagcacctgaaggaaatccaagacctgcagtctaggcagaaacatgaaatagagtccttgtataccaaactgggcaaagtgcccccagctgtgataatcccgccagcagccccactctccggcaggcgaaggaggccaactaaaagcaaagggagcaagagttcccggtcatcatccctcggaaacaaaagtccccagctctcgggcaacctctctgggcagtctgctgcatcagtgctgcacccacagcagactcttcaccctccagggaacatcccagaaagtggacagaaccagctgctacagccgcttaagccttccccatccagcgacaatttatactccgctttcacttctgatggagctatttccgtgccttctttgagtgcccctggtcagggcacctcgagtaccaacactgtcggggctaccgtaaatagtcaggctgcccaggcccagcctcctgctatgacatcgtcgcgtaaaggaacatttactgacgatctgcataagcttgttgataactgggccagggacgcaatgaatctgtctggtaggagaggtagcaaaggccatatgaactacgaagggcctggcatggccaggaaatttagtgcacctggccaactgtgcatctctatgacatccaatctcggtggcagtgctcccatttcagcagcttcagcaacatcactgggccactttaccaaatccatgtgtccccctcagcagtatggatttccagctactccatttggtgcccagtggagtggaactggaggcccagcccctcagcccctgggccagttccagcctgttggtacagctagtctccagaactttaacatctccaaccttcagaaaagcatctctaatccaccaggaagcaatttgaggacgactta

SEQ ID NO: 246895 - DNA, 5927 bp, synthetic construct
  misc_feature 1..5927: note = Description of Artificial Sequence: Synthetic coding sequence
  source 1..5927: mol_type = other DNA
atggatatcaagaagaaggacttttgcagcgtatttgtgataattaactcccactgttgttgctgcccacagaaagactgcattaacgagggcgtgaaaccagcctcattcgataaggtggccatccctgaggttaaagagatcatagaagggtgcatcaggcagaacaaggacgagcgatactcaatcaaggacctgttaaatcacgccttcttccaggaggagacgggtgtgagagtggaacttgcagaagaggatgacggagagaaaatcgcaattaaactttggctgaggatcgaagacatcaaaaaattaaagggaaaatataaggataatgaggccattgaatttagctttgatctggagagggacgtgcccgaggacgttgcacaggagatggtggagtcaggatacgtgtgcgagggggaccacaagacaatggccaaggctatcaaagaccgagtcagccttatcaagagaaagagagagcagcgacagcttgtgagggaggagcaagagaaaaaaaagcaggaagagtcttcacttaagcaacaggtcgagcagtcttccgcatcacaaacagggatcaagcaacttccctccgcaagtaccgggatccccaccgcctctacaacatcagccagtgtctctactcaggtcgaacccgaagaacctgaggctgatcagcaccagcagctccagtatcagcagcccagcatttcagttctgtctgatggcacagtggactcaggacaagggtcctctgtctttaccgaatctcgggtgtcctcacagcaaacagtgagttatgggtcccagcatgagcaggcgcattctaccggcacagtgccaggccacataccttccacagttcaagcacagagtcagccacatggtgtgtatcccccatctagcgtggcacagggccagagtcagggtcagccatctagctcctcactgaccggggtatcttcttcccagcccatacagcatccccagcaacagcaggggatccagcagacagcccctccgcagcagactgttcagtattcattatctcagacttccacatccagcgaagcgacgacagcacagccggtgtcacagccacaggccccacaagtcttgcctcaggtcagtgcagggaagcaactacccgtctcacagcctgtccctacaatccagggggaaccacagatcccagtggccacccagccatcagtggttcccgtgcactccggcgcacactttctgccagtcggtcagccactcccaacccctctcttgccccagtatccagtgtcccagatcccaatttcgaccccgcatgttagcaccgcccagacaggattttctagtctcccgattaccatggccgctgggattactcagccactgctgacattggccagtagcgccaccaccgctgctattcccggtgtctcaacagttgtgccttcccagctgccgaccctgctgcagccagtgacccagctgcccagccaggtccacccgcagctattgcaacccgctgtgcagtcaatggggatacccgctaatctgggccaggctgcagaagtgcctctctcgtccggtgacgttttataccagggcttcccccctcggctgccaccccagtatccgggagactctaacatcgctccatcctctaatgtagcatccgtctgcattcactctactgtgctttcgcctccgatgcccaccgaggtgctagcaacacccggatactttccaaccgttgtgcagccctacgttgagtccaacctactcgtgccaatgggaggagtgggcggacaggtccaggtctcgcagcctggaggtagtttagcccaggcacccaccacctcctctcagcaggctgttctggagtccacacagggggtcagccaagtagcaccagcggagcctgtcgcggtcgcacagacccaggccacgcagccaacaactcttgcctcatctgtcgactcagcccactccgatgtggcctcgggcatgtctgacgggaatgaaaacgtgccctcatcttcaggtcggcacgagggaaggaccactaaaaggcactatcgcaagtcagtgcgaagcagatcccgccatgaaaagacttctaggccaaaattaaggatcctgaatgtgagcaataagggggaccgggttgtggagtgccagctcgagacacacaatcgtaagatggtgacatttaaattcgacctggatggggataatcccgaagagatcgccaccattatggtgaacaacgattttattctcgccatagagcgagaatcatttgtcgaccaggtgagggaaattatcgaaaaagccgatgaaatgctgtcggaagatgtaagcgtggaaccagagggcgatcagggacttgagtctctccaggggaaggacgactacggattcagtggaagtcagaaactcgagggggagtttaaacaacctattcctgcaagcagcatgccacagcagataggaatccccacaagtagtttaacacaggtggtacatagtgctggcagaaggttcattgtcagccccgtgcctgaaagtaggttgcgcgagtctaaagtgttccccagcgagattaccgatactgtggctgccagtaccgcgcagtcacccggaatgaacctttcccattctgcaagctcgctctctttacaacaagctttctccgagttgaggcgggctcagatgaccgaaggtccgaacaccgctcctccaaatttctcccatacggggcctacgttccccgtagtaccacccttcctgagttccatcgctggagttccaactacagctgccgcaacagcacccgtccctgccactagcagccctccaaatgacatatccacatcagtaattcaatcagaggtgacagtccctacggaggagggcatcgccggtgtggcaactagtacaggtgtcgtgacttctggaggactccccattcccccagtgagtgagtccccagttctgagttcggtggtatcctcaatcacaatccctgcggtcgtgtccatctctacaacatcaccatctctgcaggtgcccacttcaacaagtgagattgtcgtgtctagcaccgctctgtacccttccgttaccgtctccgcaacttccgcaagcgctggagggagcacggcaactccaggcccaaagccgccagcagtcgtcagtcagcaggcagctggatcaactaccgtcggggctaccctcaccagcgtgagtactacaacatcttttccgtccaccgcttcccagctatgcatccagctgagctcctcaacttcaacacccacactggctgagacggttgtggtaagtgctcacagcctggataagacatcccattccagtacgactggattagcctttagtctgtccgccccatccagttctagctcgccgggtgccggagtcagctcttacattagccagcctggcggtctgcacccactggtaatcccaagcgtaatcgcctcaacccctatcttacctcaggcagcaggtcccactagcacacccctgctgccccaggtcccatcaatccccccactagtccagcctgtcgccaatgtgcccgcagtccagcagactctgattcactctcaaccacagcctgcactcctacccaatcagccccatactcattgtcccgaagtagactccgacacacagcccaaagcacccggaattgacgacatcaaaacactggaagagaagctgagaagtctcttttcagagcactcttctagcggagctcaacacgctagcgtgtccctcgaaacatcccttgtgatcgagagtaccgttacaccgggtatccccacgaccgcggtggcccctagtaagttgcttaccagcactacatctacctgtctgccaccaacaaacttacctttaggaacggtggctttgcctgtgactcccgtcgtgacccctgggcaagtctcaaccccagtttcaactaccacaagcggggtaaaacctggcaccgcgccttctaagcctcccttgaccaaggcacctgtgctgccggtcgggacagagttgcccgcaggaacattgccctcggaacagctcccaccatttccaggtccctccttaacccagagccagcaaccgctcgaagacctcgacgcgcagttgaggcggactttatcacccgagatgatcaccgttacttcggccgttggacccgtctctatggctgcacccaccgcgattacagaagccggtacccagccccaaaaaggcgtttcccaggtcaaggagggtccagtgttggcaactagttcgggggctggcgtcttcaaaatgggcaggttccaagtgtctgtggcagctgacggagctcaaaaagagggtaaaaataaatcggaggatgcaaaaagtgtgcatttcgaatctagtacgagcgagtctagcgtgctctcatcgagctcccctgagtctacacttgtgaaacctgaaccaaatggcatcaccataccgggaatttcgagtgacgttccagagtctgcgcataaaacgactgcgtcagaggctaaaagcgacaccgggcagccaactaaagtcggacgttttcaggttacaacaaccgccaacaaagtcgggagattttccgtaagcaagactgaagacaaaatcacagatacaaaaaaggaggggcctgttgcttcaccccctttcatggatctggagcaggctgtgctgccagctgtgatcccaaaaaaggagaaacctgagttaagcgagccctcacatcttaacggaccttcttcagaccccgaggctgcatttctttctagagatgtagacgatggatctggatcccctcattcgccacaccagctcagctccaagtcactgccatcacagaacctgtcccagtccctgtctaactcattcaactcgagctacatgagctccgacaacgagagcgatattgaggacgaggatctgaagctcgaactgcggcgtctgcgggataagcacttaaaggagattcaggaccttcagtcccgtcagaagcatgagatcgaaagtctgtatacgaagctgggcaaggtaccacccgcagttatcatcccgccagctgctcccttaagtggccgacgaaggcgccctaccaaatcaaagggatcaaaatcctcccgtagcagctcgctgggcaacaaatctccacagctgtcggggaatctatcaggacagtccgccgctagcgtgctgcacccccaacaaacactgcatcctcctggaaacatccctgaaagcggacaaaatcaacttctccaacccctgaagccttcgccatcttctgataatctttattccgctttcactagcgatggcgcaatatcggtcccaagcttgagtgcgccagggcaggggacatccagcacgaacaccgtaggagctacggtgaattctcaggcggctcaagcacagccccctgcaatgactagttcaaggaaggggacatttaccgacgatctgcacaaacttgtcgacaactgggcgcgagacgccatgaacctgtcaggcagacgtggttctaaaggccatatgaattatgagggtccaggcatggcaaggaaattctctgcaccaggacaactatgtattagcatgacctctaacctgggaggtagcgcacccatctcggctgcctcagccaccagcctggggcacttcacaaaatcgatgtgcccaccccagcagtacggctttcctgctacacccttcggcgcacagtggtccggcaccgggggacccgcaccacagcccctgggtcaatttcagcccgtggggactgcctcactacagaatttcaacatctctaacctgcagaaaagcatctccaatccgcctgggagtaacctccgtaccaccta

SEQ ID NO: 246896 - DNA, 1182 bp, synthetic construct
  misc_feature 1..1182: note = Description of Artificial Sequence: Synthetic coding sequence
  source 1..1182: mol_type = other DNA
atgtccggcggtgctgctgagaagcagagcagcacgccaggcagcctcttcttgagccctcccgcacccgctccaaaaaacggttcgtcaagcgatagctctgtgggcgagaagctgggagctgcagccgctgacgccgtgactggtcgaaccgaagagtacagaaggagacggcacaccatggacaaggacagcaggggggcagctgccacaacaaccactaccgaacaccgcttctttaggaggagcgtgatctgcgacagtaatgcaaccgccctggagctcccaggactgccactgagtttaccccagccgtcgatcccggcagcagtgccccagagtgccccaccagagcctcatcgcgaggaaacggtcaccgcaacagccaccagccaggtcgcgcagcagcccccagcagccgctgcaccaggcgagcaggcggtggcagggcctgcacccagcacagttcctagttctacctccaaagataggcctgtgtcgcagccaagtctcgtgggctccaaggaagagccccctcccgcacgtagcgggagtggtggcggaagcgctaaggaaccccaggaagagaggtcacagcagcaggacgacattgaggagctggaaacaaaggctgtgggtatgagcaatgatggaagatttctcaaatttgatattgagatcggacggggaagttttaaaactgtgtacaaggggctggacaccgagactacagttgaggtagcttggtgtgaactgcaggaccgaaagctcactaaaagcgaaaggcaacggtttaaggaggaggctgaaatgcttaagggcctgcagcacccgaatatagttcggttttacgattcgtgggaatccaccgtcaaaggcaagaaatgcattgtgctggtaacagagttgatgacctcaggaacactaaaaacttatctgaagcgatttaaagtgatgaagattaaggtgctgaggtcatggtgtagacagatccttaaggggcttcagttccttcatacgaggaccccgcctattattcacagggatttaaagtgtgataacatcttcatcactggtccaactggatctgtaaaaatcggagatctgggactcgccaccctcaaaagggccagcttcgcaaagagcgtgattggcatgttccaagtgtatctgggggcatag

SEQ ID NO: 246897 - DNA, 8642 bp, synthetic construct
  misc_feature 1..8642: note = Description of Artificial Sequence: Synthetic coding sequence
  source 1..8642: mol_type = other DNA
atgtccggaggggcagccgaaaagcaatcctccactccaggcagcttgtttttatcacctcccgcacctgctcccaaaaacggcagcagcagcgacagctcagtgggcgagaaattgggggcagctgctgccgatgcagttacagggagaacggaggaatatcggaggcgtcgacacaccatggataaggattctcgcggagctgccgctaccactactacaacagagcaccgattttttagacggtctgtgatctgtgatagcaatgctaccgcgctagagctgccagggctccccctgtctctcccacagccttctatccctgcagccgttccgcaatctgcacctcctgagcctcatagagaggaaactgtgactgccaccgctacgtcacaggtcgcccagcagccccctgccgcagccgcaccaggcgaacaagccgtggctggaccagcaccatcaaccgtcccatcgtcaacctctaaggacaggcccgttagtcagcctagcctggtgggaagcaaagaggagcctccaccagcccgttccggttcaggtggagggtccgctaaggagccccaggaggagagaagtcagcagcaagacgatattgaagagctagagaccaaagctgtgggaatgtctaacgacggcaggttcttgaagttcgacatcgagatcggacggggttcttttaagacggtttacaaaggcttggacactgagactacggtggaggttgcgtggtgtgagttgcaggatcggaagctgaccaagagtgagcggcagcgctttaaggaagaggccgaaatgttgaagggtcttcaacatccaaatatcgtgagattctacgatagttgggagagcacagtgaagggcaaaaaatgtatcgttctcgtcacagagctgatgacctccgggaccctcaagacatatctgaaaaggttcaaagttatgaagataaaggtgctccgcagctggtgcagacaaatattaaaggggctgcaattcctgcatactcggactccacccatcatccaccgagacctgaaatgtgataatatatttattacaggacctactggatcggtgaagattggcgacctgggcctggccactctgaaacgagcttcatttgccaaatcagtgataggcaccccagagttcatggccccagagatgtatgaggaaaaatacgacgagtccgtggatgtgtacgcattcggaatgtgcatgctggagatggccacgagcgaatacccgtactctgaatgtcaaaacgcagcgcagatatatcgccgagtcaccagcggcgtcaaaccagcctcctttgataaggttgccattccagaggtcaaggaaattatagaaggatgtatcagacagaataaggacgagcgatattccattaaggacctgctcaatcacgcttttttccaggaggaaaccggagttcgagtggagctggccgaggaagacgacggcgagaagattgcaatcaagttatggctgaggatcgaggatataaaaaaactgaaaggcaaatataaggacaacgaagctattgagttttcttttgatttagagagagatgtgcctgaagatgtggcgcaggaaatggtcgaatcgggttacgtctgcgaaggagatcacaagactatggccaaagccatcaaggaccgcgtgtctcttatcaagcgaaaacgggagcagcgacagttggtccgagaggagcaagaaaagaagaaacaggaggagtcttccctgaaacagcaggtggagcagtcatctgcaagtcagacaggcatcaaacagctgccttcagcatctactggaattcccactgctagcaccactagtgcctcggtgagtactcaggtcgaacctgaagagcccgaagccgatcaacaccagcagttgcagtatcaacaaccgtcgatatccgtgttgtcagacgggactgtagattccggacagggctcatctgtgtttacagagagtcgtgtttcatcacagcagaccgtttcatacggttcacagcatgaacaggctcactctactgggactgtacccggtcacatcccctctacagtgcaagcacagagtcagccccatggcgtctacccccctagctcagtgccaaggcgtggaaggtccatgtccgtgtgcgtgccaatcttcctgctgctgccgctgtgccccgcaagtctaccggtcctgtttcatcccacagccagcaccgtatgtacctccttctcgtttcccccaccagattgtcccgaagagacttttgcggaaaaactcagcaaagcacttgagtctgttctcccaatgcactccgcctcccagcggaagcaccgccgaagctcactcccaagtctattcgtaagtaccccacaatctatggcccatccctgtggcggaactccaacttacccagagagccagatcttctttccaacaattcacgagcgcccagtctccttttcaccccctccaacctgtcctcctaaggtcgccataagtcagcgtcggaagtctacatcattcctggaagctcagacgcaccattttcagccattgttgagaaccgtggggcagtccctgctgcctccaggtggcagtccaaccaactggacaccagaggccgtggtaatgcttgggactactgcatcccgtgtcaccggggagagttgtgagatccaagtgcacccaatgtttgagccctcgcaggtttactctgactatcggccaggacttgtgctccccgaagaagcacactactttataccacaggaagctgtgtacgtcgccggagtgcactaccaggccagggtagctgagcaatatgagggtataccctacaattcctcagtcctgtcatcgcccatgaagcaaattccggagcagaaacccgtgcagggcggtcccacctcttcttcggtctttgaatttccatctggccaggcattcctagtcggccatctgcaaaacctccgactcgattccggcctagggcctggatccccacttagctccattagcgctccaattagtacggatgccactaggcttaaatttcatccagtatttgtgcctcactctgcacccgcagtgctcactcataacaatgaaagcagaagtaactgtgtcttcgagttccacgttcacaccccaagttccagttctggcgaaggcggaggtatcttgccccagcgggtgtaccgcaatcggcaggtcgccgtcgatctgaaccaagaggagcttcctccccaaagcgtaggtcttcacggttacctccagccagttactgaggagaaacacaattatcatgctccagaattgacggtcagcgtggtcgaacccatcgggcagaattggcctataggatccccggaatactcctccgattcctcccagattacgagtagtgacccctccgattttcagtcacccccaccgactggcggagctgccgcaccatttggcagcgatgtgagtatgcctttcatccaccttcctcagacggtcctgcaggagagcccactcttcttttgcttccctcagggtaccacatcccagcaggtacttaccgccagcttctcttcgggcggatccgcattacatcctcaggcccaggggcagtcacagggccagccctccagcagctcgctcactggcgtctcaagtagccagccaatccaacatccacagcagcaacaggggatccaacagacagcccctccccaacagacagttcagtactcactatcgcaaacctctaccagctccgaggccaccaccgcccagccagtgagtcagccccaagccccacaggtactccctcaggtctcggctggtaagcagctacctgttagtcagcctgtccctactattcagggggaacctcagatccccgtcgcaacacaaccatctgtagtaccagtacattctggagcgcattttctgccagtgggccaaccccttcctactccgttgcttccacagtatcccgtgtcccaaattcccatttcgaccccacacgtaagtaccgcccagaccggcttttccagtctgcccatcaccatggcagccggaatcactcagcccctgttgacgttagcaagcagcgctaccacggcggcaatcccaggggtctcgaccgtggttccaagtcaactgcctactctcctgcagcccgtgacccagctccctagccaggtgcatccacagctacttcagcccgcagtgcagagcatggggatcccagctaatctgggtcaggccgctgaggttcctttatcttcaggtgatgtgttataccaaggcttcccgccacggctccccccacagtatcccggtgattcaaacatcgcaccttcaagtaatgtcgcaagtgtgtgcattcactctacggtgctttctccaccgatgccaacagaggtgctcgccacccctgggtatttcccaaccgtagtccagccctacgttgaatccaacctcctcgtccctatggggggtgtggggggtcaagtgcaggtttcccagcccggtgggagcctggcccaagcacccactacgagctctcagcaagctgtgttggagtctacgcagggtgtgagccaggtggccccagcagagccagtggcagtggcccaaactcaggccactcagcctacaaccctcgccagcagcgttgactctgcccatagcgacgtggctagtgggatgagcgatgggaacgaaaacgtaccatcttcttcgggaaggcatgaaggcaggacgacaaagcggcactatcgcaaaagtgttcgcagcagaagcaggcatgagaagaccagtaggccaaagctgcgcatcctgaacgtgagcaacaagggcgatagggtggtcgagtgccagctggaaacccacaataggaagatggtgacctttaagtttgacttggacggagacaacccagaggagatcgccactataatggtgaacaacgacttcatcctagccatcgagagagagtcattcgtggaccaagtcagggagataatcgagaaagctgatgagatgctatcggaggacgtctcagtcgagccagaaggcgatcagggactggagagtttacaaggtaaagacgactacggcttttcaggctctcagaagctggaaggggagtttaagcagccaattccggcttcctcgatgccccagcaaatcggtattccgacctccagcctcacacaggttgtccacagtgctgggaggcggtttattgtgtccccagtgcccgagtcaaggctcagggagtcaaaggtgtttccctcagaaatcaccgatacagtcgctgcctctacggcccaaagcccaggaatgaacctcagtcactccgcttctagtctctcgctccagcaagcattctcagaattgcgccgagcacagatgactgaggggccaaatactgctccacctaattttagccatactgggccaacgttcccggtagttcccccattcctatcatcaatcgccggagtacctacaaccgctgccgctaccgcacctgtgcccgctacatcttctccaccaaacgatattagcacatccgtgatccaatccgaggttacggttccgacggaggaagggatcgccggtgtcgcaaccagcactggcgtcgtgacttccggcggactgccaataccaccagtctctgagagccctgtactgtctagcgtggttagctcgatcaccatccccgcagtagtatctatttctaccacaagcccctcgctccaggtcccgacttctacctcagaaatcgtcgtgtcctctaccgccctgtacccgagcgttactgtcagtgcgaccagtgcgtctgctgggggtagcaccgcaacccctggtccgaagccacccgcagtggttagccagcaggcagcgggaagcacaaccgtcggggctaccctgacctcagtaagtactactaccagtttcccaagcacggcatctcaactctgtatccaactgagctcttcaaccagtacccctaccctggcagaaacagtagtggtctcagcccacagtctggacaagacatctcacagcagtaccactggcctagctttttcactcagcgcgccatccagtagttcttcccctggggctggggtctcgtcttacatcagtcagccgggaggattacatcccctggtgatcccatcagtgattgctagtacgccaattttacctcaggctgctggacctacctcaacgcctctgctccctcaagtcccatcgatcccgcctctcgtgcagcccgttgcgaatgtgcctgcagtccagcagacccttatacactcacagccccaaccagctctgctgcctaatcagccccacacacattgtcccgaggttgactccgatacacagccaaaggccccagggatcgatgacataaagaccctggaagagaagctgagatcattgttttctgagcatagcagcagcggagcacagcatgcctcggttagtctggaaacaagcctggtcatcgagtccacagtaacgcctggtatccctaccacggccgtggccccatccaaattgctgacctccactacctccacttgcctgccgccaaccaatctgcccctcgggacagttgctctacccgtgactcccgtcgtcactcccggtcaagtctcgacacccgtgagcacaacaacgtccggcgtgaagccaggaaccgcaccttcaaaacctcccctgacgaaggcccctgtcctaccggtgggaaccgagttgcccgctggcacgctgcccagtgaacagcttccaccatttccaggcccttccctgacccaaagtcagcagccactggaagacctggacgctcaactgagacgaaccttatctcctgaaatgattacggtcacttctgcagtcggccctgtgagtatggccgctccgacagccatcactgaggccggtacccagcctcagaaaggtgttagccaggtcaaggaagggcctgtactggcaacctcaagcggcgctggcgtgttcaagatgggtcggttccaagtgagcgtggccgcagacggcgcacagaaggagggcaaaaataagtcagaggatgccaagagcgtgcattttgagtccagcaccagtgaatccagtgttctgagctcttcctcacccgagagcactctcgtcaaacccgagccaaatggcatcactatccccggtatttctagcgacgtgcccgagtctgcgcacaaaacgactgctagtgaagccaaaagcgacacaggccagccgaccaaagtgggacggtttcaggtcacaactactgctaataaagtcggcaggttctctgtatctaagactgaagacaagattaccgacaccaagaaagagggtcccgtagcctccccacccttcatggatctggaacaggcagtgctgcccgcagtcattcccaagaaagagaaaccggaactctcagagccaagtcacctcaatggtccctcctccgaccccgaagcagccttcctgtctcgtgacgtagatgacggctcgggcagcccgcactctccacaccagttgagttccaagagtttaccctcccagaatttaagtcaaagcctgtccaacagcttcaattctagttacatgtccagcgacaatgagtctgatatcgaagatgaagatctcaaactggagcttagaaggctccgggataaacacctcaaagagattcaggacctgcagagcagacagaaacacgaaatcgagtctctctacacaaaattaggcaaggtgcccccagcggtgataatacccccagctgccccattgagtggaaggcgcaggcgacctacaaagtcgaaggggtccaagtcctcccgcagctcctcattgggcaacaagtctccccagctgtctgggaacctaagcggacaatcggcagccagcgttttgcacccgcaacagacattacaccccccaggtaacatccctgagtctggtcagaatcaacttctccagccactgaagccatccccaagcagtgacaacctgtacagtgcattcacgtctgacggcgctattagcgtaccgagcctcagcgcccctggacagggcacctccagtaccaacactgtcggggctaccgtgaactcccaggccgctcaggcacagcctcctgccatgacatcatctagaaaaggtacattcaccgatgacctgcacaaactggtggacaactgggctagggatgctatgaacctgtccggccgacgcggttctaaagggcatatgaattacgagggacccggaatggccagaaagttcagcgcgccagggcaactttgtatcagcatgacgtccaatctgggtggcagcgcccctattagtgcggcatccgccacttcactcggacacttcactaagtccatgtgtccccctcagcagtacggctttccagcgactcccttcggggcacagtggagtggcacggggggtcccgctccccagccccttggacagtttcagcctgtggggaccgcatctctccaaaactttaatatctcgaatctgcagaagtccataagcaacccccctgggtccaatttgaggaccactta

SEQ ID NO: 246898 - DNA, 6404 bp, synthetic construct
  misc_feature 1..6404: note = Description of Artificial Sequence: Synthetic coding sequence
  source 1..6404: mol_type = other DNA
atgagcggaggagccgctgaaaagcaatccagtacaccaggcagtctgtttctgtcccctcctgcacctgcgcctaaaaatggttccagcagcgacagctccgtgggagaaaagttgggtgccgcagcagccgacgctgtaacaggtagaaccgaagagtatcggagacgacgccatactatggacaaagattcccggggtgctgctgcgactacgacaactacagagcaccgctttttccgaagaagcgtgatctgcgacagcaacgctaccgctcttgaacttcccggactgccactctccctccctcaaccttcaatcccagctgccgtcccccagtcagctcctcccgaaccacacagagaggagacagttaccgccacggccactagtcaggtggctcagcagccaccagccgcagctgccccaggggagcaggccgtcgcagggccagctccctctactgtgcccagctccacctccaaagacaggccagtgagccagccgtccctggtgggctcaaaggaggaacctcccccagcaagatcaggttcaggaggaggcagcgctaaggagccccaggaggagcgcagccagcagcaggacgacatcgaggaactcgagacgaaggccgtcgggatgagcaacgatggaagattcctgaagttcgatatcgagatcgggaggggctctttcaaaaccgtttataagggactcgacactgagaccactgtcgaggtcgcttggtgtgaactgcaagatagaaagctcacgaaaagtgagcgccaaaggttcaaagaagaagctgagatgctgaaaggcctccagcaccctaacatcgttcgcttttatgattcttgggaatccactgtgaagggtaagaaatgtattgtgttggtgaccgagctgatgaccagtggtacattgaagacgtatctaaagaggttcaaggtcatgaagatcaaggtgctgagaagctggtgtcgccaaattttaaaaggtcttcaattcttgcacacgagaactccccctataattcaccgtgatctgaagtgtgataatatatttatcaccgggcctacggggtccgtgaagattggtgacctcggtctggcaactttgaagcgggctagcttcgcgaagtcggttatcggtactccagagttcatggcacccgaaatgtacgaagagaaatatgacgagagcgtggatgtctacgctttcggaatgtgcatgctggaaatggctacttcagaatatccctattcagagtgtcagaatgccgctcagatctaccggcgtgtgactagtggcgtcaaaccagctagctttgacaaggtcgctatccccgaagttaaagagatcatcgaggggtgcatcagacagaataaggatgaacgctactccatcaaggatttgctaaaccacgctttctttcaagaggagaccggcgtgagagtggagctggccgaggaggatgatggtgaaaagatcgcgattaagttatggctccgaattgaggatattaaaaagctcaaaggcaagtataaggataatgaggcaatcgagttctcctttgacttggagagggacgtgccagaggatgtcgcccaggaaatggtggagtccggctatgtgtgtgagggagaccataaaaccatggctaaagccatcaaggatcgcgtcagccttatcaagcggaaaagagagcaacgtcaactggtaagagaagagcaggaaaagaagaagcaggaggaaagcagtctcaagcagcaagtggaacagagttccgcatcccagacaggcattaaacagctgccttccgcaagcactggaattcccacagccagtaccacatccgctagcgtgtcaacccaagttgaacctgaggagcctgaagcagatcagcatcagcagctgcagtatcagcagccgtccatctctgtgctgtcagacggtactgtggattcaggtcagggctcttctgtgttcactgagtcacgcgtctcttcccagcagaccgtgtcatacgggtctcagcacgaacaggcgcattccactggaacagtacctgggcatattcctagcactgtccaggcccaatcacagccacatggagtttatccgccttccagcgtggcacaggggcagagccaggggcagccgtcttcatccagcctcacgggcgttagttctagccagcccatccagcaccctcaacagcagggcatacagcaaaccgcacctcctcaacagaccgtccagtatagcctctcacagactagcaccagcagtgaggcaacgactgcccagcccgtgagtcaaccacaggctcctcaggttctgcctcaagtgtccgccggaaagcagagcacccagggcgtgtctcaagtggccccagccgaaccagtggctgtcgcacagacacaggcgactcaaccgactaccctcgccagcagcgtcgactccgctcacagcgacgtcgcctcgggcatgtcggatggaaatgaaaatgtgccgtcttcaagcggtcgccacgaaggtcgcacgacaaaaagacactacagaaaatccgtgcggtccagaagccgccatgagaagacttctcgacccaaactaagaatcttgaatgtgtcaaataaaggggacagagtggttgaatgccagctcgaaacacacaatcgcaaaatggttacgttcaagttcgacctggatggagataatccggaagaaattgctacgatcatggttaacaatgacttcatcctcgccattgaacgggaatccttcgtcgaccaggttcgcgaaatcattgagaaggccgatgagatgttaagcgaggacgtgtctgtagaacccgagggggaccagggactcgagtctttgcagggcaaagatgactacgggttcagcgggagccagaagttggaaggagagttcaaacagccaattcctgccagttccatgccccaacagattggcattccaaccagctccctcacgcaggttgtccattccgcgggtaggagattcatcgtttcccctgttcccgaaagcagactgagggagagcaaggtattcccttccgaaatcacagacaccgtggccgcaagcacggcccaatcaccaggaatgaatctttcccacagtgcatcctccctgagcctgcaacaggcattctccgaactgcggcgtgcccagatgacagaaggcccaaacaccgctccgccaaacttctctcacacaggacccacctttcccgtcgtgccaccctttctgtcttcaattgccggtgtgcccaccactgctgcagccaccgcccctgtgcccgctacgtccagtcccccaaatgacatctcaacatctgtcatccaaagcgaggtgaccgtccctacggaggaagggattgccggtgtggctacatcgacaggcgtggtaaccagcggcggtctccccatccctcccgtttccgagagtcccgtgctcagctccgttgtctcgtctataaccattccggcagttgtttctataagcaccacctctccgtccctacaggtgccaactagcacctctgaaattgtggtcagtagcactgccctctatcctagtgtcactgtatcagcaactagtgcctctgctggcggatcaacagctaccccgggaccaaagccccctgcagtggtgtcacaacaagctgctggctcaaccaccgtgggagctactctgacctctgtcagcaccaccacttcatttccctctacagctagtcagctctgtattcagttgagctcatcaacttctactcctacactcgctgagaccgtcgtggtgagtgcccattcactcgacaaaacgtctcacagctctacgaccgggcttgccttctctttgtccgctcccagttcctctagctcacctggcgcaggggtgtccagttacatcagccagccaggcggactccatcccctggtcattccttccgtcattgctagtacaccaatcctgcctcaagcagccggacccacatccacacctctactgccacaggtgccgtcaattccacccctagtgcagcccgttgctaacgtgccagcggttcagcaaacactgattcacagccagccacaaccagcgctgctccccaatcagcctcatacgcactgccctgaggtggacagcgacacccagcccaaagctccagggattgacgacatcaaaactttggaggagaaactgagatcactgttctccgaacactcatcatcaggagctcaacatgcgtccgtgagcttagagacaagcctggtgatcgaaagtaccgttactccagggatccccacgactgctgtcgcaccctccaagttgttgacatctacaaccagcacttgccttccacctaccaatctgcctctcggaactgtggccctgccagtcacccccgtggttacccccggtcaagtgtccacacctgtgagcaccacaacctccggcgtgaaacccggaacagccccttctaagccacctttgaccaaagccccagtactgccggttgggactgagctgccagccggtacccttccttctgagcaactgcctccattcccaggaccatctctaacccagagccagcagcctctggaggacctagatgcccagctccgtcggacgctgtcaccagaaatgatcactgtcactagtgcagtgggccctgtgtcgatggctgccccaaccgctattacagaggccggaacccaaccacaaaaggtttcacaggttaaagaaggacccgtgttagcaacatcctccggggctggcgtgttcaagatgggcagattccaggtgtcagtggccgctgacggtgcccagaaagagggcaagaacaagtccgaggatgcgaaatcagtgcactttgagtcttctacatcagagtcatctgtgttatcctctagcagcccagaaagcaccctcgtgaaacccgaaccaaacgggattaccattccagggatctcctctgatgtgcccgagagcgcacataaaactaccgcatctgaagctaagtccgacacaggccaaccaacgaaagtgggccgtttccaggtgaccacaacagcaaataaggttggccgattcagcgtgagcaagacagaggacaagatcactgatacaaagaaagagggccctgtcgctagcccaccattcatggatcttgaacaggctgtgctgcccgcagttatcccaaagaaggaaaagcccgaactcagtgagccgagccatctcaatggacccagttccgaccctgaggccgcatttctgtccagagatgtcgatgacggcagtgggtctccccacagtccccatcagctgtcttcaaagtctctgccgagtcagaatttgagccaatcgctctctaacagctttaacagcagttatatgtcgtcagacaatgaatctgatatagaagatgaagatctgaagttagaactcaggagattacgggacaagcacctgaaggagatccaggatctgcagagcagacaaaagcacgagattgagtcactctacactaaactgggtaaggttcctccagctgtgatcattcctcccgcagctcctctgtctggacggagacgccgacccaccaagtctaagggtagcaagagttcccgaagctcctcactcggcaataagagcccgcagctttctggcaatctgagcggacaatctgccgcttccgtattgcacccacagcagacgctgcaccccccaggtaatatacccgagtcaggtcaaaaccagctgctccagccgttgaagccatctcctagttcagataacttgtattccgctttcaccagcgacggcgcaatttcggtccctagcctctcagcgcctggtcagggcaccagctcaacaaatactgtcggcgctacagttaacagccaggccgctcaggcccagcctccagccatgaccagctccagaaagggcaccttcactgacgatctccacaagctggtcgacaactgggcacgcgacgccatgaatttgtctggaaggagagggagtaaggggcacatgaattacgaaggtcccggtatggccaggaaattcagcgcgcctggtcaactatgtataagcatgacatccaacctaggcggttcggctccgatatctgctgcttccgctacctctttggggcatttcacaaaatctatgtgcccaccccagcagtacggattcccagccactccgttcggcgcacagtggagtggcaccggcggtcccgcaccacagccactggggcaatttcaacctgtcggaacagcatccctgcagaactttaacatctcaaacctgcagaagagcatttcaaaccccccaggttctaacctcaggaccactta

SEQ ID NO: 246899 - DNA, 975 bp, synthetic construct
  misc_feature 1..975: note = Description of Artificial Sequence: Synthetic coding sequence
  source 1..975: mol_type = other DNA
atgtcgagtgacaacgaatccgacattgaggatgaagacctaaaattggaactgcgcaggcttcgggataagcatctgaaagagatccaggacctgcagagccgccaaaagcacgagattgaatctctgtacacgaaactcggcaaggtcccaccagctgtgattattcctcctgctgctcccctctcagggagaagacgacggccaaccaaatcaaagggctcaaaatcctctagaagctcaagcttgggaaataagagtccgcaactctcgggcaatctcagtggacaaagcgcggcaagtgttctgcatcctcagcagacgctgcacccccctggtaatatccccgaatcaggccagaaccagcttctgcaaccactgaagccatcgccatctagcgataacctctactctgcatttacctccgacggcgcaatttccgtgccttccttatccgcaccaggacaagggaccagcagcacaaacacggtaggcgctaccgtcaactcacaagccgctcaagctcagccaccagccatgacatccagtcgtaagggtacattcacagacgatcttcacaaactagtcgacaactgggcgagggacgcgatgaatctgagtggccgtcgtggttcaaaaggccatatgaactatgaaggcccaggaatggcgaggaagtttagcgcaccaggtcagctctgcatcagcatgacatctaacctgggcggaagcgcacccattagcgccgcatcggcgacttctcttggacacttcaccaagtcaatgtgccctcctcagcagtacgggtttccagcaactccctttggagctcagtggtctggaaccggaggtccagcgccacaacccctcggtcagtttcagccagtcgggaccgcttccctccagaatttcaacatcagcaatctgcagaagtcgatctccaaccctccaggaagcaacctcaggaccacatag

SEQ ID NO: 246900 - DNA, 7928 bp, synthetic construct
  misc_feature 1..7928: note = Description of Artificial Sequence: Synthetic coding sequence
  source 1..7928: mol_type = other DNA
atgagtggaggtgcggcagagaagcaatcttctactcctggatcactttttctgagcccccctgcccctgcaccgaagaacggttcctccagcgattctagcgtgggcgaaaagctgggtgccgctgccgcagacgctgtaaccggccgaaccgaagagtacagaagacgtagacatactatggacaaagattctcgcggtgccgctgcaaccaccacaacgacggagcataggttttttcgtagaagtgtgatctgcgactctaatgccacagccctggagctccccggacttcccctttcgttgcctcaaccgtctattccggcagccgtcccccaatcagccccacctgaaccacacagagaagaaacagttacggcaactgcaactagccaggtggctcaacagccccctgcggcagctgcccctggcgagcaggccgtcgcgggacccgctcccagcacggttcctagttctacatcgaaagatagaccggtgtcacagccctctctggtcggttcgaaggaggagcccccacccgcacggtccggcagcggcggtggatcggccaaagaaccccaagaggaacggtctcagcaacaggatgacattgaagagttagaaactaaggcggttggcatgtcaaatgacggacggtttctgaagtttgatatcgaaataggcaggggcagctttaaaactgtttataagggcctggacaccgaaacgactgtcgaagttgcgtggtgtgagcttcaggaccggaagctgacaaaatccgagaggcagagatttaaagaggaggccgaaatgctcaaaggcttacagcaccctaacatagttcgattttatgacagctgggaatctacagtcaagggcaagaagtgtatcgtgttagttacggaactaatgacatctggcacgctgaagacctacctgaagcggtttaaggtcatgaagatcaaagtgctgcgctcatggtgtcgccaaatcctgaaaggcctacagttcctgcatacaaggaccccgcctatcatacatagggacctgaaatgtgacaacatatttataaccggaccaaccggctccgtgaaaatcggggatttaggtttggctaccttgaaacgtgcaagcttcgctaagtccgtgataggcacacccgaattcatggcacccgagatgtatgaggagaagtacgatgaaagtgtcgacgtgtacgcattcggcatgtgtatgttagagatggccacttccgaatatccgtatagcgagtgccaaaatgcagcgcaaatctacaggagagtgactagcggcgtaaaacccgcttcatttgacaaagtcgccatccccgaggtgaaagagattatagagggatgcattaggcagaacaaggatgaacgctactccatcaaagatctgcttaatcacgcattctttcaagaggagaccggtgtgagggtggagctcgctgaggaagatgacggcgagaaaattgcaataaaactgtggctgaggattgaggacattaaaaagctgaaggggaagtacaaggacaacgaagctattgagttcagcttcgatttggagagagatgtcccggaggacgttgctcaagagatggtggagtctggatatgtctgcgagggagaccacaaaacgatggcaaaagctatcaaggatagagtaagccttataaagcgtaagagggaacagcgtcagctggtaagagaggagcaggaaaaaaaaaagcaagaggagtctagtctgaaacaacaggtcgaacaatcttctgcaagtcaaaccggcattaaacagttaccatcagcttctaccggaattcccaccgccagtaccacctccgcgtctgtttccacccaagtcgagcccgaagaacctgaagcagaccagcatcagcagctgcagtaccagcaacccagtatctccgtgctatccgacggaactgtggattccggacagggttccagcgtgttcacggagtccagagtatcctctcagcaaactgttagttacggctcccagcacgagcaggctcattcaacaggtacggtgccaggccatatcccaagcacagtccaagcccaaagccaacctcacggcgtatatcccccttcaagcgtgcctcagagtatggctcacccttgcggtggaacccctacctaccccgaaagccagattttcttcccaacgattcatgagcggcctgtgtctttctcacctccacccacctgcccaccgaaagtagctatttcccaacggcgaaagagtacaagctttctggaggcccagactcatcactttcagccccttttgaggacagtgggccaaagcctgctgcctccagggggttcacctaccaattggacgccagaagcggtggtgatgcttgggactaccgcctccagagtcacgggcgagagctgtgagattcaggttcatccaatgtttgagcctagccaggtgtactctgattaccgtcccggattagttctccccgaggaagcccattatttcattccccaggaggccgtatacgtcgcaggtgttcattaccaggctagagttgccgagcaatatgaaggcatcccctataacagctcagtgttgtccagccccatgaaacagattccagagcagaagcctgttcaaggcggtcctacgagctcctctgtgttcgagttcccctccggccaagccttcctggtgggccatctgcagaacttaagactggattccgggcttggacccggttcacctctgagctcaatctccgcaccaatcagcactgatgcaacccgtctgaaatttcaccccgtattcgtcccccactccgctcctgcggtcctgacgcataacaacgagtcaagaagtaattgcgtttttgaatttcatgtacatacaccatcatcctcttcaggtgaggggggtggcattctaccacagcgcgtttaccggaatcgtcaggtggcagtggatcttaaccaggaagagctgccgcctcaatccgtgggactgcatggatacctccagcctgtcacagaggaaaagcataactaccacgcccctgagttaaccgtttcagtggttgaaccgatcggccagaattggcccataggttcccctgaatattcatctgattccagtcagatcactagttctgatccttcggacttccagtctcccccacccactgggggtgcagcagcaccctttggatccgatgtatctatgccttttatccatctcccccagactgtactccaggagtcacccctgtttttctgtttcccccaaggtaccacctcacagcaggtcctcaccgctagttttagctctggtggttccgccctgcaccctcaggctcagggtcagtctcaaggccaaccgagcagcagcagcctgaccggtgtgagttcgtcccaacccatacagcacccgcaacaacagcaggggatacagcagaccgccccaccgcagcagacagttcagtatagcctgtcgcagactagcaccagtagcgaggcaacgactgcccagcccgtgtctcagcctcaggcccctcaggttctgcctcaagtgtccgctgggaaacaggggttccccccaaggctccccccacagtatccaggagattccaatatcgccccaagtagtaatgttgcttccgtgtgtatccactcaactgtcctgtcccctccaatgcccacagaggtgctcgccacacccggatatttccccactgtcgtgcagccctacgtagaaagtaatctcctggtccccatggggggtgtagggggtcaggttcaggtgtctcagcctgggggatctctggcccaggcccctactacaagcagtcagcaggcggtgctggagagcacccagggcgtctcccaggtggcaccagctgagcctgtggcagttgcacaaacacaggctacccagcctaccacactggcaagctcagtcgattcagcacacagcgatgttgcttcgggcatgagcgatgggaacgaaaacgtgcccagctcctctgggcgtcatgaaggcaggactaccaagcgacactaccggaagtcggtgagatccagatccagacatgaaaaaacatcaaggcccaagctgcggatcctgaatgtatccaataaaggagatagagtagttgagtgccagctggagacccataaccgcaaaatggtgacattcaaattcgacttggatggggacaatccagaggagatcgccacaattatggtgaacaatgatttcatcttggcaatagaaagggagtctttcgtagatcaggtaagggagatcatagaaaaggctgacgagatgctttctgaggatgttagcgtcgagcccgagggggatcagggactcgaaagtctgcaaggaaaagatgattacggattttctggcagtcagaagttggaaggagaattcaagcaacccattcctgccagctctatgccgcagcagattgggatacccaccagctcactgactcaggtcgtgcattcagccggtagaagattcattgtgtccccggtgcccgaaagcaggctccgagaatcaaaggttttcccctccgagatcacggataccgtcgctgcctcgaccgcacagtctcccggaatgaacctatcccactctgcttcatcactgtccttgcagcaggcctttagcgagctgagacgggcacaaatgacagaaggccctaatacagcaccgccaaatttctcccacacagggccaacatttcctgtagtccccccattcttgtcaagcattgccggtgtgcctaccacggctgctgccaccgcaccagtgccagccacatcgagcccacccaatgatatctctacctctgtgatccagtctgaggtcaccgtgcctaccgaggagggcatagctggagttgctacctctacaggagtcgtcacgtccggagggctgccgatcccgcctgtgtcagaaagtcccgtgctgtcttctgtagtctcatctatcactatccctgccgttgtctcaatctcaacaacttctccaagtctgcaggtcccaacatccacctccgagattgtagtttcttcgacagctctgtatccatcggtgacggtgagcgctacatccgctagtgctgggggttcaaccgccacacccggacccaagcctcctgcagtggtaagccagcaggccgctggcagcaccacagtaggagcgacattgacctccgtctccacaaccacgtcattccctagtactgcctctcaactgtgcatccagctgagctcctccacctccacacctactctcgccgagactgtggtggtcagtgcccacagtcttgacaagactagccacagctccacaacagggttggctttttcgttatctgctccatcatcaagtagctctcctggtgctggtgttagttcttacatctcccagcccggaggactccacccactcgtcatcccatccgtaattgcaagtacacctatcctccctcaggccgctggtcccacgtcaactccactcctccctcaggtgccgtccatcccaccactggttcagccggttgctaacgtgcctgcagtgcagcaaaccttaatccactcccagccacagcccgctctgctccccaaccagccccacacacactgtcccgaagttgattccgacacccaacctaaagcgcctggaattgatgacattaaaacgctggaagaaaagcttagatccctttttagcgagcacagctcgtctggagcccagcatgccagtgtttccctggagaccagtctagtgatcgaatcgactgtgacccccggtatccccacaaccgcagttgccccatcaaagcttctgacatctaccacatcaacttgtcttccaccaaccaacctgccacttgggactgtagccctgcccgtgactccggtggtgacaccaggacaggtgagcaccccagtcagcactacaacttctggcgtcaaaccaggcactgcaccttctaagccccctcttacaaaagccccagtactcccagtaggtaccgaactgcctgcgggaactcttccctccgagcagttgccaccctttccaggcccatccctcacccaatcccaacagcctctggaagatctagatgctcagctccggcgtaccctgagccctgagatgatcacggtgacctcagctgtgggtcctgtcagtatggcagctcccacagcaattaccgaagcaggtacgcagccacagaagggcgtgtcacaggtgaaggagggaccggtcctagcaaccagtagcggcgcaggcgtgtttaagatgggaaggtttcaggtcagtgtggcagccgatggggcacagaaggagggcaaaaataaatcagaggacgccaaatcagttcatttcgaaagttccacctctgaatcttccgttctttcttcctcgtctcctgagtcaactttggtaaagcctgagcccaatgggatcaccatcccaggtatcagctccgacgtcccagagtcggcacacaagacgaccgccagcgaagcaaaatcagatacaggccagcctactaaggtcggtagattccaggtcaccacaaccgccaataaggtgggccgattcagtgtgtcaaaaacagaagataagattacagacacaaaaaaggaaggacccgtggcctccccgccatttatggacctggagcaagccgtgctgccagctgttattccaaaaaaggagaagcctgagctctccgaaccttcccacctgaatgggccatcttctgacccggaggccgcttttttaagccgtgacgtcgacgatggctccggtagtcctcactcccctcaccaattaagttcaaaaagcctgccgtcacagaatctgagccaatcactgagcaattcttttaattcctcttacatgagctcagacaatgagagtgacatcgaagatgaagacctgaaactggaattgcgcaggctgagagataagcacctcaaggaaatacaggatttacagagccgccaaaaacatgagatcgaatctctctataccaagctaggcaaggttccgcctgcagtgatcatccctcctgcagctcctctctctggacggaggagaagacctacaaagagtaagggatccaaatcctcccggagttcatccctgggaaacaagagcccacagctgagcgggaatctgagcggtcagtcagccgcttccgtgctgcacccccaacagactctccacccgcctggcaacatccccgagtctggccagaaccagctgttacagcctctcaagccttcaccctcaagcgacaacctgtattccgcatttacctccgacggagcgatatcagtgcctagtctgtccgctccaggtcagggaacatcctccaccaatactgtaggcgcaactgtgaacagtcaggccgctcaggctcaaccccctgccatgacctctagccggaaggggacctttacggacgatttgcacaagctagtggataactgggctcgagatgcaatgaatctgtctggtcgaaggggcagtaaaggacacatgaattacgagggacccggaatggccaggaaattcagtgcacccggacagttgtgtatttccatgacctctaacctgggcggtagcgctcccatttccgccgctagcgcaacttcactaggacatttcaccaaatccatgtgtcccccacaacagtacggtttccctgctactccgttcggggctcagtggtctgggaccggagggcctgctccccagccactggggcagtttcagcctgtaggaaccgctagcctgcaaaatttcaacataagtaatttgcagaaaagcatttccaatcctccgggtagcaatctccgaactactta

SEQ ID NO: 246901 - DNA, 6894 bp, synthetic construct
  misc_feature 1..6894: note = Description of Artificial Sequence: Synthetic coding sequence
  source 1..6894: mol_type = other DNA
atggatggtgacggcggaagacgagatgtgccaggaactctgatggagcccggacgaggcgctgggcctgcaggcatggcagagcccagggcaaaggccgctagaccaggaccgcagcgctttctgcgaaggagcgtagtcgaatcggaccaggaggaaccccctggcttagaggctgctgaagcccctggccctcaaccaccgcaacctctgcagcgccgtgtccttttgctgtgcaagactagacgcctgattgctgagcgtgcgagggggagacccgcagctcccgcacccgctgcccttgtggctcagcctggtgctcctggggcaccagcggacgccggtccggagcccgtgggcacccaagagcctggcccagaccccattgccgcagctgtggagacagcacccgctcccgatggcggaccacgtgaagaagcggctgcaacagtcaggaaggaagacgaaggtgcagccgaggccaagccagagcctggaagaactcggagagatgagcccgaagaggaggaggatgatgaggatgaccttaaggccgtcgccaccagcctcgacggccgatttcttaagtttgatatcgagctaggtagaggttcgttcaagaccgtctataaaggcctggatacagagacatgggtcgaggtggcttggtgtgagttacaagataggaaactgaccaaattggaacgacaaaggtttaaagaagaggccgaaatgctgaaaggcctgcagcaccccaatatcgtgcgcttttatgacttttgggagagctccgccaaggggaaaagatgcatagttttggtgacagagctgatgacgtccggcaccttgaaaacatacttgaagaggtttaaggtaatgaagcccaaggtgctgcgctcttggtgccgacaaatcctgaagggcctactgttccttcacaccaggacaccgcctattatccatcgcgacctgaagtgcgataatattttcatcactggcccaaccggatccgtgaagatcggggatcttggactggcgacactcaagagggccagcttcgccaagtcggtgattgggacccccgagtttatggcccctgaaatgtatgaggaacattacgacgagagtgtggatgtgtacgcatttggaatgtgcatgcttgaaatggccaccagcgaatacccctactcggaatgccagaatgcagctcaaatttaccgaaaagttacctgcggtattaaacctgcgagtttcgagaaagtgcatgatcctgagataaaggagattattggagagtgtatttgtaagaacaaggaggaacggtatgaaataaaagatcttttgtcccatgccttttttgccgaggataccggggtgagggtggaactggccgaagaagatcacgggcgaaagtccacaattgccctgcgcctatgggtggaggatcctaagaaactgaaaggtaagccaaaggataatggggcaattgagttcactttcgacttagagaaggagaccccagacgaggtggcacaagaaatgattgaaagcggcttcttccatgagtctgatgtcaagatcgtagccaaaagtatccgagatcgggtcgcactcattcagtggcggagggagagaatctggcccgctttacagcccaaggaacagcaggacgtgggatcacccgacaaagctcgcggtccccctgtcccattacaggttcaagtgacctaccacgcccaggccggtcagcccggaccaccggagcccgaagagcccgaagctgaccagcacctgctgccaccaacactccccactagcgccacgagtctggcttctgatagtacctttgatagtggacagggttccacagtgtacagtgattctcagtcatcccagcagagcgtgatgctcgggtcgcttgccgacgctgctcccagtccagcccagtgtgtgtgctcaccccctgtttccgaaggccctgttctccctcagagtctgccctccctgggcgcttaccaacagcctaccgccgctcctggcctgcctgtcgggtccgtcccagccccagcttgccctccatccctgcaacaacacttcccggatcctgctatgagtttcgcccctgtgctccctcccccttccacccccatgccgactggcccaggtcagccagccccacctggtcaacaaccgccaccattggcacagccgaccccacttccccaggtgctcgcacctcagccggtggtgcctctccagcccgtgcccccacatttaccgccatacctcgctccggcttcacaggtcggcgctcctgcgcaactgaaaccactgcagatgccacaggctccactccagccactcgcccaggttccacctcagatgcccccaatcccagtggtgcctccgattacccctctagcaggtattgacggcctgccgccagcattgcctgatctgcccaccgctactgtgcctccagtgcccccaccacaatacttttcgcctgctgtgattctaccctctttggcagcccctctccctcccgcatcccctgcacttcccttgcaggctgtgaaactaccacatcctcctggggctcccctggcaatgccttgcaggaccatagtcccaaatgctccagccactatcccacttctggcggtggctccgccaggcgtagccgctctttcgatacacagtgcggtagctcagttgcccggacagccagtttacccagccgctttccctcagatggcacccaccgacgtgccaccttctccccaccatactgtccagaacatgcgcgcaacaccccctcagccagctctcccgccacaaccaacattgccgcctcagccagtgctgccaccacagcccaccctgccccctcagccggtgctgccacctcagcctacgcgcccacctcagccagttctgcctccacagcccatgctgccccctcaaccagtcctgccccctcagccagctctccccgtgagaccagaacccttgcaaccacatttacctgagcaagccgcacctgcagccacccccggatcacagattctgctgggacaccctgccccatacgcagtggacgtggctgcccaggtgcctaccgtgcccgttccacccgctgcagtcctctctcctcccctgcccgaggtcttactgcccgcagctcccgaactcctgccgcagtttccatccagcctggcgaccgtcagcgcttccgtccagagtgtacctactcagactgcaactctgctgccacccgctaaccccccactgccagggggaccaggaatagctagcccctgtccaactgtgcagctgactgtggagcctgtacaggaggagcaggcaagtcaggacaaaccacccggtctgccacagagctgcgaatcatatggagggagtgacgtcacaagcggcaaggaactatcagacagttgcgagggggcatttggcggagggcgattggaaggccgtgccgctcgaaagcatcacaggaggagcacaagagctcgcagccggcaagagagggcaagcagacctaggcttactatcctcaatgtatgcaataccggcgacaagatggtagaatgtcagcttgaaacgcataaccacaaaatggtgacatttaagttcgaccttgacggcgacgctcctgacgagatcgccacctatatggtggaacacgatttcatcctacaggccgaacgcgagacgttcattgagcagatgaaggacgtcatggacaaagctgaagatatgctcagtgaggataccgatgccgaccggggttcagaccccggtacttcccctccgcatttatctacatgcggacttggaacgggggaggaatctcggcagtcgcaagccaacgcaccagtttatcagcagaatgttctccataccggaaagaggtggttcattatatgcccggtcgccgagcaccctgcacctgaagcaccggagtcttctcctcccctgccattaagcagcttgcctcccgaagccagtcagggcccttgtaggggccttactctgccatgtttaccttggcgacgagccgcttgtggggcagttttccttagccttttttcggcagagtccgcgcagtcaaaacaaccccctgattcagccccatataaagaccagctcagctctaaggagcaaccctccttcctggcgtcacagcagctgctgagtcaggctggtcctagcaatcctcctggcgctccacccgctcccctcgccccatcttcacccccagtcaccgcattgcctcaagatggcgctgctcctgcaacatcaactatgccagagcctgctagcggcaccgcatcccaggctgggggtccaggcaccccccagggactaacttctgagctggaaacgtcacaaccactcgccgagacgcacgaggctcccttggccgtgcagcctctggtggtcggactggccccttgtacgccggcacccgaggccgcttcaacaagagatgcatcagcccctagggagcctctccctccacccgcacccgagccctccccccacagtggcacgcctcagccagctctgggccagcctgctccgctcctccctgccgctgtgggcgctgtttcacttgctacctctcaactgccaagtccgcctctgggcccaacagtacccccacagcccccatctgccttggagtctgatggcgagggcccacccccaagagtcgggttcgtcgattcgacgatcaaatccctggatgagaagctacgtaccctcctttaccaagaacatgtccccacatcgagtgctagcgcagggactcctgtggaagtgggggatcgcgacttcaccctggagcccctcaggggggatcagccccgttccgaggtatgcgggggagatctggctctgccacccgtaccaaaagaggccgtaagcggacgggtgcagctcccgcaacccctcgtagaaaagtcagagctggctccaacaagaggggcagtgatggaacagggaacgagctctagcatgaccgcagaatctagcccgaggtccatgctggggtatgatcgcgacgggagacaagtggctagcgatagccacgtggtgcctagtgtgcctcaggacgtgcccgcatttgtccgtcctgcccgtgtggaacctacggatagggatgggggagaagccggtgagagctcagccgagccaccacccagtgatatgggaaccgttggcggtcaggcgagccaccctcagaccttgggagcccgagcccttgggtcgcctcggaagagaccggaacagcaggacgtgtccagccccgctaagacagttgggagatttagtgtagtgtcaactcaggacgagtggacattggcatccccacatagtttgcgctattcagctccccctgatgtctacttggacgaggccccttctagccccgatgtgaaactggcagttaggagggctcagacagcgagttccatagaggtgggtgtgggggagcccgtgagctctgatagtggggacgaggggcctcgcgctcggccacctgtccagaagcaagccagtctcccagtgtcagggtctgtggccggtgattttgttaagaaagcaactgcttttctgcagagaccctctcgggcagggagtctgggtcccgaaacaccgtcaagggtggggatgaaagtgcctaccatctcggtgactagttttcacagccagagctcttatatctcaagcgacaacgattccgagctggaggatgctgacatcaagaaggagctacagagccttcgggaaaagcacctgaaggagataagtgagcttcaaagccaacaaaagcaggaaatcgaggccctataccggaggctcggcaagcccctgcctcccaacgtggggttttttcacaccgccccacctacaggcaggagacgcaagaccagcaagagtaagctcaaagcaggcaagctgcttaaccccttggtgcggcagttgaaagtcgtggcttcatccaccgggcacttggcggacagttcccggggaccacctgcaaaagatccagcacaggcaagcgtgggactgactgcggacagtaccggcttaagtggaaaggctgtgcagacccagcagccttgttctgtgcgggcaagcctctcgtccgacatctgtagcggattggccagcgacggagggggtgcacgtggccagggatggaccgtatatcatccaacatcagaacgcgtgacctacaaatcatccagcaaacccagggcacggttcctgtcgggcccagtaagcgtgagcatttggtccgccttgaagcgcctttgcctggggaaggagcactccagccgaagcagcactagttccttggctccgggacccgagccaggcccacagccagccttgcacgttcaagcgcaggtgaacaacagcaacaacaagaaaggtaccttcacagacgatctgcacaaactggtcgacgaatggacttccaaaaccgtgggggctgctcagctaaagcctacgttgaatcagctcaagcagacacaaaagctccaggacatggaagcgcaggctggctgggctgcaccaggcgaggccagggcgatgacagcaccacgggctggggttggaatgccgaggctgcccccagctcctgggccactcagtacaactgtcatcccaggcgctgctcctacgttgagcgtgccgacacccgacggcgcactcggaaccgcgcgaaggaaccaggtttggtttggtctccgcgttcccccaaccgcgtgttgcggccactccactcaacctcgcggtgggcagcgagtgggaagcaagaccgcaagcttcgctgccagcgacccagtaagaagttac

SEQ ID NO: 246902 - DNA, 5600 bp, synthetic construct
  misc_feature 1..5600: note = Description of Artificial Sequence: Synthetic coding sequence
  source 1..5600: mol_type = other DNA
atggccacctcagaatatccatatagcgagtgccagaacgccgcacagatctacagaaaagttacctgcggaataaagcccgcatcgttcgagaaagtacacgaccccgagatcaaagagattattggagagtgtatctgtaaaaacaaggaagaacgttatgaaattaaagacctcctaagtcatgccttttttgcagaggataccggagtccgggtggagctagctgaggaagaccacggcaggaaatcaacaatagccctgcggctctgggtcgaagatcctaagaagctcaagggcaagcctaaggataacggagcaatcgagttcacattcgatctcgaaaaggagaccccggatgaggttgcccaggaaatgattgagtccggcttctttcatgaatctgacgtcaagattgtggccaaatccattcgagacagagtcgccctgattcaatggagaagagagaggatttggccagccctgcagcctaaagaacagcaagatgtcggatcaccagataaagccaggggcccaccagtccccttacaagtccaggtgacatatcacgcccaggctggtcagccgggtccccctgaacccgaagaacctgaggccgaccagcacctattgccacctacattgcccacttcagcaacatctcttgcaagcgacagtaccttcgactcaggccagggctccactgtttacagcgatagtcagagcagtcagcagagcgttatgctgggatccctggccgacgctgcgccttccccagctcagtgtgtgtgctctcctccggtgtccgaggggcctgtcttgcctcaaagcctgccgtctcttggggcttaccagcagcccactgctgcccctggcctccccgtaggaagcgtgccagcccctgcgtgtcccccatccctgcagcaacactttccggaccccgcaatgtcattcgcaccggttcttccgcctcctagcaccccgatgccaactgggccaggtcagcccgcaccgcctggccagcagccacctcccctggcccaaccaacccccctaccccaagtgctcgcaccccagccggtggtaccactgcaacccgtccctccccatctgccaccttacctcgctcctgcctctcaagtcggagcgcctgctcaacttaaaccgcttcagatgcctcaggcccctctgcaacctctggcccaagtgcctccacagatgccccctattccggtcgtccctcccataacgccactggccggtattgatggcctgccccctgcccttcctgacctcccaacagcaacagtgcctccagtacctccaccccagtacttttcaccagccgtcatactccctagcttggccgcaccccttcctcccgcaagtcccgctttgcccctgcaggcggtcaaacttcctcaccctcctggggctccactggctatgccttgccgcacgatcgttcccaatgcgcctgcaaccattccattactggcagtggcccctccaggcgtggctgctttatctatccactccgctgtggctcaattgcctggacaacctgtgtatccagcagcatttccccagatggcccctacagatgtgccgccttccccacaccacaccgtccaaaacatgagagcaacccctccccagccagccctcccaccacagcccaccctgcctccccaaccagtgctgcctcctcagcccacacttcctcctcagccagttctgccaccccagcctacaaggcccccacagcccgtgcttccccctcagccaatgctcccaccacaaccagttctgcctccacaacccgcacttcccgtgcgccctgagccactgcagcctcatctgcccgaacaggccgctcccgctgctacgccaggatcccagatccttcttggccatcccgctccatatgctgtggatgtcgcagctcaggtacccaccgtccctgtgccccctgctgccgtgttatctcctcccctaccagaggtgttgttaccagccgcacctgaattacttcctcagttccctagctctctcgcaacagtgagtgcctccgtgcaaagcgtaccaacccagactgccacacttctgcctcccgcaaatcccccattgcctgggggacccggtatcgccagcccctgcccaaccgttcaactgactgttgagccagtccaagaggagcaggccagccaggataaaccaccaggacttccgcagtcctgcgaatcttatggtggatccgacgtgacctctgggaaagagctcagtgatagttgcgaaggagcattcgggggaggcagacttgagggcagagcggctcgcaagcatcaccggcgttctactcgagcgcgaagtagacaggaacgggcatcacgaccaagattgacaattctgaacgtctgcaatactggcgacaagatggttgagtgtcagttggagacacacaatcacaagatggtaacgttcaagttcgatttagatggcgacgctcccgatgagatagccacttacatggtggaacacgacttcatcctccaggctgagcgcgagaccttcatagaacagatgaaggatgtgatggacaaggcagaagatatgctgagtgaagacacggatgctgatcgcggatcggatccaggcacatccccaccacacctaagcacttgtggattggggaccggagaggagtcccgtcagagccaggctaatgctccggtgtatcagcagaacgtgcttcacaccggaaagcgttggttcatcatttgtcccgtggccgagcacccagcccctgaggcacctgagtcatcaccacctctgcccttgagctccctgcccccagaagcatcccagggcccatgtcgcggacttaccctgccatgcctcccctggaggcgcgcagcatgcggagccgtgttcctatccctcttctcagccgagagcgctcaatcgaagcagccacctgattcagctccctataaagaccagttgagttccaaagagcagccaagctttctagcttctcagcagctcctctctcaggcaggcccttccaaccccccaggagcccctccagctcctctggcccctagcagtccacccgttactgctctgcctcaggacggggcagcccctgctacatcaacaatgcccgaacccgcatctggtaccgcgagtcaggccggtgggcctggaacaccacaggggctgaccagtgaactggagacctctcagccgctagccgagactcatgaggcgccacttgccgtgcagcctctcgtagtcgggcttgcaccctgcacaccagcaccggaggccgctagtacgagagacgctagcgctccaagagagcctcttcctcctccagccccagagccgtctccgcattctggaacgccccagcctgcccttggccagccagccccattgctaccagccgctgtcggtgccgtctccctcgctacctctcaactgccctctccgcctctgggacccacagtcccgcctcagccaccgtccgccctagagagcgatggcgaaggaccccctcccagagtgggcttcgtggactccacaatcaagagcttagacgaaaagttgcggaccctactctatcaagagcacgtccccacgtcatctgcctctgcagggactccagtcgaggtgggggatcgagacttcacgctggagccactccgaggggaccagcccaggagcgaggtgtgcggcggtgacttggctctaccccctgttcccaaggaggcagtgagtggacgggtacagcttccccaacccttagtcgaaaaatccgaattggcaccgaccaggggtgcagtgatggagcaaggcacaagtagttccatgacagctgagtcttcacctcggtctatgttgggttatgatagggatggacgccaggtggcatccgactcccacgtagtgccatctgtgcctcaagatgtccccgcattcgtccgaccagccagggtggaacctacagaccgagatgggggtgaggcgggagaaagctccgccgagcccccacccagcgacatggggaccgtgggaggtcaggcttcccaccctcagactttgggagcccgagccttaggatctccacggaagaggcctgaacagcaagacgtgtccagcccagctaagaccgttgggaggttttccgttgtatctactcaagacgagtggaccctcgcctccccccacagcctgcggtactcagctccgccagacgtgtacttggatgaggcaccctcgtcgcccgatgtcaaactggcagttcgtagggcacagaccgcctcctctattgaagtgggcgttggagaaccggtctcttcagattcaggagatgaggggccacgtgcaaggcccccagtgcagaagcaagctagcctcccggtctccggctccgtggccggagactttgtgaagaaggccacagcctttctccagcgaccaagccgggctggttctcttggtcctgagacacctagtcgggtgggtatgaaagttccgactatttcggtgacatcatttcattcacagtcatcttacatttcgagcgataatgactcggagctcgaagatgctgacatcaaaaaagaacttcagtctctcagagaaaagcaccttaaggagatctccgaattacagtcccaacaaaagcaggagattgaggccttgtacaggagactgggtaagcctcttcccccaaatgtgggcttctttcacaccgcccctcccacagggaggcgccgtaagacatctaagtctaaactgaaagccggaaagctcctgaaccctcttgtgaggcaacttaaggttgttgccagctccactgggcacttggccgactcttctcgcggaccccctgccaaggacccagctcaggcctctgtgggactaaccgcagattccactgggctgtccggcaaagcggtccaaacccagcaaccatgcagcgtccgagcaagccttagtagcgacatctgctccggattagcatcagacggtggcggagccaggggtcaggggtggaccgtttaccatcctacgtccgagagagtgacctacaaatccagtagtaaaccgagagccaggtttttgtcaggtcccgtcagtgtgagcatctggagtgctctcaaaaggctgtgtctgggtaaggagcattcctcaaggagttctacgtcaagcctggcacctggacctgagcccggtccacagccagctttacacgttcaggcccaggtcaataattccaataataagaagggaacttttaccgatgaccttcacaagttagtggatgagtggacctctaaaaccgtaggggcagcccagctgaaaccgaccctgaaccagctaaaacagacacagaaactccaggacatggaagctcaggccggatgggccgctccaggggaggctcgcgcaatgaccgctccaagggctggtgtgggaatgccacgtcttcctccagcaccgggaccactaagcacgacggtgataccaggcgcagctccgacactgtcagtgcctacaccagacccagagtcagagaaaccagacta

SEQ ID NO: 246903 - DNA, 1092 bp, synthetic construct
  misc_feature 1..1092: note = Description of Artificial Sequence: Synthetic coding sequence
  source 1..1092: mol_type = other DNA
atggaacaaggtacatcctcgtcaatgaccgaatcatcccctcgatcgatgttaggatatgacagagatggcagacaggtggctagcgactcccatgtcgtcccatcggtgccacaggacgttcccgcttttgtacgccctgccagggtggaaccaacagatcgggatggtggcgaagcaggggagtcctcggctgaaccccctccttccgacatgggcactgtgggaggccaggcctcgcacccacagacactgggagcgagggcactagggtctcctcgcaaacgtcctgaacaacaggatgtgtcatctcccgctaagactgtcggccgattctcagtagtcagtactcaagacgaatggaccctggcctccccacacagcctccggtactctgcgcctcctgacgtctacttggatgaagcacctagttctcccgatgttaagcttgcagtgcggagggcccagaccgcatcctcaattgaggtgggggtcggagaaccggtcagctcagacagcggagacgagggcccaagggcccgacctcccgtccagaagcaggcttcgttacctgtttccgggtctgttgcgggtgactttgttaaaaaagccacgtcgtgtcggggattgctagggccaagcctgggtcctgagactccttcacgggttgggatgaaagtgcccacgatctcggtcacttcattccattctcagtcatcttacataagttctgataacgatagtgaattggaagatgccgacatcaagaaggagctccagagcctacgcgagaaacatctcaaagagattagcgagctgcagtcccagcagaaacaggagattgaggccttgtaccgcaggctcgggaaacccttgccccctaacgtaggtttcttccacactgcgcctcctaccgggagaaggagaaagaccagcaagtcaaaattaaaggccggtaagctgctcaatcccctggtccgccagctgaaggtggtggcctccagtacaggccacctggcagatagtagtcgaggccctccagccaaagatccgaagccggtttggggatcacttcaaacagcacgggcatag

SEQ ID NO: 246904 - DNA, 2340 bp, synthetic construct
  misc_feature 1..2340: note = Description of Artificial Sequence: Synthetic coding sequence
  source 1..2340: mol_type = other DNA
atggaacccggtcgaggggcagggcctgctggaatggctgaacctcgggcaaaggcagcacggccagggccacaaaggttcctgcggaggtccgtggttgagtcagatcaggaggaaccccctggattggaggccgctgaagcgccaggtccccagcctcctcaaccgctgcagaggagagtgcttctgctgtgcaagaccaggcggctcatcgcagaaagggccaggggaaggccagccgcacccgctcctgcagcgcttgttgcgcaacccggagccccaggcgcacccgcagatgccggtcccgagcccgtgggaactcaagaaccgggtcctgaccctatcgccgctgctgttgagactgcccctgcacccgacggtgggcctagagaagaggccgcagctacggtcaggaaggaggatgagggggcagcggaggctaagcccgagcccggaagaacaaggcgggatgagcccgaggaggaggaggatgatgaggatgatcttaaggccgttgccacaagcctggatggcaggtttctaaaatttgatatagaacttgggcgaggctcttttaaaaccgtgtataagggccttgataccgagacctgggtcgaggtcgcttggtgtgaacttcaggatagaaaactgactaagctggagcgtcagcggtttaaggaagaggcggaaatgctgaaaggactgcagcaccccaatattgtacgcttttatgatttctgggagagttcagcgaagggtaaaaggtgtatcgttctggtgaccgaacttatgacctccggaacgctgaagacatacttaaagcggttcaaggtcatgaaaccaaaagtgttgcgttcttggtgtagacagatcctgaaaggtttgttgttcttacacacccgcactccacctatcatccaccgagatctgaaatgcgataatatctttatcacaggtccgaccgggagcgtcaagataggtgatctgggcttggccacgctaaagcgggctagctttgcgaagtcagtgattggtacccctgagtttatggctcccgagatgtacgaagaacattatgatgaatccgtggacgtgtacgcattcggtatgtgtatgctggagatggctacatctgagtatccttacagcgagtgtcaaaatgccgctcaaatttaccggaaggtgacttgtggcatcaagcctgcgtccttcgaaaaggtgcacgacccagagattaaggagattatcggcgaatgcatctgtaagaacaaagaggaaagatatgaaatcaaggacctgctgagtcatgcattctttgctgaagatacgggcgtacgcgtcgagcttgccgaggaagaccatggtaggaagtccacaatcgcgttacgtctatgggtggaggaccctaagaagctgaaaggcaaacccaaagacaacggggctatcgagttcacctttgacctggagaaggaaacccccgatgaggtggctcaagagatgatcgagtccggtttcttccatgaatccgatgtcaagatcgtggctaaaagtataagggatcgggtggccttaattcagtggcggcgagagcgcatatggccagctctccagcctaaggaacagcaggatgtcggaagtccggacaaagcacgaggccctccagtgccactgcaggtccaggttacctatcacgcccaagcgggacaacccggtccaccagagcccgaagaaccagaagcagatcaacacctgctgccaccaaccttgccaacttctgccacttccctggcctccgactctacttttgattccgggcagggctctactgtctattctgactcccagagcagccagcagtctgttatgctgggtagcctggccgatgctgctccatccccggctcagtgtgtttgttctccacccgtgtctgagggaccagtcctgccccaaagccttccctcgctcggagcttaccagcagcccactgcagctcctccccctcttgctcaaccaacacctctgccccaggtcctggcacctcaacctgtcgtccctctgcaacctgtgcccccacacctgccaccctacctcgcgccagcgagccaggtcggggcaccagcccagctcaagcctcttcaaatgccccaggctccactgcaacctttagcccaagtgcctccacaaatgccacccatcccagttgttcccccaattaccccattggcaggtatcgatggcttgcctcccgctctgcccgacttgccaactgccacagtgccccctgtgccacctcctcaatattttagccccgctgttatcctgccctccctagccgcatag

SEQ ID NO: 246905 - DNA, 6653 bp, synthetic construct
  misc_feature 1..6653: note = Description of Artificial Sequence: Synthetic coding sequence
  source 1..6653: mol_type = other DNA
atggacggtgacggtgggaggagggacgtcccaggcactctgatggaacccggacgcggtgccggacccgcaggtatggcagagcccagagctaaagccgctcgacctgggcctcagagatttctgcggaggtcggttgtggagagcgatcaagaagaacccccaggcttagaggccgcagaagcacccggtccgcaacctcctcaaccactgcaacgaagggtactgctgctctgtaagacaagaagactgattgcagagcgtgcgaggggaaggccagcggctcctgccccagccgctttggtggctcagccgggtgcgccaggggcaccagctgacgctgggcctgaacctgtgggaacgcaggagcctggtccagatccgatcgccgctgctgtggagactgccccagcgcctgacggtggacccagagaagaagctgcagcgaccgttcggaaggaagatgaaggagcagcggaggctaagcccgagcccggaaggacccgacgagacgaacccgaggaagaggaggacgatgaggatgacctcaaagctgtggcaacctcactcgatgggaggtttcttaaatttgacattgagctcggcagaggctcatttaagacggtttacaaaggactagacacagaaacctgggtggaggtggcctggtgcgagttacaggatcggaaactcaccaagctggaacggcagagattcaaggaagaggcggaaatgctgaagggacttcagcaccctaatatcgtgcgcttttacgatttttgggagtcctctgctaaagggaagcggtgtatagtgctggtcaccgaactgatgacatcaggcacacttaaaacctatctaaaaaggttcaaagtgatgaagcccaaggttttacgcagttggtgtaggcagatcctaaaggggctgctttttcttcatacgagaaccccgcctatcatacacagagatctgaaatgtgacaacatctttattaccggtcccaccgggtcagtgaaaattggcgatctgggcctggccaccttaaagcgagcctcctttgctaaaagcgtgatcgggactccagaatttatggcgcctgagatgtacgaggagcattacgatgaatccgtagacgtctatgcctttgggatgtgcatgctggaaatggccacctccgaatatccatattctgagtgtcagaacgctgctcagatataccgcaaggtgacgtgcggcataaagccagcctcatttgagaaagtacacgaccccgaaatcaaggagatcataggcgagtgtatttgtaaaaacaaagaagaaagatacgagatcaaggatttgctgtcccatgccttctttgctgaagacaccggtgtaagggtcgagctggccgaggaagatcatggcaggaaaagtaccattgccctgcgtctctgggtagaggaccctaagaagctgaagggcaagccaaaagataatggcgctattgagtttacgttcgatcttgaaaaggaaaccccggacgaagttgcacaagagatgatagaatccggcttctttcacgaatctgatgtgaaaattgttgcaaaatccatcagagaccgcgtagccctcatccagtggcggagagagaggatctggcccgcactccagccaaaagagcaacaggatgtgggcagtcccgataaagcaagaggaccccctgttcctttacaagtgcaagttacttaccacgcccaggcaggtcaaccaggtcccccagaacccgaggaacccgaagcagaccaacaccttttaccaccaactctcccaacgtcagccacaagcttagcgtctgactctactttcgactccgggcagggatccaccgtttattcggacagtcaatcctcgcagcaatctgtgatgctgggatctctggctgacgccgctccgtccccagcgcaatgtgtttgctctcctccagtgtcagagggaccagtgcttccacagagcctgccctctcttggagcatatcaacagcccaccgctgcgccaggactgcctgtgggaagcgtaccagcacccgcatgtccgccttccctgcagcagcactttccagatcctgctatgtctttcgcccctgtgctgccccctcctagtactccaatgcccacaggaccgggacagccagccccacccggacaacaaccccctccactggcccagcccaccccactcccccaggtgctggccccacagcctgtggtgccgcttcaaccagtgccgcctcacctccctccctatttggcgcctgcgtcccaggtcggggcaccagcacagctcaaacctctgcagatgcctcaagcccctttgcaaccccttgcgcaagtcccaccgcagatgcctcccatcccagtggtgccacctataactcccttggcgggaatagacggtctgcctcctgctctgccagatctgcctactgcaaccgtgccccctgtgcccccaccccagtatttttccccggcagtgattcttccatctttagctgcccctctgcctccggcatccccagctctacctcttcaggccgttaagctgccccacccgccaggagcacccttggccatgccttgcagaacaattgtacccaacgccccagctaccattcccctgctcgctgtggctccgccaggcgtcgccgctctgtccattcattcagcggtggcacaattgccaggccaacccgtgtaccccgcagcttttccccaaatggccccaaccgacgtgcccccatcacctcaccatacggttcagaacatgcgcgcaacccccccacagcccgctctgccaccgcagccaactctgcctccccagccagtgctgcctccacaacctaccctaccaccgcagccagtgctgccaccccaacctacaagaccaccccagccagtgctgcctccccagcctatgctgccccctcaaccggtgctgcctcctcagccggcactgccagtgcggcctgaaccattacagcctcatctgcccgagcaggccgctccagctgctacacctggctcacagatcttgctaggacacccggctccatatgcagtagacgttgctgcccaggtacccactgtccccgtcccccctgcagcggtgctgtctccaccactgcctgaggtcctcctgcccgctgcccctgagctgctgcctcagtttccatcatctctggccaccgtctctgcatcggtgcagagcgtgccgacccagaccgcaaccttgctgccgcctgcaaacccccctcttcccggtggcccaggaatcgcttccccctgccctacggtacaactgacagttgagcccgtgcaagaagagcaggcctctcaggacaaaccacccggactgccgcagtcctgcgaatcgtacggcggttcggatgtgacttctggcaaggagttatccgattcttgtgaaggggcattcggcggagggaggctggaagggagggctgctcggaagcaccacaggcgctccacccgagcacgctcccgccaggagagagctagcaggcccaggttgaccatcttgaacgtgtgtaacaccggggataaaatggtcgagtgtcaactggagactcacaatcacaaaatggtaaccttcaagtttgatcttgacggggatgcgcctgacgaaatcgcaacttatatggtcgagcacgactttatcctgcaggcagagcgggaaaccttcattgagcagatgaaggatgttatggacaaggctgaggacatgctctcggaagatacagatgccgataggggtagcgatccaggaacctctcctcctcacttgagcacttgcggactgggaacaggggaggaatcgcgtcagagccaggcaaatgcacccgtttatcaacagaacgtcctccatacggggaaacggtggttcatcatatgtcccgtagctgaacatcccgcaccggaggctcccgaatccagcccacctctgcccctgtcttccctgccccctgaagcttcacaggactccgccccatacaaagaccaattatcaagcaaagagcagcccagcttcctggcctcccagcagctgctctctcaggctgggcctagtaacccaccaggggcaccccctgcaccactggccccatctagcccgcctgtcacagcattaccccaggatggggcagcaccagccaccagtaccatgcctgaacctgcatcaggtaccgcgtcacaggctggcggtcctggcacgccccaagggctcacgagtgagcttgaaactagtcagcccctagccgaaacgcatgaagctcctctggccgttcagcccctggtcgtgggtctggccccttgtactccggctcccgaagctgcgagtacacgcgacgctagtgcacctagggaacctctccctcccccagctccagagcctagcccgcatagcggcaccccacaaccggcactggggcagccagcccctctgttacctgctgctgtgggcgcagtcagtctcgcaacctctcagctgccctctccacctctcggcccaactgtacccccacagccccctagcgccctggagtccgatggcgaaggaccacctccacgcgtgggatttgtagattctaccattaaaagtcttgatgagaagctgaggaccctgctataccaggaacatgtccccaccagcagcgcatctgccggaacacccgtggaagttggagaccgggattttactctggagcctttaagaggcgaccagcccagaagtgaggtatgcggaggagaccttgccctgccccctgtgccgaaagaagcagtgtccgggagggtgcagctcccccagccactggttgaaaagtccgagctggccccaaccagaggtgccgtgatggagcaaggtacgtcatcctccatgactgcagagtcatctccaaggtctatgctcggatatgatagagatggcagacaggttgcgagcgattctcatgttgtgccatcggtgccacaagacgtgcccgcatttgtgcggcctgccagagtcgagcccactgaccgtgatggaggggaggccggagaaagcagcgcagagcctcccccttccgacatgggcacagtaggcggacaggcttctcacccccagacattgggtgcgagagccctgggatccccacgcaaacggcctgaacaacaagatgtctccagtcccgcaaaaaccgtgggccgatttagtgtggtgtcaacgcaggatgagtggactttagcaagcccacactctttgcgttattctgccccacctgacgtgtacttggacgaagcccctagttcacccgatgtcaaactggccgtgcggagagcgcaaacagcaagctctattgaagtcggggtgggcgagcccgtgagttccgattccggtgacgaaggccctagagccaggcccccagtgcagaaacaggcatcactgcctgtgagcggatcagttgccggagattttgtgaagaaagcgactgctttcctacaaaggccatcaagggctggtagtctggggccagagacgccatcaagggtcggcatgaaggtgccgaccatcagtgtgacctcatttcatagccagtcgtcttacattagctccgataatgattccgagctggaagacgctgatatcaagaaggaattacagagcttgcgcgaaaagcaccttaaagaaatcagtgagctgcagtcccaacaaaaacaggagatagaggcgctctatcgaaggctgggaaagccacttccaccaaatgttggattctttcacacagcaccaccaactggtaggcgtcggaagacttccaagtccaaactaaaagctgggaagctcctgaatcccctggtgcggcagttgaaagtggtggccagcagcactggacacctggcagactctagtcgcggacctcccgcaaaagatcctgcgcaggcatcagtggggctgaccgccgactcaaccggcctgagcggcaaagccgttcaaacccagcagccatgcagtgtccgcgctagcctgagttcagatatctgcagtggtctcgcttcagatggagggggagcaaggggccagggatggaccgtctatcaccccacatccgaaagggtcacctacaaatcttcttctaagccacgcgctagattcctctctggtcccgttagcgtgtccatctggtccgcgctgaagcggttatgcttaggtaaagagcacagctctagatcatcaacatcttctttggcccctggacctgaacccggaccccagcctgctttgcatgttcaggcccaggttaacaatagcaataacaagaagggaacattcactgacgatctgcacaagcttgttgatgagtggacgagcaagaccgtcggcgcagctcaacttaagccaaccctgaaccagcttaagcagacccagaaactccaggacatggaggcccaagccggttgggcagcccctggtgaggccagagccatgaccgctccacgagcaggggtcggaatgcctcggctcccaccggctcccggaccactttccactactgttattcccggagcagctcccaccctcagtgtgcctacccccgatcctgagagcgagaagccagacta

SEQ ID NO: 246906 - DNA, 5510 bp, synthetic construct
  misc_feature 1..5510: note = Description of Artificial Sequence: Synthetic coding sequence
  source 1..5510: mol_type = other DNA
atggctacgtcagagtatccctactctgagtgtcagaacgcggctcagatctatcgcaaggtcacctgcggaataaaaccagctagctttgaaaaggttcatgaccctgagattaaggagatcatcggggagtgcatttgcaaaaacaaagaggaaagatacgaaatcaaggacttgctttcccacgcttttttcgcggaagatacaggtgtgagggtagagctggcagaggaggatcacggacggaaatctacgattgcactgagactgtgggtggaggaccctaagaaactgaaagggaagccaaaggataacggagctattgagttcacctttgacttagagaaagagactcccgacgaggtggcccaggagatgattgaatctggattctttcatgaaagtgacgttaagatcgtggccaaatctataagggaccgtgtagcgctgatccagtggcgcagagagaggatatggcctgctcttcagcctaaagaacagcaggacgtgggctcgcccgacaaagccaggggtcctcccgtgcccctgcaagtgcaggtgacctaccatgcacaggcagggcagccaggacctcctgaaccggaagagcccgaggccgaccaacacttgctgccacctacattgccaacgtccgccacctccctcgcctccgatagtacatttgattcgggccaagggagcaccgtttattccgattctcagagctcccagcagagtgtgatgctcgggtccttggccgacgctgcccctagccccgcacagtgtgtttgcagtccaccagtctccgaagggcctgtactgccacagtcgctcccctctctcggggcttatcaacagcctaccgccgctcccggactgccagttgggtcagtccctgcacccgcttgccctccctcactccagcagcattttcctgacccggcaatgagcttcgcacctgtcctcccccctcccagcacccccatgccgaccggccctggccagccagcacctcctggacagcaacccccacctctagcccagcctacccctttacctcaggtcctggctccacagcccgtggtgcccttgcagcccgtgccaccccacctacctccatatctggcacctgcctctcaagtgggcgcaccagcccaactgaaaccacttcagatgccccaagctcccttacagccattagcccaggtgccaccacagatgccgccaataccggtcgttccccctattaccccattagccggaatagacgggctgcccccagctttaccagacttgccgaccgccacagtgcctcccgttcccccaccacagtatttttcgccggctgtgatcttgccgtcattggccgctcccctgccaccagcttccccagccttgcctctacaggccgtcaaactgccgcaccctccgggtgcgccactggccatgccctgccgcaccattgtgcccaatgctcctgccactatcccactgctggctgtcgcccctcctggagtggctgccctgtctatccactccgccgtcgcccagttgcccggacagcccgtgtaccctgcagccttcccacagatggcgcctactgacgtgcctccctccccacatcacacagttcaaaatatgcgcgctacgccccctcagccagctctgccacctcaacctactctaccaccccagcccgtcttacctccccaacccaccctgccacctcaaccagtactaccacctcaacccactcggcctccccagccggtgctgccaccacaacccatgcttccccctcagcccgtgctgcctcctcagcctgcactgcctgtgaggcccgagccccttcagcctcacttgccagagcaggcagccccagccgctactccaggttcccagatcctgctaggccatcctgccccttacgccgttgacgtggccgctcaagtgccaaccgtacccgtgcctcctgctgccgtgctctcccctccccttccggaggtcttgctgccagcagcccctgagctcctgccgcagttcccgtccagtttagcaacagttagcgcctctgtgcaatccgtgccgacccagactgccacactgctgccacctgctaatccaccgttacctggtgggcctgggatcgcgtcgccttgtcccacggttcaactgacggtggagccagttcaagaagaacaagcgtcacaggacaagccacccggtctgccacagagttgtgaatcctatgggggatccgacgtgacctctggtaaggagctcagtgatagctgtgagggggcttttggcggtgggagacttgaggggagggcagcacggaagcatcacaggaggtcaacccgcgcacgttccagacaggagcgagccagcagacctcgactcacgatcctgaatgtgtgcaacaccggagacaagatggtggagtgtcagctcgagacacacaaccacaagatggtgactttcaaatttgatcttgacggagatgctccagatgaaatcgccacttacatggttgaacacgactttatactgcaagcagagcgcgaaactttcatcgagcagatgaaggatgtaatggataaggcagaggacatgttgtctgaggataccgatgctgaccggggatctgatcctggcaccagcccccctcatctgagcacatgtgggctaggcaccggagaggaatcccggcaatcacaggccaacgccccagtgtatcagcaaaatgtgctgcataccggtaagagatggttcataatctgccccgtggcggagcacccggcacccgaggcacccgaatccagtccaccgctgccactctcaagcctccccccagaggcatcacaggactctgccccatacaaagaccagctgtcctccaaggagcagccctcatttcttgcgtcacagcagcttcttagccaggccggaccaagcaatcctcccggtgctccaccagccccactcgctcctagttcacctcctgtcacggccctccctcaggatggtgctgctcctgcgacatcaaccatgccagagcccgcttccggtaccgcaagccaagccggaggccctggcaccccccaaggtctcacgtcggaactcgaaacatcacagcccctggccgagacccatgaagcccctctggcagtccaacccctcgtagtgggtctcgccccttgtacaccagctccagaagccgcaagtactagagatgcctccgctccacgcgaaccactgccacctccagctcctgagccatcaccgcacagtggtactccccagcccgctctggggcagccagccccacttctgcccgcagcagtgggagcggtgagcctagcaacaagtcagctgccttcaccgccactcggaccaacagtgccccctcagcctccatcggcccttgagagtgatggcgagggcccaccccctcgcgtcgggttcgtcgatagcaccatcaaaagtctggatgaaaaactgcgtacattgctgtaccaagagcacgttccgactagctcggcaagcgcaggcacacctgtcgaggtcggggacagggactttaccctagaacctctgcgtggggatcaaccgaggtccgaggtttgtgggggagaccttgctctcccaccggtgcccaaggaggccgtgtctggccgagtccagctgccacagcctttggtggagaaatccgaactagcacctacacgtggtgcagttatggaacaaggcacctcctcttctatgaccgcagaatctagtcctagatcgatgttggggtacgaccgcgacggcaggcaggtggccagcgattcccatgttgtccccagtgttcctcaagatgtaccggctttcgtaaggccagctcgggtagaaccgactgacagggacgggggtgaggccggagaatcaagtgccgaaccccctcccagcgatatggggaccgtgggcggacaggcgagccacccccagaccctgggcgcacgggctctgggatcaccccgaaaaaggcctgagcagcaggacgtatcctccccagccaaaactgtgggaagattctctgtggtatcgacgcaagacgagtggaccctggccagcccccacagcctcagatactcagctccgcctgatgtgtacctcgatgaggccccatctagccctgacgtcaaactggctgtccgcagagctcagaccgccagctcaatagaagtaggtgtcggcgagcctgtgtcttcggacagcggggatgagggaccacgggctagacctcctgttcaaaaacaggcatctctgccagtgtctgggtctgtggctggcgactttgtcaagaaagccaccgcttttcttcagagaccaagtagagcgggatcactaggaccagagactccttcgagggtgggcatgaaggtgcccactatctcagtgacctcatttcattcgcagtcctcttatataagttcagataacgactctgagctcgaagacgctgatatcaaaaaagaattacaaagcttgagagagaagcatttgaaagaaatcagcgagcttcagtcccagcagaaacaggagattgaagccctctaccgcagacttgggaaacccctgcctcctaatgtcggcttcttccacaccgctccacctactggcagacgcagaaaaacctccaagtctaaacttaaagctggtaagctgcttaatccattagttagacagttgaaagtagtcgcttctagcacgggtcatctggctgatagtagccgtggacctcccgctaaggaccctgctcaggcctcagtggggcttaccgctgacagcaccggcctctccgggaaagctgttcagacacagcagccctgtagcgtgcgcgcaagcctcagttcagacatctgctccggcttggcttctgacggcggaggagccagggggcagggatggacagtctatcatccaacaagcgagagggtaacttacaagtcgagcagtaagcctagggctagatttctttcgggccctgtctcagtgagcatttggtccgctttgaaaaggttgtgcctgggcaaggaacattcctctagaagttctacatccagccttgcccctggtccagaaccagggcctcagccagccctccatgtgcaagcccaagtgaacaattccaataataaaaagggtaccttcactgacgatcttcacaagctagttgatgaatggactagtaaaaccgttggagccgcacagttgaagccgacattgaaccagctgaaacagacccagaaacttcaggatatggaagcccaagccggttgggctgcccctggggaggcccgagctatgaccgcccctagagccggagtgggaatgcccagactccctccggctccaggacctttatcaaccaccgtcattcccggtgctgcccctactctgtcagtgcctacacccggaagctgcgggccaagggcagtctccacacccacctcttacaccta

SEQ ID NO: 246907 - DNA, 5402 bp, synthetic construct
  misc_feature 1..5402: note = Description of Artificial Sequence: Synthetic coding sequence
  source 1..5402: mol_type = other DNA
atggcaacggatagcggcgaccctgcttcaaccgaagactctgagaagcctgacgggataagtttcgagaatcgcgttccccaggttgccgctaccttgaccgttgaagctaggctcaaagagaagaattcgacatttagtgcaagcggcgagacggtggaacggaagcggttcttccgcaaatccgtggagatgacagaagacgacaaagtcgctgaatcttcacctaaggacgagcggattaaggccgcaatgaatatcccacgggtggataaactgcccagcaacgtgcttagaggaggacaagaagtgaagtacgaacaatgctcaaaaagcacctccgaaatcagcaaagattgcttcaaggagaaaaacgaaaaagaaatggaagaggaagccgaaatgaaagccgtcgcaacttccccgtccggcagatttctgaagttcgatattgaactcggcaggggtgcttttaaaacggtgtacaagggactcgacacagaaacctgggtggaagtcgcctggtgtgagcttcaagatcgtaaacttacaaaggctgaacagcagcggttcaaagaggaagctgaaatgttaaagggactccagcatccaaacatcgttagattctacgattcctgggaaagtatattaaaaggaaagaaatgcatcgtgctcgtgacggagctcatgacctccgggaccctcaaaacctatctcaaacgttttaaggttatgaagccaaaagtactgagatcatggtgtcgccaaatactgaagggacttcagtttttgcatacaagaacgcctccaattatccacagggatctgaagtgcgacaatatttttatcaccggcccaaccggcagcgttaaaatcggagatctaggcctggctaccctcatgaggacatcctttgccaagtccgtgatcggaacgcccgaattcatggctccagagatgtatgaagagcactatgatgaatccgtagacgtttatgcgttcggcatgtgcatgcttgagatggcaacttctgaatacccttattctgagtgccagaacgccgctcagatttatcgaaaagtgacttccgggattaagccagcatcatttaataaagtgacagatcccgaagttaaggaaatcattgaggggtgtataaggcaaaacaaaagtgaacgcctgtcgatccgagatctactcaatcacgcctttttcgctgaagataccggcttgagggtcgagttggctgaagaagatgattgttctaactcgtcactcgccttacgactttgggtagaggaccctaagaagctaaaagggaagcataaggacaacgaggcaatcgagttttctttcaaccttgagaccgacacgcccgaggaggtggcgtatgaaatggtcaaaagtggattctttcatgaatcggactccaaggcagtagctaaaagcatacgagacagggtgacgcctataaaaaaaacgcgtgaaaaaaagcccgcaggttgtctagaagagagaagagactctcagtgtaaatctatgggtaatgtctttccccaaccacagaacactaccctgcctctcgcaccagctcagcagacaggggctgaatgcgaggaaacagaagttgatcagcatgtccggcagcagctgctgcagagaaagcctcagcagcactgctcaagcgttaccggcgacaatctttcggaggcaggagctgcatcagtaatccattcagatacaagcagtcagccatccgtggcatattccagcaaccagactatgggctcacagatggtgtccaatattccgcaggcggaagtaaatgtccccggacagatttacagctcacagcagttagtgggccactatcaacaggtgagcggactccagaaacattccaagctgacacagcctcagatcctgcccctggtgcaggggcagagtaccgtcctccccgttcacgtgctgggtccaacagttgtgagccagccacaggtgtctcccctgaccgtgcagaaggtgccacagatcaaaccggtttcccaaccggtcggcgcagagcagcaagccgctttgctgaaacctgacttagtgcgatcactcaatcaggatgttgccactacaaaggaaaatgtgagtagtcctgacaacccctcaggcaatggcaaacaggatcggatcaagcagcggagggctagctgtcccaggcctgagaaaggaacaaagtttcagctgaccgtccttcaggtttccacttccggtgacaatatggtggagtgtcagctggaaacacataataacaaaatggtgaccttcaagtttgacgtggatggcgacgccccagaagatatcgcagactacatggttgaggataattttgttttggagtcagagaaggagaagttcgtggaagaactccgggctatcgttgggcaggctcaggaaattctgcacgttcacttcgctacagagcgtgccactggggtggactctattaccgttgacagcaattcatcacaaaccggcagctccgaacaggtgcagatcaacagtactagtacacagaccagtaatgagtctgctccacaatccagtcccgtgggcaggtggcggttctgcatcaaccagactattaggaaccgcgaaactcagagtcctccaagcctgcagcattccatgagcgctgtgcccggaaggcatcccctgccttctccaaagaataccagcaacaaggaaatttcccgcgataccctgttgaccatcgagaacaacccctgtcacagagccctctttacaagtaaatccgagcacaaagatgtggtagacgggaaaatctcagaatgcgcgagcgtcgaaacaaaacaacctgccattctctaccaagtggaggataatcgtcaaattatggcccctgttacaaattctagtagttattccactaccagcgtgcgggcagtaccagccgaatgcgagggactcacaaagcaggctagcatctttattcccgtttacccgtgtcaccaaacggcctcccaggctgacgcactcatgagccaccctggggagagcactcagacgagtggaaatagcctcacaacactcgcctttgaccagaaaccgcagaccctgagcgtgcagcagccagcgatggacgcagaatttatttcccaggaaggggagaccaccgtcaacactgaggcctcttcaccaaaaacagttatcccaactcagacacccggtcttgaacccacaacgctacagcctactacagttcttgagagcgatggagagagacccccaaaactcgagtttgctgacaatcgaatcaaaactttggacgagaaacttcgaaatctcctataccaggagcactccatttcctcaatataccccgagagtcagaaggacacccagtcgattgactcgcccttctcctccagcgctgaagatacgctgtcgtgccccgtcactgaagttattgctatttcccactgtggcattaaggattcccccgtccagagccccaatttccaacaaaccggcagcaaacttttatcaaatgtggcggcaagccaacccgctaacatttctgtgttcaagcgcgacctcaacgtgatcacaagtgtccccagtgaactgtgccttcacgagatgtcaagtgatgcaagccttccgggtgatcccgaggcctaccccgcagcagtctccagtgggggagcaatccacctccagactggcggtggttatttcggtctttccttcacatgcccctccttgaaaaacccgatcagtaaaaaaagctggactcggaagctgaaaagctgggcctacaggcttcgccagagcactagcttctttaaacgctctaaggtgcgccaggtggagacagaggaaatgaggagtgctatcgctcctgaccccattccacttactagggagagcaccgccgacacacgtgcactgaatagatgtaaggccatgtctgggagctttcagagggggagattccaggtgattaccatcccacaacagcagtctgctaagatgaccagcttcggcatagagcacatctcagtgttttctgagacaaatcattcatctgaggaggcatttatcaagaccgctaagtcacagctggttgaaattgaaccggctacccagaacccaaagaccagcttcagctacgagaagctacaggcacttcaagagacgtgcaaggagaacaagggagtgcccaagcaaggggacaatttcttgagttttagtgctgcctgtgagactgatgtttcctccgtgaccccagaaaaggagtttgaggagacgtccgccaccgggtcatctatgcagagcggctccgagctcctacttaaagagcgggaaatcttaacagcaggaaaacagccttcatccgactctgagtttagcgctagcctagcagggtcggggaagagtgtcgcaaaaactggtcccgaaagcaaccagtgcctaccccatcacgaagagcaggcatatgcccagacccagagttcactcttctactccccatccagcccaatgagttcagacgacgaatcagaaatagaggacgaggacctcaaagtcgagctgcagcgcctgcgcgaaaagcatattcaggaagtggtgaacctccaaacccaacaaaacaaggagctgcaggagctgtacgaacggttaaggtctattaaggacagcaagacgcagagcactgaaattcctctgcctcctgcctctcctcgacgaccaaggagcttcaagagcaagctgaggtcaagaccccagtctcttacccacgtggacaatggtatcgtcgccactggaaaatcttgcctgatcaatgaactggagaatccgctgtgcgtggaaagtaatgctgcgtcatgtcagcagtcccccgcaagtaagaaaggaatgtttaccgacgacttacataagctggtggatgactggactaaggaagcagtgggtaattcgctcatcaagccatccttaaaccaactgaaacagtcccagcacaagctcgaaacagaaaattggaacaaggtctctgaaaataccccgagtaccatgggctacaccagtacctggatcagctccctctcccagatccgtggagcggtccctacaagcttgccccagggtctgagcctgccctcttttccaggacccctctcgtcgtacgggatgccacatgtgtgtcagtacaatgcagtggccggagctgggtacccagtccagtgggttggaatctcaggcacaacgcaacaatccgtagtaattccggctcagagcggcggtcctttccagcctgggatgaatatgcaggctttccccactagttctgtgcagaacccggctacaattccccctggtccgaaata

SEQ ID NO: 246908 - DNA, 5402 bp, synthetic construct
  misc_feature 1..5402: note = Description of Artificial Sequence: Synthetic coding sequence
  source 1..5402: mol_type = other DNA
atggccaccgactccggcgaccccgcaagcacagaggactccgaaaaacccgacgggatcagcttcgaaaatcgagttccacaggtggccgcaacactcaccgtcgaggctcggctcaaagagaaaaattctacattttccgctagtggggagactgttgaacgcaagcggttcttccgaaaatccgtggagatgacagaggacgacaaagtcgctgaatcctctcccaaagatgagcggattaaggccgctatgaacataccaagagtggataagctaccgtcgaatgtattaagggggggtcaggaagtgaagtatgagcagtgctcaaagtccacaagtgagattagcaaagattgttttaaggaaaaaaacgagaaagaaatggaagaggaggcggagatgaaagctgtggccacgtcgcctagcggacggttcctaaaattcgacattgagttgggtcgcggagctttcaaaactgtgtacaaaggacttgacacagagacttgggtggaggtggcctggtgtgaattacaggatcgaaaattaactaaagcggaacaacagaggttcaaggaagaggccgaaatgctgaaaggcctccaacacccaaacatagttaggttctatgactcttgggagagtatattgaaagggaagaagtgcatcgtgctggtgactgagctcatgacctccggtaccttaaagacatacttgaaacgcttcaaggtgatgaagccaaaagttctgagatcttggtgtaggcagatcctgaaaggactgcagttcctgcacacaaggactccccctattatccatagggacctcaagtgtgataacatttttattaccggccctacagggtccgtgaagattggggacctgggtctggcaacacttatgcgcacatcctttgccaagagcgtgatcggaacccccgagttcatggcacccgaaatgtacgaggagcattatgatgaatctgtggatgtctacgctttcgggatgtgcatgctagagatggctacctccgagtatccctattctgagtgtcagaacgctgcacagatctacaggaaagttaccagtggaatcaaacctgcgtcctttaataaggtgactgatccagaagtgaaggagatcattgagggctgtattcgacaaaacaaaagcgaacgcctaagcattcgggacttgctcaaccatgccttttttgccgaagataccggattaagggttgaattagcggaggaggacgactgtagcaactcctcgttggccttgagactatgggtggaggaccccaagaagctcaagggtaaacataaggataatgaggccatcgagtttagttttaacctcgagacagacactcctgaagaggtggcatatgagatggtcaagagcggctttttccatgagagcgactcaaaggcggttgccaaatcaattagggacagggtaacacccatcaagaaaacccgcgagaagaaacccgctggatgcttagaggagagaagagattcccaatgcaaatccatggggaacgtgttccctcaaccacaaaatactactctgccactcgcaccagcccagcagaccggcgctgagtgtgaagagacagaagtcgaccagcatgtgcgacagcagctccttcaacgtaagccccagcagcattgttccagcgtcaccggagacaatcttagcgaggctggtgccgcaagcgtaatacatagcgacacaagttcgcagccttccgttgcttactcgtccaaccaaacaatgggatcacagatggtgtccaatatccctcaggcagaggtgaatgtgcccggacagatatactccagccagcaactggtaggacattatcagcaggtcagtggcctccagaaacacagcaagttaacccaaccacagattcttccactggtgcaagggcaatctaccgtgctacctgtgcatgtgttggggccaactgtggtgtcacagccccaggtgagcccactcactgttcagaaggtgccgcagatcaaacccgtgagccagcctgtgggcgcagagcagcaggctgctctgctcaagcccgatctggtgaggtcgttgaatcaggatgtggccaccaccaaggaaaatgtctcctcacccgacaacccttctgggaatggaaaacaagatagaattaagcagcggagagcaagctgcccacggcctgagaaggggactaagttccagctgacagtactccaagtgagtacaagtggggacaacatggtggaatgtcagcttgaaacacacaacaacaaaatggtcaccttcaagttcgacgtggatggcgatgcacccgaagatattgctgactacatggtagaggacaacttcgtgctagagagtgagaaggagaagttcgtcgaagaactgcgcgctattgtcgggcaagctcaggagatcctacatgtgcactttgcaactgagcgagcgactggagtggactccatcaccgtggattccaacagtagccagactggctcttcagaacaggtacagatcaattctaccagcacgcagacttctaacgaaagtgccccacagtcttcaccggtgggcagatggcggttttgtattaatcagaccattcggaatagagaaacacagagcccaccttctctgcaacattcaatgtccgcggtaccagggcgacaccccctcccttccccgaagaacacctcgaacaaagagataagccgtgacaccctcttgaccatcgaaaataacccctgccacagagccctgtttacgtcaaagagtgagcacaaggacgtggttgacggcaagataagtgaatgtgccagcgtggagacaaaacagcctgctatcctctatcaagtcgaagataatcgacagattatggccccagttacgaactcaagcagctacagcaccacgtcagtcagggccgttcctgccgagtgtgagggactgaccaagcaggctagcatattcatccctgtgtacccctgtcatcaaacagctagccaggcggacgccctaatgtcccacccgggtgagtcgactcagacgtcaggcaattcactgaccacgctcgctttcgaccagaaaccccagaccctctccgtgcagcagccagccatggacgccgaatttatctcgcaggaaggcgagacgaccgtgaacaccgaggcttctagccccaagacggtgatcccaacacagactccaggcttggaaccgacaacactacagcccaccactgtgttagaatcagacggtgaaagacctcccaagctggagttcgcggacaatcgcatcaagactttggatgaaaagttgcgcaatctgctctaccaggagcacagcatctcctcaatttatccggagagtcagaaagacacccagtccatcgacagcccttttagctcgagcgctgaagacactctttcatgccctgtcactgaggtgatcgcgatcagtcattgtggtatcaaagacagcccggtacagtcaccaaatttccagcagacaggcagcaagttgctcagcaatgtcgccgctagccagcccgcaaatatttctgtgtttaagagggacctgaacgtaatcacatctgtgccctccgagttgtgcttgcatgaaatgtccagcgacgcaagtttgccaggagacccagaagcctatccagcagccgtgtcctcaggtggcgcaatccacttacaaactggtgggggatattttgggctctcgtttacctgcccctccctcaagaaccccatctcaaagaagagctggacacggaagcttaagagttgggcataccgtctccggcagagtacaagcttttttaagcgttctaaagtgaggcaggtggagaccgaagagatgcggtcagccatcgcccctgaccctataccgttaaccagagagtccacagccgacactcgggcactcaaccgctgtaaggcgatgtcaggatcatttcagcggggacggtttcaggtgatcacgatccctcaacagcaatcagcaaagatgacttcatttggtatcgaacacatctctgttttctcagaaaccaatcactcttccgaggaagcttttattaaaacagcaaaatctcagctagtggaaattgaaccggctacccaaaatccaaaaacatccttcagttatgaaaaacttcaagctttgcaggagacgtgcaaagagaacaaaggggtgccgaagcagggcgataactttctgtctttcagcgccgcatgcgagacagacgtcagctctgttaccccggagaaagagttcgaagagacctccgcgacggggagcagcatgcaatcgggctctgagctgcttttaaaagagagggagatcctgactgctggcaagcagcccagctctgattccgaattctcagccagtctggctggatccggtaagtcagtggctaagacaggacctgaatccaatcagtgtttgccccaccatgaggagcaggcctacgctcaaacacagagcagccttttttacagcccttcctcccctatgtcatctgacgacgagagcgagattgaagacgaggacttaaaagtggaactccagaggctgcgagagaagcatatacaagaggttgttaatctgcagacccagcagaacaaagagctccaggaactgtacgagaggctgagaagcataaaggattctaaaacccagtctactgagatacccttaccaccagcaagccctcgcaggcccagatccttcaagagcaaattgaggagcaggcctcagtctctgactcatgtggataacggaattgtcgcaaccggcaaatcttgcctcattaacgaactggaaaaccctctgtgcgtcgagtcaaatgctgcaagttgccagcaaagcccagcctcaaaaaagggtatgtttactgacgaccttcataaactggttgatgactggacaaaagaggccgtgggaaattctctgatcaagccctctttaaaccaactgaagcagtcacaacataagttagaaacagagaactggaacaaggtgtccgaaaacacaccatctactatggggtatacctctacctggatttcatcattatctcaaatccggggtgccgttccaactagccttccccaggggctgagcttgccctcttttcctgggccactgtccagctatggtatgcctcatgtgtgtcagtacaacgcagtagcaggtgcaggctaccccgtccagtgggtaggcatttcggggacaactcaacagtccgtcgtgatcccagcccagtccggaggcccttttcagcctggaatgaacatgcaggcctttccaactagcagcgtccagaatccggctacgattcccccaggccctaagta

SEQ ID NO: 246909 - DNA, 5231 bp, synthetic construct
  misc_feature 1..5231: note = Description of Artificial Sequence: Synthetic coding sequence
  source 1..5231: mol_type = other DNA
atggccacagacagcggggaccccgcatctactgaggactctgaaaaacctgacggcatctccttcgagaatagagtgccccaagtggccgctacactaacagtcgaggcgcgactgaaagaaaaaaattcaacattctccgctagtggcgaaaccgtggagcgaaagcgattcttccgaaagagcgtggaaatgaccgaggacgacaaggtagcagaaagcagtcccaaagatgagcgtatcaaggccgctatgaatatccccagagtcgataagctgccatcgaacgtgttgcggggaggccaggaggtgaaatatgagcaatgttcgaaaagcacgtccgagatctcaaaggattgctttaaggagaaaaatgagaaagagatggaagaggaggctgagatgaaggccgtggctacgtctccgagtgggagattcctgaagtttgacatcgaactcggcagaggcgcttttaaaaccgtctacaaaggcttggacacagaaacatgggtcgaggtggcatggtgcgagttacaggatcggaagttgactaaggcggaacagcagagatttaaggaagaagctgaaatgctcaaaggactgcaacaccctaatatcgtgcgattttatgattcttgggagagcatactgaagggaaagaagtgcatcgtcctcgtgactgaactgatgacttctggtaccctcaagacctacctaaaacgcttcaaggtgatgaaaccgaaggtcttgagaagttggtgtaggcagatactaaaggggctacagtttcttcacacccgtacccccccaatcattcatcgggacttgaagtgtgacaacatatttattaccggcccaaccggtagtgtcaagattggagacctaggattggccaccctaatgaggacatcattcgccaagagtgtaataggcacacccgaatttatggccccagagatgtatgaggaacattatgacgaatctgttgatgtctatgcctttggcatgtgtatgctagagatggccaccagcgagtatccttactcagaatgccagaatgcggctcaaatttaccgaaaggtaacgtcaggcataaaaccagcttccttcaacaaagtgacagaccctgaagtgaaggagatcatagaaggatgtatccgtcaaaacaagagcgagagactgagcatccgtgatctcttgaatcacgccttttttgccgaagatactggactccgtgtcgagttggctgaggaggacgattgttcaaatagcagtttggcgctgcgcctctgggtggaagaccctaagaagcttaagggcaaacacaaagataacgaggcaatcgaattctctttcaaccttgagaccgacacgccggaagaagtggcctacgaaatggtgaagtctggctttttccatgagagtgattcaaaggctgttgccaaatctattcgcgaccgggttacacctatcaagaaaaccagggaaaagaagccggcaggttgcctcgaagaacggcgtgacagtcagtgcaagagcatgggcaacgtattcccacagccacaaaatactacactccctttagctcctgcccaacagacgggggcagagtgcgaggagaccgaggtcgaccagcacgtgcggcagcagctgctacaacgaaagcctcagcagcactgctccagcgtgacgggcgataacctttccgaagccggagcagcaagtgtcatccactccgacacgtctagccaaccatcagttgcatactcgagcaaccaaaccatgggctcacagatggtgagtaacataccacaggctgaggtaaacgtgccagggcagatttactccagtcagcagctggttgggcactaccagcaggtttccggtctccaaaaacactcaaaactgacacaaccccagatattgccacttgttcaagggcagagcactgttttgccagtgcacgttctcggcccaaccgtggtctctcagccacaagtgtcccccctgacagttcagaaagtgcctcagatcaaaccagtgagtcagccggtgggcgctgagcagcaggcagccctgctgaaaccagatctcgttcgttctctcaatcaggacgtagctacaactaaggaaaacgtgtccagtccagataatccaagtggtaatgggaaacaggaccgtattaaacagagacgggcatcctgtccacgacccgagaaggggaccaaattccagctgacagtcttacaggtgagcacaagtggtgataacatggtggaatgccagctcgagactcacaacaataaaatggtgacatttaaattcgacgtggacggtgatgcccctgaagacattgcagactacatggtggaggataattttgtcctcgagagcgagaaggaaaaatttgtcgaggaacttcgggcaatcgtcggacaggcccaggagatcctgcatgttcacttcgccaccgagcgggctacaggcgtcgactctatcacagtcgattcaaatagcagccagaccgggtccagcgagcaggtccaaattaattccacctcgacccagacctccaacgagagtgccccacagagctcccctgttggcagatggagattctgcattaaccaaacaattcggaaccgggaaacccagtcccccccttccctgcagcacagtatgtccgctgtacctggccgacaccctttaccatcaccaaaaaatacatccaataaggaaatctctagagataccctgctgacgattgagaacaatccctgtcatcgtgctctgttcacgtcaaagagtgagcataaggatgtggtggacgggaaaatcagcgagtgtgcatcagtcgagactaagcagcccgcaattttgtatcaggttgaggataaccgccagatcatggcacccgtgacaaatagtagctcttatagcacaacaagcgtgagggcagttcctgccgagtgtgagggactcacaaagcaagccagtatattcatccccgtgtatccctgtcaccagaccgcctctcaagccgacgccctcatgtcacacccaggcgagagcacacagacctccggcaattccctgaccactctggccttcgatcagaaacctcaaaccctctccgttcagcagccagcgatggacgccgagttcatcagtcaggagggagagaccactgtcaatactgaggcctctagcccaaagactgtgattcccacccagaccccaggacttgaacccaccacccttcagcctactacagtgttggaatctgatggcgagcggccaccaaaactggagttcgccgataataggatcaagacgctggatgaaaaactccggaacctcctgtatcaggagcattctatatcatctatctatcctgaatcacagaaggacactcagtccatcgatagccctttctcaagcagtgccgaggatactctgtcttgtcccgtcacagaggtgattgcaatctctcactgcgggataaaagattcgcccgtccagtccccaaacttccagcagactggctccaaattgttgtccaatgtggctgcctcacagcccgctaacatctccgtcttcaagcgcgatctgaacgtgattacttccgtacccagtgaactctgcctgcatgagatgtcaagtgacgccagccttccaggtgacccagaagcatacccagccgcagtctcatctgggggagcaatccacctgcagacaggcgtcgagacagaagaaatgaggtcagcaatcgctcccgacccaatacctctcaccagagaaagcaccgccgacacgcgcgctctgaatagatgcaaggccatgagcggtagctttcagcggggaagatttcaagttataaccattccccagcagcagagcgcaaaaatgactagcttcgggatcgaacacatttctgtctttagtgagacaaaccattcatccgaggaggcctttatcaagacggccaaatcccaactcgttgaaatcgagcccgcaactcagaatcccaagacatctttctcttacgaaaagcttcaggctttacaggagacttgcaaggagaacaagggggttcccaaacagggggacaacttcctttcattctcagccgcttgcgaaaccgacgtgagcagcgtcacccctgaaaaggaattcgaagagacatctgcaacaggatcctccatgcagtctggcagcgaactgttacttaaagaacgggagatcctgacggcaggaaagcagccatcttccgacagcgaatttagcgcttccttggccggttccggaaagtctgttgctaagacaggcccagaatctaaccagtgcctgccacatcatgaggaacaggcttacgcacaaacccagtcaagcctgttttacagcccatccagtcctatgagctcagatgatgagtctgaaatagaggatgaggatttgaaggtggagctgcagaggttgagagaaaagcacattcaagaagttgtgaaccttcaaacacagcagaataaggagctgcaggagctgtacgaacggctgcgatccatcaaggatagcaagacccagagtacagaaatccccctgcccccagcgtccccacgacgtccaagatcctttaagagcaagctgcgcagcagaccacaatccctgacgcatgtagataacggtatagtcgccaccgaccccctgtgtgtggagtccaacgccgcatcctgtcagcaatccccagcaagtaagaaaggaatgtttacggacgatttgcataaattagtggacgactggactaaggaggcagtgggaaactccctcataaagccgagtctcaatcagctcaagcagagccaacataagctcgagacagagaactggaataaagtcagcgaaaatactcccagcaccatgggctataccagcacctggatctcttcactctcacaaatcagaggcgctgtgcccactagcttaccccagggactgagtcttccttcctttcccggtcccctgagcagctatggcatgccacacgtatgtcagtacaatgccgtggctggagctggttaccctgtgcagtgggtgggaatctcaggtacaacccagcagtctgttgtgatacctgctcagtccggtgggccatttcaacccggtatgaatatgcaagccttccctacgagttccgtgcagaacccagccaccattccgccagggccaaaata

SEQ ID NO: 246910 - DNA, 498 bp, synthetic construct
  misc_feature 1..498: note = Description of Artificial Sequence: Synthetic coding sequence
  source 1..498: mol_type = other DNA
atggctacagacagtggcgacccggcatctacagaggacagcgaaaagcccgatgggatatccttcgaaaaccgagtgccacaggtggccgcaaccttgactgtggaagccagactcaaagagaaaaacagcacgttctctgcaagtggagaaaccgtggagagaaaacgattcttccggaagtccgtggagatgacagaagacgataaggttgcggaaagtagtccgaaagacgaacgcattaaggctgccatgaatatccctagggtcgacaagcttccaagcaacgtgctacgcggtggacaagaagtgaagtatgaacagtgctccaaatctacatctgaaatcagcaaggattgctttaaggagaagaatgagaaagagatggaagaggaggccgagatgaaagccgtggccacgtcaccctctggcaggttcctaaagttcgatatcgaattgggcagaggagccttcaagaccgtgtacaagggcctatag

SEQ ID NO: 246911 - DNA, 3732 bp, synthetic construct
  misc_feature 1..3732: note = Description of Artificial Sequence: Synthetic coding sequence
  source 1..3732: mol_type = other DNA
atgctcgcgtcccctgccacagagacaacggtcctgatgtcccagaccgaagctgatctggctctacgacctccccctcccttgggaacggccggtcagcctcgtctaggccctcctcccaggcgtgcccgtcggttttctggtaaggccgagcctaggccacgcagttcacgcctgagccggcgatcaagcgttgatctgggactgctttcttcctggtccttgcctgctagtcctgcccctgacccccctgacccacccgactcggcaggcccaggaccggctaggtctcccccaccctcgagcaaggagcccccagaaggaacatggactgagggtgcaccagttaaggcagctgaggactcagctcgccctgaactgccagatagcgccgttggccctggatctcgagagccgcttcgggtgcccgaggcagtggctctcgagaggcggagggagcaggaagagaaggaagatatggaaacacaggctgttgctacatcaccagatggtagatacctgaagtttgatattgagatcggcagggggtccttcaaaacagtgtatcggggactggataccgatactactgtggaggtggcgtggtgcgagctgcaaacacgaaaattaagccgagccgagcggcaaaggttcagcgaagaagtggagatgctcaagggcctgcagcatcctaatatcgtgaggttttatgacagctggaaatctgtgctgaggggacaggtctgcatagtactcgtaactgaactcatgactagcggaacattgaagacatacctccgcaggttcagagagatgaaaccaagggttctacagcgatggtccagacaaatcctcagaggcctccatttcttacactctagagtgcccccaatcctgcaccgtgatctgaagtgtgacaacgtttttataacagggccaaccggttccgtaaagattggcgacctggggctcgctacgctgaagcgggcttcatttgccaaatcagtaatcggtacccctgaattcatggctccagagatgtacgaagagaagtatgatgaagctgtggatgtctacgcatttgggatgtgcatgctggagatggccaccagcgagtacccttactctgagtgccaaaatgcagcacagatctacaggaaagttacctccgggcgaaaacctaattcattccacaaggttaagatccccgaggtaaaagaaattattgaaggctgcatcagaaccgacaagaacgaacgcttcactattcaggatctcctggcacatgcattcttcagggaagaacggggtgttcacgtggaactcgccgaggaagatgacggagagaagccaggccttaagctgtggctccggatggaggacgctagaaggggagggcgtccgagggacaaccaggctattgaatttctcttccagctaggcagggatgcggctgaggaagtggcccaagaaatggttgccctggggctcgtatgcgaagctgactaccagcctgtcgcccgagcagtgcgcgagagagtggccgctattcaacgaaagcgcgagaaactgaggaaggccagagagctggaagccctcccccctgagccgggtccccctccagctaccgtgcccatggccccaggtccacctagcgtattccctccggaacccgaggagcccgaggccgatcagcaccagccctttctgttcagacatgcctcctattctagcaccacctctgattgtgaaaccgatggctatctttcatcatcaggcttcttggatgcgagcgaccctgccctacagccccctggcggtgttccgagttcattggcagaatcccacttgtgtttaccaagcgctttcgctttgtcgataccaagatccgggccaggttcggatttttcacccggtgatagttatgcatctgacgctgcttccgggctgagtgatgtcggagaaggaatgggtcaaatgagacgacctccaggacgtaacctccgacggcgacccaggagccgcctgcgggtaacgtcagtaagtgaccaaaacgaccgtgtcgtcgagtgtcagctccagacccacaattccaagatggtcactttcaggtttgatctcgacggggattcaccagaggagatcgccgctgctatggtctataacgaatttatactgcctagcgagagagacgggttcctgagaaggatccgagaaatcatccagcgggtggagacacttctaaagcgggataccgggccaatggaggctgccgaggacacgctgtccccccaggaggaaccagcgccacttcctgccctccccgtgcctcttccagacccttccaatgaggaactccaatcttctacttctcttgagcacagatcatggaccgcattctcgacatcttcttcatctccgggtaccccccttagtccgggtaaccctttctcacccggaacgcctataagccccggaccaatcttccccattacgtcaccgccatgccatccttctcctagtccgtttagcccaatctcttcacaagttagttctaacccgtctccccatcccacctcttcacctcttcctttcagtagctccaccccggaatttccggtgccacttagccagtgtccttggtcgtccttaccgacgacatcacccccaacattctctccaacttgctcgcaggtgacccttagctctccattctttccgccatgtccctcaacatccagctttccgtcaacgaccgccgcacccctcctgtcgctggcctcagctttttccttggcagttatgactgtagcgcagtctttgctgagtccatcaccaggcctgctgagtcagagtccacctgcccctccctctcctctcccctcgctgccactgccaccgcctgttgctccagggggacaggagagtccctctccacataccgctgaggtggagagcgaggccagtccaccgccagcgagacctttgccaggagaggcccgacttgctcccatttcagaggaaggcaaaccccaactcgtgggcaggtttcaggtcactagcagtaaagagcccgctgaacccctgccacttcagcccacctctccgactctgtctgggtctccaaagccgtctacaccacagttgacttccgagtctagcgatactgaagattccgcagggggtggccctgaaacccgggaggcgctcgccgaaagcgaccgggcagcagaaggcttgggcgcaggggttgaggaggaaggcgatgacggcaaagagccccaggtcggcggaagcccccaacccttgtcccacccatcaccagtttggatgaactacagctatagtagtctgtgtctgtcctcagaagagagcgagtcgagcggagaggatgaggagttctgggccgagctgcagtccctcaggcaaaagcacctcagcgaggtcgaaacactgcagacactgcaaaaaaaagaaatcgaagacctttacagtcggctcggcaaacagccccctccagggatcgtggccccagccgctatgctgtcgagcagacaacggaggctgtccaaaggctcatttccaacatctcgacgaaactctttgcagagaagtgagcccccagggcctggaatcatgagacgcaacagcctgtcaggtagctccactgggagtcaggagcagcgggcatccaagggcgttacctttgcaggagacgtcggacgaatgtag

SEQ ID NO: 246912 - DNA, 1992 bp, synthetic construct
  misc_feature 1..1992: note = Description of Artificial Sequence: Synthetic coding sequence
  source 1..1992: mol_type = other DNA
atgagacgacgacaacagggcgcagctgggggtaacttccctgtgggaggctcctttcccgaggacgtgtcaccacaccaagattctggttatgctcccagtcctcgatatctcagaagatttcgtgaaatgaagccaagggtgctccagcgctggtctagacagattctgagagggctgcatttcttgcacagtcgagtaccccctatccttcatcgcgatctgaaatgtgacaatgtttttatcaccggcccaaccggcagtgtgaaaatcggcgacttgggcttagccaccttgaagcgtgccagctttgcaaagagcgtcatcggaacaccagagtttatggcgcctgagatgtacgaggaaaagtatgacgaggcagtggacgtctacgccttcggaatgtgtatgctggaaatggctactagcgaatacccctattccgaatgccaaaacgccgctcagatctaccgtaaggtaactagcggacgaaagcctaacagctttcataaggtaaaaattccggaggtcaaagagattatcgaggggtgtatcaggaccgataaaaatgaacgctttacaatacaggacttgctcgctcacgcattttttcgagaggagaggggtgtgcacgtcgagcttgcggaggaggacgatggcgaaaaaccgggtttgaagctgtggctgcgaatggaagacgcccgtcgagggggacgtccaagagacaatcaggctatagagttcttgtttcagcttgggcgagatgcagccgaggaggtcgctcaggaaatggtggctctgggcctcgtctgcgaagcggattaccaacccgtagccagagccgtaagagaacgtgtggcagcaattcagaggaaacgggaaaaattgagaaaagcccgagagctcgaggctctgccccctgagcccggtcctcctcccgctacggtgcccatggccccaggtccacctagcgtattcccaccggaacctgaggaacccgaggccgaccagcaccaaccatttttgttccgacacgcttcatatagctccaccacttccgactgtgagacggatgggtatttatcaagctccgggttcctagacgcatctgatccagccttgcagccccctggtggcgttccctccagcttggcggagtcccatctctgtctcccaagcgccttcgctctctccatcccacgctccggacctggcagtgatttttcccctggggacagctatgcgtctgacgctgcatcaggattgagcgatgttggcgaaggcatgggccagatgagacgaccgcctgggcgtaaccttcggaggcggccaagatccagacttagggtcacatctgtatcggaccagaacgaccgggtagttgagtgccagttacagacccacaacagcaaaatggtcacatttcgattcgacctggatggagactctccagaagagatcgccgctgccatggtgtataatgagttcattttgccctcagagcgcgacggcttcctgagaagaatccgggaaatcattcagcgcgtagagactctcctcaagagagacactggtcctatggaagccgcagaagatactctgagcccccaggaagaacccgctccgctcccggctctgcccgtgcccctgccagacccttccaatgaggaactgcagtcctccacatcacttgagcatcggagttggacagcattttcaacatccagcagctcccccggaacacctctatccccagggaatcccttttcacccggtacccccatatcgcccggaccaatagcgctgcaacgagagtcccggtctttcagtctacaaagggctcaaattcagcgcactgtgttggaagcaggtcagcggccagggaaactctggttaagggccactgtgcagcttagggtctgggggttggagctccgcagaaaggagatgatgggcagaaatcctaaactgggagctgcacctaacccctag

SEQ ID NO: 246913 - DNA, 471 bp, synthetic construct
  misc_feature 1..471: note = Description of Artificial Sequence: Synthetic coding sequence
  source 1..471: mol_type = other DNA
atgggccaaatgagaagacccccaggccgaaatctgcggagacgcccaaggtcccggctgagagtgactagcgtttccgatcagaatgatcgagtcgtggaatgtcagctgcagacacataactccaaaatggtcacctttagatttgatcttgacggagactcgccagaggagatcgccgcagccatggtctataatgaattcattttgccttctgaaagagacgggtttctgcggaggataagagaaataattcagcgtgtcgagaccttgctgaagcgcgacacgggccctatggaggcagcggaggatacactgtctccacaggttcggccactggggggacatttccagggcaagtggaccttgtgctctagggtgtactatagcctaccctccgccgttcctctcgacctgaccccactgcacttgtgggatccaaaaacagtcgccctgttcttctttttctag

SEQ ID NO: 246914 - DNA, 894 bp, synthetic construct
  misc_feature 1..894: note = Description of Artificial Sequence: Synthetic coding sequence
  source 1..894: mol_type = other DNA
atggctaaggtgtcagagctttatgatgtaacatgggaggaaatgagagacaagatgaggaagtggcgggaggagaattcgagaaactcagaacagattgtcgaggtgggggaggagttgattaatgagtacgcctccaagttgggagacgatatttggatcatctacgagcaggttatgatcgctgcactcgattacgggcgtgacgaccttgcactgttttgtctccaggagctgcgcaggcagttccccggttcccacagagtcaagcggctgaccggcatgcgctttgaagcgatggaacggtacgatgatgcgattcagctttatgatcggatcttgcaggaggaccctacaaatactgctgcacgcaaaagaaagatcgcaataagaaaggcacagggtaagaacgttgaggccatcagggagcttaatgaatacctggaacagtttgttggggatcaagaagcttggcacgagctggccgagctctatattaatgaacacgactacgcaaaagctgcattctgtctggaagagcttatgatgaccaatccgcataaccacctgtattgtcagcagtatgcagaggtcaagtatacccagggcggtctggaaaacctcgagctcagcaggaaatactttgctcaggcacttaaactgaacaatagaaatatgagggcactgtttggactgtatatgtctgcttctcatattgcatccaacccaaaagcgagtgcaaagactaagaaagacaacatgaaatatgctagctgggcggcatcacaaatcaatagggcctatcagttcgccggtagaagcaaaaaggagacaaagtactccctcaaagctgtggaggacatgctagaaacattgcagattactcagagctag

SEQ ID NO: 246915 - DNA, 1104 bp, synthetic construct
  misc_feature 1..1104: note = Description of Artificial Sequence: Synthetic coding sequence
  source 1..1104: mol_type = other DNA
atgcgatggtttctcccctggaccctggctgctgtgacggctgctgccgcttccaccgtcttggctaccgccctgtcccccgctccaactactatggactttacccctgccccactggaggatacttcttcgagacctcagttctgtaaatggccatgcgagtgtcccccatccccaccgagatgtccactgggcgtgtccctgattaccgacggatgtgagtgctgcaaaatgtgtgcccaacagctgggtgacaattgtacggaggctgctatctgcgatccacatagggggctgtactgtgactacagtggggatagacctagatatgccatcggcgtttgtgcacaagtggttggtgttggttgtgtgttggacggcgtgcgatacaacaatggtcagtccttccaaccgaactgtaagtataattgcacctgtatagatggagccgtggggtgcaccccactgtgcctgcgggtacgaccacccaggctctggtgtcctcacccgagaagggtctccattcctggacactgttgtgaacaatgggtgtgtgaagacgatgctaagcgccctcgcaaaacggccccacgtgacactggagcattcgatgcggtgggtgaagtggaggcctggcatcgtaactgcatagcatataccagcccatggtccccgtgcagtacatcgtgtggtcttggggtgagcacaaggattagcaacgttaacgcccaatgctggccggagcaggagagccgcctctgcaacctgaggccctgcgatgtcgacatccatacgttaatcaaagcaggcaagaagtgcctcgcagtttaccaaccggaggcctcgatgaacttcacccttgccggatgcatatctactcggagctatcagccgaagtattgtggagtttgcatggacaatcggtgctgcatcccatacaaatccaagactatcgacgtgtctttccagtgccctgatggcctgggattctccaggcaggtcttatggatcaacgcgtgtttttgtaatttgtcatgtcggaaccccaatgacatctttgcggatctggaatcctaccctgatttcagcgagatcgccaattag

SEQ ID NO: 246916 - DNA, 588 bp, synthetic construct
  misc_feature 1..588: note = Description of Artificial Sequence: Synthetic coding sequence
  source 1..588: mol_type = other DNA
atgcccgtccccctaacgagtagacatgaggtggtgccagcactcgatgctggctcttcagactcctcatcaaggcaacacagaccagggcacgacgcagtgggcgaggtcgaagcatggcacaggaactgcatcgcctatacaagcccatggagcccatgtagcacttcatgcggactgggagtttcaacaagaatctcaaacgttaacgctcagtgctggcccgaacaggaaagtagactgtgtaacctgagaccctgcgacgtggatatccacacactgataaaagctggtaagaaatgtctggctgtgtatcagcccgaggcgtctatgaacttcaccctggccggatgtatttccactcgcagttatcaaccaaagtattgtggagtatgtatggataatagatgctgtatcccctacaaatccaagacaatcgacgtgtccttccagtgtcctgacggattggggttctcacgtcaagtgctctggataaacgcttgcttctgcaacttgagctgtcggaaccctaacgatatattcgcagatttagagagctaccctgattttagtgagatcgccaattag

SEQ ID NO: 246917 - DNA, 468 bp, synthetic construct
  misc_feature 1..468: note = Description of Artificial Sequence: Synthetic coding sequence
  source 1..468: mol_type = other DNA
atgaggtggtttctcccatggacgctggccgctgtaaccgcagccgcagcgagcacggttctggccaccgctctgtctccagctccaaccaccatggacttcactccagcgcctctagaggatacaagtagtcgaccccagttttgcaaatggccatgtgaatgccccccttcgccacctagatgcccgctgggcgtgtccttaatcacagatggatgcgaatgttgcaaaatgtgcgctcagcagctgggagacaactgtaccgaggccgctatctgcgaccctcaccgaggactgtactgcgattactctggcgacaggcctaggtatgcgatcggggtttgcgccaggagagaagaggtgtctggatgtgtgcccgcaagaggcattcacgaactccacacgtgtggactgcaccagcataccctcctgtcaacacaggttctttggtctcttcatggacagtag

SEQ ID NO: 246918 - DNA, 369 bp, synthetic construct
  misc_feature 1..369: note = Description of Artificial Sequence: Synthetic coding sequence
  source 1..369: mol_type = other DNA
atgaggtggttcctaccgtggacacttgctgctgttactgctgcagcggcatcaacagtcctggccaccgcaggaaaaaagtgcttggcagtatatcagccagaagccagcatgaattttactctcgcaggctgcatttcaacaaggtcttaccaaccaaagtactgcggggtttgtatggataatcgctgctgcattccatacaagtccaagacgattgacgtttcatttcaatgtccagacgggctgggattcagtagacaggtactctggatcaatgcctgtttctgtaaccttagctgccgcaacccgaatgatatcttcgccgatcttgaaagctaccccgacttcagcgagattgctaactag

SEQ ID NO: 246919 - DNA, 753 bp, synthetic construct
  misc_feature 1..753: note = Description of Artificial Sequence: Synthetic coding sequence
  source 1..753: mol_type = other DNA
atgcgtggcactcctaagactcatttacttgcctttagcttgctgtgtctgctgagcaaggtgagaacgcaactgtgcccaaccccctgcacttgtccttggccccctcctaggtgtcctctgggggtgcctctcgtgcttgatgggtgtgggtgctgcagagtatgcgcacgcagactgggtgagccctgcgatcaattgcacgtgtgcgacgcttcccagggcctggtctgccaacccggagctggccctggcggacggggagccttatgtctcttggccgaagacgactccagctgtgaggtgaacggcagattatatcgggagggcgaaacattccaaccccattgcagtatcaggtgtcgttgtgaagatggcggattcacttgtgtccccctgtgtagcgaggacgtgaggttgccgagttgggattgtccccatccccgacgggtcgaagtccttggcaagtgctgcccagagtgggtgtgcggccagggaggcggactggggacccagcctctccctgcacaggggccacaattttctggattagtgtcctcactgccccctggggtgccttgccccgagtggtcaactgcctgggggccatgctccactacttgcggactgggtatggctacgcgggtctcaaaccagaacaggttttgcaggctggagacccaacggcgattgtgtttgtctaggccttgtccaccgtcgcgtgggaggtctccacagaactctgccttctag

SEQ ID NO: 246920 - DNA, 657 bp, synthetic construct
  misc_feature 1..657: note = Description of Artificial Sequence: Synthetic coding sequence
  source 1..657: mol_type = other DNA
atgcgtggtacccccaagacacatttgttggcatttagcctgctctgcctgctctccaaggttcgaacccagttatgtcccaccccgtgcacatgcccatggccccctcctaggtgcccccttggtgttcctttagtactggacggatgcggctgttgtcgtgtctgtgcaagaaggttgggggaaccgtgtgatcagctgcacgtctgcgacgcttcccaggggctggtgtgccaacccggagccggtccaggcggtaggggggcattatgcctttgtaagcaagatccttccttcctggccctttcactcccttgtccgttagtgtcccctgcacagaacggcgcacgccctggagatccagcacggcctcccgtgggatgggcttggccccctggctgccccacaagaaccgcctccgccgattggcgcccaagtgcagcttgtgcatgtccagggccagctcacccaccaggggttgctgtgcacaagacagttccttcacgagccggacttgggatgggcactagatgtccacccagtcctgctgggggacccgttccgggaccgtgggctgatggccgatggagcgttcctcgccctctggcagcgggaaatacattggcctgggtgcatcatgctgagcaccagtactag

SEQ ID NO: 246921 - DNA, 753 bp, synthetic construct
  misc_feature 1..753: note = Description of Artificial Sequence: Synthetic coding sequence
  source 1..753: mol_type = other DNA
atgcggggtactccaaagactcacctgctggctttcagcttattgtgcttgctcagcaaggtgagaacacagctttgtccgaccccctgcacttgcccctggcctccgccacgatgtcctctcggagtgcctctcgtacttgacggatgtggatgctgtcgcgtttgcgcaagaaggctgggcgagccctgcgaccagcttcacgtgtgcgacgcaagtcagggtctggtctgtcagccgggagccggtcccggtggcagaggcgctctatgccttcttgcggaggatgacagctcctgtgaagttaacggcagactctatcgcgaaggcgagactttccaaccacattgctctatccgctgccgttgtgaggatggaggtttcacttgcgtacctctgtgctctgaagatgtgcgattgccgtcatgggattgcccgcatcctcgacgcgttgaagtgctcgggaagtgttgccccgagtgggtctgtggccagggcggtgggctgggcacacagccccttcccgctcagggaccacagttcagcgggctggtttcatctctccctccaggcgttccgtgtcctgaatggtctaccgcctggggtccgtgcagcacgacttgcgggctgggcatggcgactagagtttcaaatcagaatcgcttctgtcgtttagagacacagcggagattgtgtctcagccggccttgccctccatccagagggaggtccccacagaactctgccttttag

SEQ ID NO: 246922 - DNA, 2571 bp, synthetic construct
  misc_feature 1..2571: note = Description of Artificial Sequence: Synthetic coding sequence
  source 1..2571: mol_type = other DNA
atggagagcgaagatttgagcggcagggagctgaccatagattcaatcatgaacaaagtgagggacatcaaaaataagttcaaaaacgaagacctgacagacgaactgtccttaaacaaaatttcagcggacacaaccgacaacagcgggactgtgaaccaaataatgatgatggcgaacaaccccgaggactggctatccctgcttctcaagctcgaaaagaactccgttcccttgtctgacgccttattgaataaacttattggccgatatagtcaggccatcgaagcactgccccctgacaagtatggccagaacgaatccttcgctcgtatacaggttcgcttcgcagaactgaaggccattcaggaacccgacgacgctcgggattactttcagatggcgcgtgctaattgtaagaagttcgccttcgtgcatatatcatttgctcagtttgaactgtcacaggggaacgttaaaaagagcaagcagctactacagaaagcggtcgagcggggtgctgtacctctcgagatgctcgaaatcgccctgaggaacctgaacttacagaagaaacagctgcttagcgaggaggagaaaaaaaacctcagcgccagcacagtgctcaccgctcaggagagtttttcaggttccttgggacatctccagaaccggaacaattcctgtgactcgcggggacaaactaccaaagcacgatttttatatggcgaaaacatgccaccccaagacgctgaaatagggtatcgtaattccctgaggcagacaaacaagacgaagcagtcatgcccctttggcagggtcccggtgaatctgttgaactcacccgattgcgatgtcaagacagacgatagcgtggttccctgttttatgaagcggcagaccagccgcagcgagtgcagggatctggtggtccccggttccaagccctctggaaatgacagctgtgagctccggaacctgaaaagcgtgcaaaacagccacttcaaagagcccctggtctccgatgaaaagtcctccgaactgattataacggatagcataactcttaagaataagacggaaagcagccttctagccaaactagaagagacgaaagaataccaagaacctgaggtacctgagtcaaaccagaaacagtggcaaagcaagagaaaatcggaatgtattaaccaaaaccccgcagccagctcaaaccattggcagatcccagaactggcacgaaaggtcaataccgagaagcatactacgttcgaacaacctgtcttcagtgtcagcaagcagagtccgcctatctccacaagcaagtggtttgaccccaaatccatatgcaaaactccaagttccaatacactcgacgattatatgtcctgttttcgaacgcccgtcgttaagaatgatttccccccagcctgtcagctgtccacaccatatgggcagcccgcttgttttcagcaacagcagcatcagatactcgctacccctctgcagaatctccaggttctagcttcaagtagcgccaacgaatgcatctccgtcaaaggacggatctatagcatcctgaagcagattgggagcgggggatcatctaaggtcttccaggtgcttaatgaaaagaagcaaatttacgcaattaaatacgtgaatctggaggaggcagacaaccagacgctggacagctatcgtaatgaaattgcctacttgaacaaattgcagcagcactccgacaaaattatcagattatacgactacgagatcactgatcagtatatttacatggttatggaatgcggcaacattgacttaaacagttggctgaaaaagaagaagagtatcgacccgtgggaacggaaaagttattggaagaatatgcttgaggccgtccacacgatccaccaacacgggattgtgcactcagatctgaagcccgctaactttcttattgttgatggcatgttgaaactaatcgactttggaatcgctaaccagatgcaacctgatactacgtccgttgtaaaagattcccaggtcgggactgtgaactacatgcctcccgaagctatcaaagacatgtcatctagccgcgagaatggtaagtcgaaatctaaaatctcccctaagagcgatgtgtggtcacttgggtgcattctgtattacatgacatatggaaaaactcctttccaacagatcattaaccagatcagcaaacttcacgcaataatagaccccaaccacgagattgaattccctgatatccctgaaaaggatctccaggatgttttgaagtgttgcctcaagcgagatccaaaacagcggatctcaatcccagaactgctggcacacccttacgttcagattcagacccacccagtgaaccagatggccaagggcactacagaggaaatgaagtatgttctcggccagctcgtgggcctgaattccccaaatagtattctgaaagcggctaaaaccctttatgagcattatagcgggggagaatcacacaactcaagttcctctaaaaccttcgagaagaagcgcggaaaaaagtag

SEQ ID NO: 246923 - DNA, 1119 bp, synthetic construct
  misc_feature 1..1119: note = Description of Artificial Sequence: Synthetic coding sequence
  source 1..1119: mol_type = other DNA
atgaataagcgtaggctgttatacccgtctggatggctccatgggcctagcgatatgcagggactgctattttcaactctccttctggctgggctcgcccaattctgctgccgcgtgcaaggtacaggacctctggataccacacccgaggggaggccaggcgaggtttctgatgcaccccagcgcaaacagttctgtcattggccatgcaaatgtccccaacagaaaccacggtgcccaccaggcgtgagcctggttcgcgacggttgtggttgttgtaagatctgcgccaaacagccaggcgaaatttgtaatgaagccgacctttgcgacccacacaaggggctgtattgtgattactcggtcgatagacctcgctacgagaccggagtgtgtgcttatcttgttgctgtgggctgcgagttcaatcaggtgcattaccacaatgggcaggtgttccaaccaaaccccctgttttcatgcctctgtgtttcaggagccatcggatgtaccccactctttattcccaagctcgctggctcacactgcagtggcgctaaaggcggaaaaaagagcgatcagtccaactgcagcctggagcctttgctacagcaactgtcaacctcttacaaaacaatgccggcttatcgaaatcttcccctaatctggaagaagaaatgtctggtgcaggccactaaatggactccttgtagtcggacatgtggcatgggcatttccaatagagtgacaaatgaaaacagcaattgtgagatgaggaaagaaaagaggctctgttacatacagccctgcgattccaatatccttaagaccatcaaaatccccaaggggaaaacgtgtcaacccacttttcagcttagcaaggctgagaagtttgttttttccggctgctctagcacccagagttataaacccaccttctgtgggatatgcctggataaaagatgctgtatcccgaacaaaagtaagatgataactatacagttcgactgccccaacgaaggtagctttaagtggaaaatgctgtggatcacaagctgcgtctgtcagaggaactgtagggagcccggagacatcttcagtgaactgaagattttgtag

SEQ ID NO: 246924 - DNA, 996 bp, synthetic construct
  misc_feature 1..996: note = Description of Artificial Sequence: Synthetic coding sequence
  source 1..996: mol_type = other DNA
atgaaaatcagccgcggacgcgtgtgtctggaatctgaaaataaagacgccggagtggcaggccgtaaacagttttgtcattggccttgtaaatgcccccagcaaaaacctagatgtccccctggcgtgagcctggtaagagatggatgcggatgttgtaaaatatgtgccaaacagcccggtgaaatctgtaatgaagctgacctgtgtgatccacacaaggggttgtactgtgattactcagtggaccgcccacgctacgagaccggagtctgtgcttgcaagtccgtgggctgtgaattcaaccaggttcactaccacaacggacaagtgttccagccgaatcctctgttcagctgtctgtgtgtctctggcgcaattggttgtacgccactctttatccccaagctcgcaggttcccactgttctggggcaaaaggcggtaagaaatcagaccagagcaattgctcactggagccgctcctccagcagcttagtactagctacaagacgatgcctgcataccggaatctgccactcatctggaaaaagaaatgcctggtccaagccactaagtggaccccctgtagcaggacctgcggtatgggcattagtaatcgggtgaccaatgagaatagtaactgcgagatgcgaaaggagaagcgtctatgctacatccagccttgtgacagtaacatcctgaagactatcaaaatacccaaggggaagacctgccaacctactttccagctgtctaaagccgaaaagttcgtgttctccggatgcagctcgacccagagctacaagcccacattctgtggcatttgcttagataaacgctgttgtataccaaataagtcaaagatgataacaattcagtttgattgccccaatgaaggatcgttcaaatggaagatgttatggattacctcttgtgtttgccagcgcaactgtagagaaccaggtgatatcttttcggagctgaaaattttatag

SEQ ID NO: 246925 - DNA, 1065 bp, synthetic construct
  misc_feature 1..1065: note = Description of Artificial Sequence: Synthetic coding sequence
  source 1..1065: mol_type = other DNA
atgcaaggtctcctattctctacgttgctcctcgctggcctcgcacagttctgttgccgcgtgcaggggacaggacctctcgacactacacccgagggacgacccggtgaggtgtcagatgcccctcagaggaagcagttttgccattggccatgcaaatgtccacagcagaaacccagatgtcccccaggcgttagcttggtgagagatggttgcggctgctgtaaaatctgtgccaagcagcccggagaaatctgtaacgaagcggatctgtgtgatccacacaaagggctgtattgcgattattcagtggatcggccaagatacgagaccggtgtgtgcgcctatttggtggccgtggggtgtgagttcaatcaggtgcattaccataatggacaggtcttccagcctaaccctctattctcctgcctgtgtgtctcaggcgcaatcgggtgtacaccactctttatccctaaactggctggctctcattgctccggagcaaagggtggtaaaaagagcgaccagtcaaactgtagcctggaacccctactgcagcagctgtctacctcgtacaagaccatgccagcatatagaaatcttccgctgatctggaaaaaaaagtgcctcgtccaagccaccaaatggacgccctgctcaagaacatgtggtatgggcatctcaaaccgagtgaccaatgaaaacagcaactgtgaaatgcggaaggagaagagattatgttacattcagccctgcgatagtaacatccttaaaacaatcaaaatccctaaaggcaaaacctgtcagcccacctttcagttgtctaaagccgaaaaatttgtgttctcaggatgcagctctacacagagttacaagcccaccttctgcgggatctgcttggataagcgttgttgcatccccaacaagtctaaaatgatcaccattcagttcgattgccccaacgaaggcagctttaagtggaaaatgctgtggattacttcctgtgtgtgtcagcgcaactgtcgcgaaccgggtgacatcttttctgaactgaaaatcttatag

SEQ ID NO: 246926 - DNA, 693 bp, synthetic construct
  misc_feature 1..693: note = Description of Artificial Sequence: Synthetic coding sequence
  source 1..693: mol_type = other DNA
atgcagggtctgctgtttagtacgttgctactcgccggactggcccagttttgttgccgagtccagggcactggcccattggatacaacacccgaagggaggcctggtgaggtgtccgatgcgccacagaggaagcagttctgccattggccatgcaagtgtcctcagcaaaagccccgttgtccccctggtgtaagcctggttagggatggttgcggttgttgtaaaatctgcgccaaacaaccgggtgaaatctgtaatgaggcggatctttgtgatccgcataaggggctgtattgcgattactctgttgacagacctagatacgagactggtgtgtgcgcttatctcgtcgctgttggctgcgaattcaaccaggtgcactatcacaacggccaggtcttccagcccaatccattattcagctgcttgtgtgtgtcaggagccattggatgcacacccttgtttattccgaagctggccggttcacactgtagtggggcaaaggggggaaaaaaatccgatcagtctaattgttcactggagcctttgctgcagcagctgtctacaagttacaagactatgccagcctacagaaatctgccactgatctggaaaaaaaacgtgttgtgtaaacaacagaatggcctgccagctccggaacatgtgggatgggagtacttgaccggctag

SEQ ID NO: 246927 - DNA, 393 bp, synthetic construct
  misc_feature 1..393: note = Description of Artificial Sequence: Synthetic coding sequence
  source 1..393: mol_type = other DNA
atgggaattagcaaccgggtgaccaacgagaacagcaattgtgagatgaggaaagagaagcgcctctgctacatacagccgtgcgactctaatatccttaaaaccattaaaatccccaaaggaaaaacgtgccagcccacctttcaactgagtaaagctgagaagtttgtattctcaggctgcagttctactcaaagctataaaccaaccttctgcggaatctgcctggataaaaggtgctgtatccctaacaagagcaaaatgatcaccattcagttcgattgcccaaacgaagggagtttcaagtggaagatgttatggataacttcttgcgtgtgtcagcgtaactgtcgtgaacccggtgatatcttcagtgaactgaagattctgtag

SEQ ID NO: 246928 - DNA, 1626 bp, synthetic construct
  misc_feature 1..1626: note = Description of Artificial Sequence: Synthetic coding sequence
  source 1..1626: mol_type = other DNA
atggctggcgcaattattgagaatatgagtactaaaaagttatgcatcgtgggtggcatactgcttgtatttcaaataatcgcattcttagtgggcggtctgatcgcccctggtccgacaacggccgtctcgtatatgtctgttaaatgtgtggatgccagaaagaatcaccacaagactaaatggtttgtgccttggggacctaatcactgtgataagatacgagatattgaggaagctattcctcgggaaattgaggctaacgatatcgtattcagcgtgcatataccactccctcacatggagatgtctccctggtttcagtttatgttgttcattttgcagctcgacattgccttcaaactgaataaccaaatccgcgaaaacgccgaggtgtctatggatgttagcctcgcgtacagggatgatgcgttcgcggagtggacggaaatggctcacgaaagagtcccgaggaagttaaaatgtactttcaccagcccaaaaacacccgaacatgaaggcagatactacgagtgtgacgtgctgccattcatggagattggctctgtggcacataaattctacttgctaaatatcaggctcccggtgaatgagaaaaaaaagattaacgtcggaatcggcgaaattaaggatattcgtcttgtggggatccaccagaatggtgggttcaccaaagtgtggtttgccatgaagaccttcctgactccaagcatattcattatcatggtgtggtactggcggaggattaccatgatgtctagaccccctgtgctgcttgagaaggtgattttcgcactgggaatttccatgaccttcattaacatccccgtcgagtggttcagcattgggttcgactggacctggatgctcctgttcggagacattcggcagggtatcttttatgccatgctcctttctttttggataattttttgtggcgagcatatgatggatcaacacgaaaggaaccacatcgccggatattggaagcaggtaggacccatagctgtcggcagtttctgcctgttcatcttcgatatgtgcgaaagaggagtccagttgacgaatccattctactcaatctggactactgacattggaactgagctggctatggcatttattatcgtggctggtatatgtctgtgcctgtacttcctgttcttgtgcttcatggtgttccaggttttccggaatatctcaggcaaacagagttctcttccagccatgtccaaggtcaggagactacattacgagggtctcatctttcgcttcaagttcctgatgctcattacactcgcttgtgccgcaatgactgtaatattctttatagtcagtcaagtcactgaggggcactggaagtggggcggagtgactgtccaggtgaactccgcattcttcactggcatatatggaatgtggaatctgtatgtgttcgccctaatgtttctgtatgctccttcccacaaaaattatggcgaggaccagtctaacggggatttaggcgtgcacagcggcgaagagctgcagctgacaaccaccattactcacgtagacgggccaaccgaaatttacaaactgactagaaaggaagctcaggagtag

SEQ ID NO: 246929 - DNA, 1632 bp, synthetic construct
  misc_feature 1..1632: note = Description of Artificial Sequence: Synthetic coding sequence
  source 1..1632: mol_type = other DNA
atggcaggggctattattgaaaacatgagcacaaagaaactgtgcatcgtcggagggatcctgctggtctttcagatcatcgccttcttggtgggcggactgatagggcctactactgccgtgagctacatgagtgtgaaatgcgtggacgctaggaagaaccaccacaagaccaaatggttcgttccttggggcccaaaccattgtgataaaatcagggacatcgaagaggcgattccccgagagatagaggccaacgacattgtattcagcgtgcacatccccctaccccacatggaaatgagcccttggtttcagtttatgctctttatacttcagcttgatatcgcctttaagttaaacaatcagatccgggaaaatgcggaggtatcaatggacgtttctctcgcgtatcgtgacgatgcctttgccgaatggaccgaaatggcccacgagcgagtcccaagaaaactgaagtgcacctttacgtcacctaaaacacctgagcatgagggacggtactacgagtgcgatgtgctacccttcatggagatcggttcagtcgctcataagttttacctgctgaatatccgcctgccggtaaacgaaaaaaaaaaaattaacgtaggtattggagagatcaaggacatccggttagtaggcatccatcagaatggcggtttcaccaaggtgtggttcgccatgaagacatttctcacgccatcaatctttataatcatggtctggtattggcgtcggatcaccatgatgagtcgaccccctgtcctgctggagaaggtcatctttgccttggggatctcaatgacctttattaatatcccagtggagtggttctcgattggttttgattggacatggatgctgcttttcggggacatacggcaggggattttctatgcaatgctcctgagcttttggattatcttctgcggagaacacatgatggaccagcacgagaggaatcatattgccggttactggaagcaagtgggacctatcgcagtcggatccttctgcctttttatcttcgacatgtgcgaacggggagtccagttgaccaaccccttttactctatatggacaaccgatataggaacagagctggcaatggccttcatcattgttgccggaatatgtttgtgtctctattttctcttcctgtgttttatggtattccaggtgtttcgcaatatctccggtaagcaatcatcactccctgccatgtccaaggtcagaagattgcactacgagggcctgatttttagattcaaattcctgatgctgatcactctggcatgcgccgctatgaccgtgatcttctttatcgtctctcaagttactgagggacattggaagtggggcggagtcactgtacaggtgaactccgcattcttcacaggaatttacgggatgtggaatctatatgtctttgcactgatgtttctgtacgcaccctcccacaagaattatggggaggaccagtccaatggtatgcagctgccctgtaaatctcgggaggattgcgctctgtttgtttccgaactttatcaggagctcttctccgcatccaaatatagcttcatcaacgacaatgcggcttccggaatctag

SEQ ID NO: 246930 - DNA, 1353 bp, synthetic construct
  misc_feature 1..1353: note = Description of Artificial Sequence: Synthetic coding sequence
  source 1..1353: mol_type = other DNA
atggccggagccatcatcgagaatatgagcaccaagaagctttgcattgtgggtggcattttgttggtgtttcagattatagccttcctagttggagggttgattggggaaaacgccgaggtcagtatggacgtgtctcttgcttaccgggacgatgcatttgccgaatggacagagatggcacatgagcgggtgcctagaaagttgaagtgcacattcacttctcccaaaacacccgaacacgaaggcaggtattacgagtgcgacgtactgcccttcatggaaatcgggtccgtggcccataaattttaccttcttaacatccgccttccagtaaatgaaaagaaaaagataaacgtcggcatcggggaaattaaggacattcggctggtgggtatccaccagaatgggggtttcacaaaggtgtggtttgcaatgaaaacgtttctgacaccatccatatttattatcatggtgtggtattggaggcgtattacaatgatgtcacggcctccagtgctgctagagaaagtcatatttgctctgggcatctcaatgacttttataaatatcccagtcgaatggttcagcattggcttcgattggacttggatgctgctcttcggcgatattaggcaggggatcttctacgctatgctcctctctttctggatcatattttgcggtgagcacatgatggaccagcacgagaggaatcatatcgcaggatactggaaacaggttggacctatcgccgtcgggtcattctgtctgtttatcttcgatatgtgcgagcgtggcgtgcaactgaccaatccattctactctatatggacgaccgacatcggcacagaactggcaatggccttcataattgtcgccggaatctgtctttgtctgtattttctcttcctgtgtttcatggtgttccaggtgttccgcaacatcagtggcaaacaatccagtctgcccgctatgtctaaagtgcggcgactgcattacgagggccttatattcaggttcaagttccttatgctgatcacgctagcgtgtgcggctatgaccgttatcttcttcattgtaagtcaggtgaccgaaggacactggaaatggggaggggtaacggtccaggtgaattcagccttcttcaccggcatatatgggatgtggaacctctacgtttttgccttgatgtttctgtatgctcccagccataagaattacggcgaggatcaaagcaatggcgacctcggagtgcatagtggggaagagttacagctcactacgacaatcacacacgtggatgggcctactgaaatctacaagttgacccggaaagaggcccaagaatag

SEQ ID NO: 246931 - DNA, 1638 bp, synthetic construct
  misc_feature 1..1638: note = Description of Artificial Sequence: Synthetic coding sequence
  source 1..1638: mol_type = other DNA
atggccggagccatcatcgagaatatgtccacgaagaagctttgtatcgtgggcggaatcctcctggtgttccagattattgccttcctcgtgggcggtcttatcgccccaggaccaactacagccgtttcgtacatgtccgtaaagtgcgtcgatgccaggaagaaccaccacaaaaccaagtggtttgtgccttggggccctaatcactgcgacaagatccgggacatcgaggaagcaattccccgagagatagaggcaaacgacatcgtgttctccgtgcacatccctctgccccacatggaaatgagtccatggttccagttcatgctgttcatcctacagctggacattgcctttaagctgaataaccaaattcgggaaaacgctgaggtgtcaatggacgtctcactcgcttacagggacgacgcgttcgccgaatggacagagatggcccacgagcgggtccccagaaaacttaaatgcactttcacttccccaaagaccccagaacacgagggtcgctactacgaatgtgatgtccttccatttatggagatcggttcagttgctcacaaattctacctactgaacatcaggctaccagtgaacgagaaaaagaaaattaatgtgggaattggtgaaattaaagacatacggttggtgggaatccaccaaaacggcggattcaccaaggtgtggttcgcaatgaaaacattcctcactccctcaatcttcataatcatggtttggtattggcgtcgaattactatgatgtccagacccccagtactgctggagaaagtaatctttgctcttggcatttccatgaccttcataaatatcccagtcgaatggttctcaattggcttcgattggacctggatgctcttatttggggacatccgtcaaggaatcttctatgctatgctcctctcattctggataattttttgtggagagcacatgatggaccaacacgaacgcaaccatatcgcgggttactggaagcaggtaggtcccatcgccgtcggatccttttgcctctttattttcgatatgtgcgaacggggtgtgcaattgacaaatccgttctattcaatctggaccacagacattggaacggaacttgcaatggcgtttattattgtggcagggatctgcctgtgcctctacttcttgtttctgtgcttcatggtatttcaagtctttagaaatatcagcggcaagcagagcagtctgccagccatgagcaaagttcgcagactgcactatgaaggcctaatcttcagattcaaatttctgatgttgattactctagcctgtgctgcaatgaccgtcatattcttcatcgtttcccaggtgacagagggacattggaagtgggggggagtgactgtccaggtaaactccgctttctttaccggcatctatgggatgtggaacctttacgtgtttgccctcatgttcctttatgccccttcacacaagaactatggggaagatcaatccaatggcatgcagctaccatgtaagtctcgagaagattgtgcactgttcgtatccgaactgtaccaggaactgttctcagcctcaaagtatagctttattaatgacaacgccgcaagtggaatctag

SEQ ID NO: 246932 - DNA, 2142 bp, synthetic construct
  misc_feature 1..2142: note = Description of Artificial Sequence: Synthetic coding sequence
  source 1..2142: mol_type = other DNA
atggcagggtccttttgctggcgcatgctgggtctcgtgagcaaggttgggaaccgggcaaggtgtttctcatcaatggcggcatcagaggaggaactgctggatttctctggtagtgaactgcagtttaattcttgttcccttcatcttagccttcatcctttctttaatttcctgttggggatccactcctgcttcgtttgtaaagagagtaagactgatgtaaaacgctgtgtggttacccagtgcggcaaattctatcacgaagcctgtgtgaaaaagtacccgttgacagtgtttgaaagtagggggtttagatgcccactacacagctgcgtgtcctgccacgctagcaacccttccaacccgaggccatcaaagggcaagatgatgaggtgcgtccgctgcccagtggcgtaccattccggagacgcgtgtctggctgctgggtgttctgtgattgcttctaactctatcatctgcaccgcccatttcacggctcggaagggcaagcgccatcatgcacacgtcaatgtttcgtggtgctttgtgtgtagcaaaggtggaagtttactgtgttgcgagagttgccccgctgcctttcaccccgattgcctgaacattgagatgcccgacggttcttggttttgcaatgattgtcgcgctggtaagaaactgcatttccaggacatcatttgggtcaagcttggaaactataggtggtggcccgcagaggtgtgccaccctaagaatgtacccccaaatattcaaaagatgaaacatgagatcggagaatttcctgtcttcttctttggtagcaaggactactactggactcaccaggcaagagtgttcccctacatggagggtgaccgaggtagccggtatcagggtgtacgagggattggcagagtgttcaagaacgcactgcaggaagctgaggccagattccgcgaaatcaaactccagagggaagcaagagagacccaagagagtgagaggaagccccctccatataaacatatcaaagtgaacaaaccatatggcaaggtgcagatttatacagccgacatatcagagattcccaaatgcaactgtaaacctacggatgaaaacccctgtgggttcgacagcgaatgtttgaaccgaatgctcatgttcgagtgccaccctcaagtctgtccagccggagagttttgtcagaatcagtgtttcactaagcgtcagtaccccgagaccaagatcattaagacagatggtaagggctggggactcgtagctaagcgggacatccggaagggcgagttcgtcaacgaatacgttggcgaactgatcgatgaagaagagtgtatggctcgtatcaaacacgcccacgaaaatgacatcactcatttttacatgctgacaattgacaaggataggatcattgatgctggtcctaagggcaactacagtagatttatgaaccatagttgtcagcccaattgtgaaacgctcaagtggactgtgaacggcgacactagggttggtctcttcgctgtttgcgatatacctgcagggacagaacttacattcaactataatcttgactgcctgggcaatgaaaaaaccgtatgcaggtgcggcgcatccaattgcagtggctttctcggagaccgtccaaaaacaagcacaacactcagtagcgaagaaaaaggcaaaaaaaccaaaaagaaaaccaggcgacgacgcgctaaaggtgagggcaagcgccaatccgaggatgagtgtttccgatgcggcgacggaggacagctggtgctgtgcgaccgcaagttctgtacaaaggcctatcatctgagctgtctggggctcgggaagagaccgttcggaaaatgggagtgtccctggcatcactgcgatgtgtgtggcaagcccagtacctctttctgccatctctgtcctaatagtttctgtaaagagcaccaagacggcacagcatttagctgcacacccgacggtaggagttattgctgcgaacatgacctgggagcggcatccgtaagatccacgaagactgagaaaccccctccagaacctggtaagccaaagggaaaacggagaagaaggcgcggatggcggagagtgaccgagggaaagtag

SEQ ID NO: 246933 - DNA, 4098 bp, synthetic construct
  misc_feature 1..4098: note = Description of Artificial Sequence: Synthetic coding sequence
  source 1..4098: mol_type = other DNA
atggagttcagcattaagcagtctccattgtcagtacagagtgtggtgaagtgcattaagatgaagcaggcccctgaaatcctcggctccgccaatgggaaaaccccgagctgtgaggtgaaccgcgagtgcagtgtatttctgagcaaggcccagctgagctcatccctgcaggagggcgtcatgcagaaattcaacgggcatgatgctctccctttcattcccgcagacaaactgaaggacctaacctcaagagtctttaacggggagccgggagcccacgacgctaagctccggtttgagtctcaagagatgaaaggcatcgggaccccacccaataccactccaataaagaacggatcaccagagatcaaattgaaaatcacgaagacctacatgaacggaaagcctttgttcgagagctccatatgtggagactcagccgcagatgtgtcccagagcgaggagaatgggcagaaaccagagaataaggctcgacggaacaggaaacggagtattaaatacgactcactccttgagcagggcttggtggaagccgctctagttagtaaaatctcctctccgagcgacaaaaaaatcccagccaaaaaggagagctgtcctaatactgggagagacaaagaccacctattaaaatataacgtgggagacctggtgtggagtaaagtctccgggtatccatggtggccttgcatggttagcgcggaccccctcctgcatagctatactaaactgaaggggcaaaagaaatccgcacgccagtaccacgtgcagttcttcggggacgccccagaacgggcttggatcttcgagaaaagtctcgtagccttcgaaggcgaaggtcaattcgaaaaattatgtcaagagagcgccaaacaagctcccacaaaggctgaaaagattaagctgctgaaaccaatctcagggaagttgagagcacagtgggaaatgggcatcgtgcaggctgaggaagctgccagtatgtctgtggaagaaaggaaggccaagtttacatttctgtatgtgggagaccagttgcacctgaatccccaagtcgcaaaagaagctggaatcgctgccgagtccctgggagagatggccgagtctagtggagtatccgaggaggctgcagagaatcctaaaagcgttagagaggaatgtattccaatgaagcgcagacggagggcaaagctgtgttcctcagccgagacccttgaatctcatccagacatcggaaaatcgacgcctcagaagaccgcagaagcagatccgaggaggggtgtggggtctccccctgggagaaaaaaaacaactgtatcaatgcctagatcacgcaagggcgacgcggcaagccagttcttggtgttttgtcagaaacatagagatgaagttgtggcggaacacccggacgccagtggggaagagatcgaggagctgttaaggtcccagtggtctctgctgtctgagaaacagcgggctcgctataacacaaagttcgctttggttgccccagtacaggctgaggaggactcaggcaacgtaaacggtaagaaaagaaatcatacaaagcggattcaggatcctaccgaggacgctgaagcggaggacacaccacggaaacgtctgaggaccgacaaacactcactcagaaaacgagataccatcaccgataagaccgccagaacttcaagctataaggccatggaagccgcttcctctctgaaaagccaagctgcaacgaagaacctgtccgatgcttgcaaacctctgaagaagaggaacagagcttccaccgccgcatctagcgcacttggtttttctaagagcagcagccccagcgctagtctgactgaaaacgaggtttctgattctcccggtgacgagcccagtgaaagcccatatgaatctgctgatgagacccagaccgaggtgagcgtgtcctctaagaaatccgagcgaggtgtgacggcaaaaaaggagtacgtctgtcagctgtgcgagaaacccggaagtcttttattgtgtgaggggccatgttgcggagcatttcaccttgcctgtctggggctctctcgcaggccagagggaaggttcacttgtagtgagtgcgcttcaggaatccacagttgctttgtgtgcaaggagtcgaaaaccgatgttaaaaggtgcgtcgtcacacaatgtggcaagttttatcatgaggcctgtgtgaagaaatatccactcactgtgttcgaaagtagggggtttcggtgccccctgcactcctgcgtctcttgccacgcctcaaacccctcaaaccccaggcctagcaaaggtaagatgatgcggtgcgtgcggtgcccggttgcatatcacagcggtgatgcctgtctcgcagccggatgttccgtgattgcttcaaactcaatcatctgcacagcccactttacagctcggaaggggaagcggcatcacgcacacgttaatgtatcctggtgttttgtctgttctaagggcggttcactgctctgttgtgagtcttgtcctgcagccttccaccccgactgcctcaatattgagatgccagatggctcctggttctgtaacgactgtagagcagggaagaagttgcattttcaggacattatttgggtgaagctgggcaattacaggtggtggcccgcagaggtttgccaccccaaaaatgttccaccgaacatacagaaaatgaaacatgaaatcggcgagttccccgtattcttctttggctcgaaggactattattggacacaccaggccagggtgtttccctacatggagggagaccgtggaagtagataccaaggagttagaggcattggacgagtgtttaagaacgctttgcaggaagctgaagctagatttagggaaattaagcttcagcgcgaggccagggaaacacaggagagcgagagaaaacccccaccttacaaacacataaaggtgaataagccatatggaaaggtgcagatttacacagccgatatctccgaaatcccaaaatgtaactgtaagcccaccgatgagaacccttgcgggttcgactcagaatgtctgaacagaatgctgatgtttgagtgccaccctcaggtgtgcccggcaggggagttttgccaaaatcagtgcttcacaaaaaggcagtaccctgaaacaaaaatcatcaaaactgatggcaaagggtggggcctcgtagccaaaagagatatcagaaagggcgagtttgtgaatgagtacgtcggggagctgatagatgaagaggaatgcatggcacgcatcaagcatgctcacgagaatgacataacgcacttctacatgctgactattgacaaggatagaatcatcgacgccggtcctaagggcaactacagtaggttcatgaaccattcctgccagcctaactgtgaaactctgaaatggaccgttaatggcgatacgagggtagggctttttgctgtatgtgatatcccagctggcacagagctgacattcaattataatctggattgtctgggaaacgaaaagacagtgtgccgctgcggagctagcaactgttccggtttcctgggcgatcgcccaaaaaccagcacaaccctttctagtgaagagaaggggaagaaaactaaaaagaagacccgacgacgtcgagccaaaggggaaggaaaacggcagtctgaggacgagtgctttcgctgcggtgatggcggtcaactggtcctgtgcgaccggaagttttgcactaaggcttaccacctcagctgcctgggactggggaagcgtccattcggcaaatgggagtgcccatggcaccactgcgatgtatgcggcaagccaagcacatctttctgccacctctgtccaaattcattctgtaaggagcatcaggatgggactgcgttcagctgtacccctgatgggcgaagctactgctgtgagcatgatctgggcgctgccagtgtgcggtccactaaaacagaaaaacctccgccagagcctggcaagcccaaaggcaagagacgcagaagacggggttggaggcgcgttaccgagggaaaatag

SEQ ID NO: 246934 - DNA, 4098 bp, synthetic construct
  misc_feature 1..4098: note = Description of Artificial Sequence: Synthetic coding sequence
  source 1..4098: mol_type = other DNA
atggagttttcaattaaacagtcacccctaagcgtccagagcgtggtgaaatgcattaaaatgaagcaggccccagaaatccttggatccgcaaatggaaaaacccctagttgcgaggtgaatcgcgagtgtagcgtcttcctttccaaagcacagctgtcatctagcctgcaagagggggtcatgcagaaattcaatggccacgacgcactgccatttatacctgctgataaactcaaggatctgacctcacgggttttcaacggcgagcccggtgcccacgatgcgaaactgcgatttgagagccaggagatgaaaggaataggcactccccctaacaccacacctattaagaatggttcccccgagattaagttgaaaataactaaaacttacatgaatggcaaacctctctttgagtctagcatttgcggagatagcgccgctgatgtctcacagtctgaggaaaatgggcagaagccagaaaacaaagctcggcgaaatcgcaagcggtctatcaaatacgattccctgctcgagcagggactggtcgaagctgcccttgtctctaaaataagtagtccttctgataagaaaattccggctaaaaaggaatcttgccccaacaccggtcgcgataaagatcatctgctcaagtacaacgtcggggatttggtgtggtcgaaagtttccggatacccgtggtggccatgtatggtctctgcagatccgctcttacattcttataccaagttgaagggacagaaaaaatcagctaggcaataccatgtacaatttttcggcgacgcccctgagcgcgcttggatcttcgagaaatctctggtcgcttttgaaggagaaggacagtttgaaaagctctgccaggagtccgccaaacaagcccctaccaaagccgaaaaaattaaactcctcaagcccatctccggcaaattgagggcacagtgggagatgggtattgtgcaagccgaagaagccgcttcaatgtcagtggaggagagaaaagccaaatttactttcctctacgtgggcgaccagctccatctaaacccgcaggtcgctaaggaggctggcatcgccgcagaaagcctcggagagatggccgagtcatctggcgtgagcgaggaggccgctgaaaacccgaagagcgtgagagaagaatgtatacctatgaaaagacgcagacgggctaagctgtgcagttcagccgagacgctcgagtctcatccagacatcggcaagtctacccctcagaagactgccgaggccgaccccaggcggggagtcggctccccacccggacgtaagaaaactacagtgtctatgcccagaagcaggaagggggacgctgcatcgcagttcctggtgttttgtcagaaacacagggatgaggttgttgcagaacaccccgatgcctctggggaggaaatcgaggagctgctgagaagccaatggagcctgctaagcgagaagcagcgagcccgttataataccaagttcgcgctcgtggcaccagtgcaagccgaggaggactccggtaatgtcaatggtaagaagcggaaccacactaaacggatccaagacccgacagaagatgctgaggcagaggacaccccaaggaagcggctgagaaccgataagcactccctgagaaaaagagatactattaccgataagactgcaagaacctctagctataaagctatggaggcagcctcctctcttaagagtcaagccgcaaccaagaacttgtctgatgcttgcaagcctcttaaaaagaggaatcgcgctagcacagcggctagtagtgcattggggttcagcaagtcctcaagcccatctgcatctctgacagagaatgaagtgtctgacagccccggagacgagcccagtgagtctccatatgaatccgcagatgaaacccagacggaagtgagcgtctctagcaagaagagcgagaggggtgttacagccaaaaaagagtatgtctgccagctgtgcgaaaagcctggttccttattgctgtgtgagggcccatgctgcggagccttccatctcgcctgtcttggactctcccggagaccggaaggccgattcacatgctcggaatgcgcctccgggatacattcatgcttcgtgtgcaaggagagcaaaacagatgttaagcggtgtgttgtaacccagtgcgggaaattttatcatgaggcttgtgtcaagaaatacccactaaccgtttttgagagtagaggctttagatgtccactgcattcttgcgtgtcttgtcacgcgtcaaaccctagcaaccctcgccctagtaaagggaaaatgatgagatgtgttcggtgcccagttgcctatcactcaggtgatgcatgtttggcagccggatgcagtgttattgcatctaattcgattatatgtacagcccatttcacggctagaaagggcaaaaggcatcacgcacatgtcaacgtttcttggtgcttcgtttgcagcaaaggcggatcactgttgtgttgtgagtcttgccctgccgcatttcatcctgactgtctgaacattgagatgcccgatggatcctggttttgtaacgactgtcgggctgggaagaaacttcactttcaagatatcatctgggtcaagctcggaaactaccgctggtggccagctgaggtttgtcacccaaaaaacgtgccacccaacatacaaaagatgaagcatgagattggtgaatttcccgtgttctttttcggcagtaaagattactactggacacatcaagccagggtgttcccttatatggaaggcgacagaggttcccggtaccaaggcgtgcggggaattggacgtgtcttcaaaaatgccctccaagaggctgaggcccgatttagagagataaaactccagcgggaggccagggagacccaggaaagcgagagaaagccgccaccttataagcatatcaaagtcaacaagccttatggcaaggtccagatttacacagccgacataagcgagataccaaaatgcaactgtaaacccacagatgagaatccttgtggctttgactcagaatgtctcaatcgtatgttgatgtttgagtgccatccccaggtgtgtccggcaggagagttctgccagaaccagtgcttcacaaagcgccaataccctgaaacgaaaattatcaaaacagatggcaaaggatggggtctggtggccaaacgggatattagaaaaggcgaattcgttaacgagtatgtaggcgagctgattgacgaggaggagtgcatggcacgaatcaagcacgctcacgagaacgatatcacccatttctacatgctgactatagataaggatcgcatcatagatgccggacctaaggggaactattcccgtttcatgaaccatagttgccagcctaattgcgaaaccctgaaatggacagtgaatggcgacactcgggttggtttattcgcagtatgtgacattcctgccggaactgagctgaccttcaattataacctcgattgtcttggaaacgaaaagactgtatgcaggtgcggcgcttctaattgtagcgggttcctgggtgacaggcctaagacttctaccactctgtcgagcgaggaaaaggggaagaagacaaaaaagaaaacccgacggaggcgtgcaaagggagaaggtaaaagacagtccgaggacgagtgcttccggtgtggagacggagggcagctggtactctgcgaccggaaattctgcacaaaagcctaccacttgagctgccttggactgggtaaaaggccgtttggaaaatgggagtgtccatggcaccattgtgacgtgtgtggcaaaccaagcacgtccttttgccatttgtgtccaaactctttctgtaaggaacaccaggatggaactgcttttagttgtacacccgatggtagatcatattgctgcgaacacgacctcggggcagccagcgtcagatccaccaagaccgaaaaacctccacccgaacccggaaagcctaaggggaagcgtcgaaggcggagggggtggcggcgagttaccgagggcaagtag

SEQ ID NO: 246935 - DNA, 4098 bp, synthetic construct
  misc_feature 1..4098: note = Description of Artificial Sequence: Synthetic coding sequence
  source 1..4098: mol_type = other DNA
atggaattcagcatcaagcagagtccactttccgtgcaatctgtggtgaagtgcatcaaaatgaagcaggccccagagatactggggagtgctaatgggaagacgccctcatgtgaggttaatcgagaatgttcagtgttcctgagtaaggcccagctgagcagctctttgcaggagggagtgatgcagaagttcaatggccatgacgcacttccgttcattcctgccgacaagcttaaggacctcactagcagagtgttcaacggagaaccgggtgcacatgatgcaaagttaagattcgagtctcaggagatgaagggaatcggaaccccccctaacaccacacccattaaaaacggctctccggaaatcaaactgaaaatcaccaaaacgtacatgaacggcaaacctcttttcgaaagcagtatctgtggggattcagctgctgacgtgtcccagtccgaggaaaacggccagaagcccgagaacaaggccaggcgtaaccgtaaacgttctatcaagtatgactcacttctggagcaggggcttgttgaggccgctcttgttagcaagataagctccccatccgataaaaaaattccagccaaaaaagaaagttgtcctaacaccggcagagacaaagaccacttacttaaatataatgtgggagatttagtatggtctaaggtcagtggttatccctggtggccttgtatggtgagtgccgatccactgctccatagttacaccaagctcaagggtcagaagaaaagcgctcgtcagtaccatgtccaattcttcggggacgcgccagaacgcgcatggatttttgaaaaaagtctcgtagccttcgagggagaaggccagtttgaaaagctgtgtcaggaatctgcaaaacaggcccctacgaaagccgaaaaaatcaagttgctcaagcccatttcggggaagcttcgagcccagtgggagatgggaattgtgcaggctgaagaggcagcttctatgagtgtggaggaaaggaaagctaaatttacatttttatacgtgggcgatcagttacacctgaacccccaagtcgcgaaggaagccggaatagcagccgagtcactcggggaaatggccgaaagctcaggagtctcagaggaggctgcagagaatcccaagtccgtgagggaagagtgtatcccgatgaaacggcgaaggcgcgcaaaattgtgtagtagcgccgaaaccctggagagtcaccctgatattggtaagtcaactcctcagaagacggcggaagcagatccaaggagaggcgtcggaagtccgccaggcaggaaaaagacgactgtgagtatgccacggtcacgcaagggcgacgccgcttcccaattcctcgtattctgccagaaacacagggacgaagtagttgctgagcaccctgacgcatcgggcgaggagattgaggagctgctgcgaagccagtggtcattactttcagaaaaacagcgggcacgatacaataccaagttcgctctagtggcacctgtccaggccgaggaggacagcggcaacgtgaatggaaaaaagaggaaccacaccaaacggatccaggaccccacagaagacgccgaagccgaagataccccacgaaagcggttgcggacagataagcatagccttcgcaagcgtgatactatcactgataagaccgcacgcaccagctcatataaagctatggaagctgccagtagcctgaaatctcaggccgcaaccaaaaacttatccgacgcatgtaagccgttaaagaagcggaacagagccagcaccgccgctagctcagccttaggattttctaagagctcttctccctcagcttccctgacggaaaatgaagtctctgacagtcccggagacgaaccgtcagagagcccctatgaaagcgccgacgaaacacagaccgaggttagcgtgagcagcaagaagtcagaacgcggagtgacggccaagaaggaatacgtgtgccagctgtgtgagaagccaggttcccttttgctttgtgaggggccatgttgcggagcattccacctggcctgcttgggactaagccgaaggccagagggtaggttcacttgcagtgagtgcgcctcggggatccactcttgtttcgtgtgcaaagagagtaagaccgacgtgaagcggtgcgttgtgacccaatgcggaaaattctatcatgaggcctgtgttaagaagtaccccctcaccgtgttcgagagcagaggtttcagatgcccactgcactcgtgcgttagctgccacgcttccaatcccagcaatcctaggccctcaaaaggaaaaatgatgagatgcgttcgatgtcccgtggcctatcatagtggggacgcctgtttggccgcagggtgttccgttatcgcttctaactccattatctgtacagctcattttactgcccgaaagggcaaacgccatcacgcccacgttaatgtgagctggtgcttcgtgtgttccaagggcggaagtctgctgtgttgcgagtcctgtcccgctgccttccatcccgactgtctcaatatcgagatgcctgatgggtcatggttctgtaacgattgcagagccggaaaaaagctgcattttcaggacataatctgggtcaaattaggcaactatcgttggtggcccgcagaggtgtgccacccaaagaacgtacccccaaacattcagaaaatgaagcatgagataggagaattccccgttttcttcttcggctcaaaagactactactggacccatcaggctcgggtcttcccctacatggagggggatcgtggatccaggtaccagggcgtacgtgggattggtagagtcttcaagaacgctttacaggaggccgaggccaggtttcgcgaaataaagttacagcgcgaagctcgggaaacccaggagtctgagcggaaacctcccccatacaaacatatcaaggtgaacaaaccttacggcaaggtccagatctacacagccgacatttcagagattcctaagtgtaattgcaagccaacagatgaaaatccatgtgggttcgattcggagtgcctcaaccgtatgctgatgttcgaatgccacccccaggtctgcccagcgggtgaattttgtcagaatcaatgcttcacaaaaagacagtacccagagaccaagatcatcaaaaccgatggaaagggttggggacttgtcgcaaagagggacatcaggaaaggcgagtttgtcaacgaatacgtgggggagttgatagacgaggaggagtgcatggcgcgaattaagcatgcccatgaaaacgatatcacccacttttatatgctgacaattgataaggatcggatcatcgatgcaggtccaaaggggaactactcccggttcatgaatcattcgtgccagccgaactgcgaaacactgaagtggactgtgaatggcgacaccagagtgggcctgttcgcagtgtgtgatatccctgctggaaccgaattgacgtttaactataatctagactgtttggggaatgagaagactgtttgccggtgtggcgcttctaattgctccgggtttctgggggataggccgaagacgtctactactctctctagtgaggagaaagggaagaaaaccaaaaagaaaactaggagaaggcgggcaaagggagagggcaaacggcagtctgaagacgagtgttttagatgtggcgacgggggacagcttgtcttatgcgacagaaaattctgtactaaagcctatcatctatcctgcctgggactggggaaaagacctttcgggaaatgggaatgcccgtggcaccactgcgacgtgtgcggaaagccaagtaccagtttctgccatctttgtcctaactcattctgcaaagagcaccaggatgggaccgctttcagctgcacaccggacggtaggtcctactgttgcgagcacgacctcggggcagccagcgtgagatcaaccaagaccgagaaacctccgccagagccgggaaagcccaagggaaagcgtaggcggcgaaggggctggcgtcgagtgacagaaggtaaatag

SEQ ID NO: 246936 - DNA, 1944 bp, synthetic construct
  misc_feature 1..1944: note = Description of Artificial Sequence: Synthetic coding sequence
  source 1..1944: mol_type = other DNA
atggagttcagcataaaacaatctccactgtccgtgcagtctgtggtcaaatgcatcaagatgaaacaggccccagaaatcttgggtagcgctaatggtaagacacccagctgcgaggtgaaccgggagtgctccgtctttctgtctaaagctcagctgagttcctcccttcaagaaggagttatgcagaaatttaatgggcacgatgcactcccgttcatcccagctgataagctgaaggatctgaccagccgcgtgttcaatggggaaccaggggctcacgatgctaaactgaggttcgagtctcaggagatgaaaggaattgggacaccacccaacacaacgcctatcaagaacggatcacccgagataaagctgaaaatcacaaagacctacatgaatgggaagcccttgtttgagagtagcatatgtggggatagcgcagcggacgtctctcagagcgaggaaaatggccaaaagccagagaataaagctcggcgtaaccggaaacgaagcatcaaatacgacagcttgttggagcagggtctagtagaggctgccctagtctcaaaaatatccagccccagcgataaaaagattcctgccaagaaggagagttgtcctaacacgggcagggacaaagatcatctccttaaatacaacgtcggagatctggtatggagcaaagtctccgggtatccctggtggccttgcatggtttcagcggatccactcctgcacagctatacaaagctgaaaggacagaaaaaatcggccaggcaatatcacgtccagttctttggggatgctcctgagcgagcctggatcttcgagaaaagcctagtggcttttgaaggggagggacagtttgaaaaactgtgccaggaaagcgcgaagcaggcaccaaccaaggccgagaagattaaattgctgaaacctattagcggcaagctgcgggcacaatgggaaatgggtatcgtgcaggcggaggaagcagcttcgatgagcgtggaagaacggaaagcgaaattcacatttctctatgtcggtgatcagctgcacctcaacccgcaggttgcaaaagaggccggaatcgctgctgaatcactcggcgaaatggccgaaagcagcggcgtaagtgaggaggccgctgagaaccctaaatcagtccgagaggagtgtatccccatgaagcggagacgcagggcaaagctttgtagctcagccgagacactagaatcccacccggacataggaaagagcaccccacagaagaccgccgaagcggaccccaggaggggcgttggcagccccccaggtcgaaagaagacaacagtgagcatgcccaggtccaggaaaggcgatgccgcatcacagtttcttgtgttttgccagaaacatcgcgacgaggtcgtcgctgagcaccccgacgcctctggagaggaaatcgaagagctgctgcgcagtcaatggagcctgctgtccgaaaaacagcgcgcacgctataacaccaaatttgcactggttgctcctgtacaggccgaggaggattccggcaatgttaatgggaagaaaaggaatcatacgaaacgaatacaagaccctactgaggatgcagaggcggaggatactccgagaaaacggctgcgcaccgacaaacactcattgcggaagagggatacaattacagacaaaactgcccgaacctccagctacaaggcaatggaggccgcttctagccttaagtcccaagctgctactaagaacctgagcgatgcctgcaagccattaaaaaaaagaaatagagcttctacggccgcttccagcgcattaggctttagtaagagctcctctccctccgcctcccttactgaaaacgaacttctatgggagccgacgccagtgaagctggatctgaaccctgccgctctttactgcacttag

SEQ ID NO: 246937 - DNA, 1890 bp, synthetic construct
  misc_feature 1..1890: note = Description of Artificial Sequence: Synthetic coding sequence
  source 1..1890: mol_type = other DNA
atggagttctccattaagcagtctccgttatccgtgcagtctgttgttaaatgcataaagatgaagcaggcaccggaaatcctgggcagtgcaaatggaaagacgccatcttgcgaagtgaaccgcgagtgctccgtctttctatctaaggcccagctgtcttcatcactgcaggagggcgtcatgcagaagttcaatgggcacgacgcactgccatttataccggctgacaagcttaaagacctaacatccagggtgttcaacggggagcctggtgcacatgatgctaaattacgattcgaatcacaggaaatgaaaggcatcggaactccacctaacacaacccccattaagaatggttcaccggaaatcaagctcaagataacaaaaacatatatgaatggcaaacctctttttgaatcatctatctgtggcgattccgcagcagatgtgtcacagtcagaagagaatggccaaaagcctgaaaacaaggctaggcgcaatagaaagcgcagcataaagtacgattcattacttgaacagggcttagtagaggctgctttagtgtccaaaatatcctctccgtcagacaagaaaatcccagcaaagaaggaaagctgccccaatacgggccgagacaaggaccatttgctgaaatacaatgtcggagaccttgtatggtctaaggtgtctggatacccatggtggccgtgcatggtttctgccgatccattgcttcactcgtataccaagctgaaggggcagaagaaatcagcgaggcagtaccatgttcagttctttggcgacgcacccgagagggcctggattttcgaaaagtcgctggtggctttcgaaggcgaagggcagttcgagaaactatgtcaggagagcgctaagcaggccccaacgaaggccgagaagataaaattgctgaaacccattagcggcaagctcagggcgcagtgggagatgggaatcgtacaggctgaggaagccgctagcatgtcagtggaggagcgtaaggcaaaatttacttttctgtatgtgggcgatcagttgcaccttaacccacaggtggccaaagaagcagggatagcggctgaaagtcttggagagatggcagagtcatcgggggtgtcagaggaagctgccgaaaatccaaagagtgtccgggaggagtgtatccccatgaagcggaggcggagagccaaactgtgttcatctgctgaaactctggaaagtcatcctgatatcgggaaatcaacgccacaaaaaaccgcagaagctgatccgaggcggggtgttggaagtccaccaggccgtaaaaagacgacggtcagcatgcccaggagcaggaagggagacgcggcttctcagttcttggtgttttgccaaaagcaccgcgacgaggtggtagcagaacatcccgacgcctccggcgaagaaattgaggaacttctgaggtcacagtggagcctgttgtctgaaaagcagagagcccgatacaacactaagttcgccctagttgccccagtgcaggccgaggaggatagtggaaacgtcaacggcaaaaaacggaaccacacgaaacgcatacaagaccctactgaggacgctgaagcggaagacactcctcggaagcgacttcggaccgacaaacacagtctgcgtaaaagggataccatcacagataagactgctaggacgtcatcctataaagccatggaggccgcatcgtctctgaaatcccaggccgcaaccaaaaacctcagtgacgcttgcaagccactcaagaagcggaatagggcaagcaccgcagcttcctccgcattgggcttctccaagagcagctctccctccgcaagtctgactgagaatgaagtcaagtag

SEQ ID NO: 246938 - DNA, 822 bp, synthetic construct
  misc_feature 1..822: note = Description of Artificial Sequence: Synthetic coding sequence
  source 1..822: mol_type = other DNA
atggaattcagcattaaacagtcccctctttcagtgcagtcagtggtgaagtgcataaagatgaaacaggctcccgaaattctgggctctgcaaacggcaaaaccccaagttgtgaggtcaatcgggaatgttccgtattcttgtccaaggcccagctgtctagcagtttgcaggaaggagtgatgcagaaattcaatggccatgacgcgttacccttcatccccgcagataagctgaaagacttgacctcacgagtgttcaacggcgagccaggagcccacgatgccaaactaagatttgagtcacaggaaatgaaaggaatcggaacgccccctaataccacaccaattaagaatggaagcccggaaataaaattgaagatcaccaaaacatacatgaatggaaagccgctgttcgaatctagcatttgcggggatagtgcagctgatgtgtcacagagtgaagaaaatggtcaaaaaccagaaaacaaggcccgacgaaaccgaaaacgctcaattaaatacgactctctgttggagcaggggctcgtcgaggccgctctggtctctaaaatcagttccccgagcgacaagaaaatccccgcaaagaaggaatcctgccccaataccggtagggacaaagatcatctgctgaaatacaacgtcggagatttagtctggtctaaggtctccggatacccgtggtggccctgtatggtgtccgcagaccccttgttgcactcttacactaagctgaaaggtatttttaaaagcaagaaattcgagcatctgaaaacatcccagatcgtgctgaaggactag

SEQ ID NO: 246939 - DNA, 1944 bp, synthetic construct
  misc_feature 1..1944: note = Description of Artificial Sequence: Synthetic coding sequence
  source 1..1944: mol_type = other DNA
atggagtttagtatcaaacagtcacctctttccgtccagtccgtggtcaaatgtatcaaaatgaagcaggcacctgaaatactggggagcgccaatggaaagacgccttcgtgcgaggttaatcgggaatgctcagtctttcttagtaaggcacagctctcctcatcactgcaggaaggagtcatgcagaaatttaatgggcatgatgctctgccctttattcccgcagataagctaaaagatctgacaagtagagtgtttaatggggaacccggagctcacgacgccaagttaagattcgagagtcaggagatgaagggcattggcacaccaccaaacactactcctattaagaacggcagccccgaaatcaagctgaagataacaaaaacctatatgaacgggaaacccttgtttgaatcatctatctgtggagattcagccgcagatgtcagtcagtcggaagagaatgggcagaagcccgaaaacaaagcccgtcgcaaccgtaagaggtcaattaagtacgactctttgctggagcaaggccttgtcgaagcagcactggtttctaagatctcttccccatccgataaaaagattcccgctaaaaaagagtcatgccctaacacagggagagataaagaccacctgctcaagtacaatgttggagatctggtgtggtcaaaggtatctggttatccatggtggccatgtatggttagtgccgaccctttacttcactcttatacaaagctcaaggggcagaaaaaaagtgcccgacagtatcatgtgcagttcttcggcgatgcgcctgagcgagcctggatctttgaaaagagcttggtggccttcgaaggggaaggtcaatttgaaaagctctgccaggaatctgctaagcaggcacctaccaaggccgagaagattaaactcctgaaacctatttccgggaaactccgagctcagtgggagatgggaatagtacaggctgaggaagccgctagcatgtctgttgaggagcgtaaggctaagttcacatttctctatgtaggcgatcagctccatctgaatccccaagtggcaaaggaggctggaatcgccgctgagtccctaggtgagatggccgagtctagtggagtgagcgaggaggctgcagaaaatcctaaaagtgtgcgggaggaatgcattcccatgaaaaggagacgcagggccaaactatgctcaagcgccgagactctggagtcacatccagacattggcaagtctacacctcagaagaccgccgaagccgatccgagacggggagtgggctctccacccggaaggaaaaagacgacagtatctatgcccaggagcaggaaaggcgacgctgcttcccaatttctggtgttttgccagaagcacagagatgaggtagtcgcagagcatcccgacgcctccggagaagaaattgaagaactcctgaggagccaatggtcgctattgtctgagaagcaacgtgcaagatacaacactaaatttgctttggtcgcgcctgtgcaagccgaagaggactcaggaaatgtgaacggcaagaagagaaaccacacgaaaaggattcaggatccaactgaggacgcagaagccgaggacaccccgagaaaaagactgcgcaccgataagcacagccttcgaaagagggacacgatcactgacaagaccgccaggacgtctagctataaagccatggaagcggcttctagcttaaagtcccaggctgctaccaaaaacctatccgatgcctgcaaaccactcaagaaacgcaatcgcgcaagcactgccgctagtagcgccctgggcttttccaagagcagtagtccatcagctagtctgacggaaaacgagcttctctgggaacctacacccgtgaaactcgatctgaacccggctgcgctgtattgtacatag

SEQ ID NO: 246940 - DNA, 114 bp, synthetic construct
  misc_feature 1..114: note = Description of Artificial Sequence: Synthetic coding sequence
  source 1..114: mol_type = other DNA
atggagttcagtattaagcagtcacccttaagcgttcaatctgttgttaagtgtatcaagatgaaacaggccccagagattttgggctccgccaacggtaaaacccccagctag

SEQ ID NO: 246941 - DNA, 4098 bp, synthetic construct
  misc_feature 1..4098: note = Description of Artificial Sequence: Synthetic coding sequence
  source 1..4098: mol_type = other DNA
atggaattcagcataaagcagagcccactgtccgtgcagagtgttgtgaaatgcatcaaaatgaaacaggcaccggaaatattgggttcagcaaacggtaaaactccctcttgtgaagtcaaccgtgagtgttcagtcttcctatccaaagctcagttgagcagttcactgcaggaaggagttatgcagaagttcaacggtcacgatgcactgccatttattcctgccgacaagctgaaggacttaactagcagagtgtttaacggcgagcccggagcccatgatgccaaacttagatttgaatctcaggaaatgaagggcattggaacacctccaaacacgacccccattaaaaatggaagtcctgagattaagctcaagatcacaaagacatacatgaatgggaaacctttgtttgagtcgtccatttgcggcgacagtgctgcagacgtttcccagtccgaagagaacggccaaaaacccgaaaataaggctaggaggaatagaaagaggtctattaaatacgactcactgcttgagcagggcctagttgaagctgctctggtgtccaaaatcagctccccttccgataagaaaatccccgcaaagaaggagagctgcccgaacacaggacgcgataaagatcatctattgaagtataatgtcggtgacttggtgtggtctaaagtgtctggctacccatggtggccatgcatggtatctgccgatcccctgctgcattcctatactaagttaaagggccaaaagaaaagtgccagacagtatcacgtgcagttttttggcgatgctcccgaacgagcttggatctttgagaagagcttagtggcgttcgagggagaggggcaattcgaaaaattatgccaggaatcagcgaagcaagccccaaccaaagccgaaaaaatcaagctgctgaaacccatctccggcaagctgcgggctcagtgggaaatggggatcgtgcaggcagaagaggccgcatcaatgagtgtggaggagcgaaaagctaaattcacttttctgtacgtaggggatcagctgcacttaaatccccaggtggccaaagaggctggcattgccgctgaatccctgggggaaatggccgagtctagcggcgtatccgaagaagcagctgagaaccccaagtctgtcagggaggaatgcattccaatgaaacgacggcgtcgtgctaaactatgctcctccgctgagactctcgaaagtcaccccgatatcgggaaatctacaccacagaaaacagcagaagcagatccccgacggggtgtaggcagcccccctggcaggaaaaagacaactgtgtccatgcctcgaagtcggaaaggtgacgccgcatcccaatttcttgtcttttgccaaaaacatagagacgaggtggtagcagaacatcctgatgcgtcaggagaggaaattgaggaactgctgaggtcacagtggtcgctgttgagcgaaaagcagagggccagatacaacactaaatttgcattagttgctcccgtacaggcagaagaggatagtggcaacgtgaacggcaagaagcggaatcatacaaagaggatccaggacccgaccgaggatgccgaagctgaagataccccacgcaagagacttagaaccgacaaacattcccttagaaaacgggatacaattacagacaaaacggctcggaccagcagctataaggcaatggaagcagccagcagtctgaaatcgcaagcggctaccaagaacctgtccgacgcctgtaaaccattgaaaaaacgaaatagggcatccaccgcagcatctagcgccctgggattctccaagtcttcttccccctcagcttccctcaccgaaaacgaagttagcgattctcctggcgatgagcccagcgaaagtccatacgagtccgcggacgagactcagactgaagtaagtgtgagctcaaaaaaaagcgaacgtggagttactgcaaagaaggagtacgtctgtcagctttgtgagaaacctggttctcttctgctctgtgaagggccttgctgcggcgcattccaccttgcctgccttgggctaagccgcagacctgaagggaggttcacctgttcggaatgcgctagcggcattcacagctgtttcgtgtgcaaggaaagcaagactgacgtgaagcgctgcgtcgtgacccagtgcggcaagttttaccacgaagcttgcgtgaaaaaataccccttaacagttttcgagtcaagggggtttcgctgtcccttacatagttgtgtgtcttgtcacgcaagtaaccccagtaacccacgcccatctaagggcaagatgatgcgctgcgtgcgctgccctgtcgcatatcacagcggcgacgcttgtctggcagcaggatgtagcgtgatcgcctcaaacagtatcatatgtactgctcatttcactgctcgcaagggcaagaggcaccatgcacacgtgaatgtcagctggtgtttcgtgtgtagcaaagggggttctctgctgtgttgcgaatcctgtccagctgcgttccacccagactgcctcaacattgaaatgccagacgggtcttggttctgtaacgattgccgcgcaggcaaaaaactgcacttccaggatatcatttgggtcaagttgggaaattataggtggtggcccgctgaagtgtgccaccccaaaaatgtgcctcccaatatccagaagatgaaacatgagataggtgaattccctgtgtttttctttggcagtaaagattactattggacccatcaggcaagggtgtttccatatatggagggggatcggggatcacggtaccagggagtgcggggaatcggacgggtttttaagaatgcccttcaagaagcagaagccaggttccgggagatcaagctgcagagggaagcaagggaaacacaggagagcgagcgcaaacccccaccttataaacatattaaagtgaataaaccatacgggaaagtccagatttacactgctgacatctccgaaattccaaagtgcaattgtaaaccaaccgacgagaacccttgcgggtttgactccgagtgcctgaacaggatgctgatgtttgagtgccatcctcaggtttgtcccgcaggcgagttctgtcagaaccagtgttttaccaaacgtcagtaccccgagaccaagattataaaaacagacggcaaaggctggggcctcgtagctaaaagagatattcgtaaaggcgagttcgtgaatgagtatgtcggggaactgatcgatgaggaggaatgcatggctcgaattaagcacgctcacgagaatgacattacccacttttacatgctgactatagacaaggatcggatcatcgatgctgggcctaagggcaattactcacggttcatgaaccactcttgtcagccaaactgcgagactctgaagtggactgtaaacggcgacaccagggtgggactattcgccgtgtgcgatattcccgcaggtacagaactcacctttaactacaatctcgactgtcttggcaacgagaaaacagtctgccgctgcggcgcaagtaactgctctggcttcctcggagatagacctaagacaagcaccacactctcttctgaagagaaaggtaagaaaacaaagaagaaaacccggagacggagggctaaaggtgagggcaaaaggcagtccgaggacgagtgcttccgatgtggagatgggggacagctcgtgctgtgcgacagaaagttttgcacgaaagcctatcacctgtcatgtctagggctcggcaaaagaccttttggaaagtgggagtgcccatggcaccactgtgatgtctgcggtaaaccttcaacctccttttgtcacctttgtcccaactcattctgcaaggagcatcaggacggcactgccttctcgtgtacgcctgacgggaggtcttactgttgcgaacacgacttgggcgctgcctcagtacggagtactaaaaccgaaaagccccctccagaaccaggcaagccaaaaggcaagcggaggcggaggagaggctggagaagggtgacagaagggaaatag

SEQ ID NO: 246942 - DNA, 1179 bp, synthetic construct
  misc_feature 1..1179: note = Description of Artificial Sequence: Synthetic coding sequence
  source 1..1179: mol_type = other DNA
atggaattcagcatcaagcagtcccctttgtccgtgcaatccgtagtaaagtgcattaaaatgaagcaagccccagaaatcctgggttctgccaatggcaaaacgccttcatgcgaagtcaatcgcgaatgttctgtcttcctgtcgaaggcccaactgtcctctagcctgcaggaaggggtgatgcagaaattcaatggccatgatgccctgccattcattccagccgacaagctgaaagacctaacgagtcgtgtgttcaacggagagcctggtgcccatgacgcaaagttgcgtttcgagtctcaagaaatgaaaggtatcggcacaccccctaacaccacgccgattaagaacgggagccctgagatcaaactgaagatcactaaaacatacatgaatgggaaacctctgttcgaaagctcaatctgcggcgactcagcggcagacgtgagccaatcagaagaaaatggacagaagccagaaaacaaagcaaggagaaacaggaaaagaagcatcaagtatgacagcttgctagagcaggggctggtggaggctgccctcgtgtccaaaatctcttctccatcagataagaaaattccggcaaagaaggagtcctgtccaaatacaggcagggataaggaccacttgctgaaatacaatgtgggtgacctggtgtggtccaaggtgtcaggctacccttggtggccctgcatggtgagtgcagaccccctgctgcactcgtacactaagctcaaaggccagaagaagtccgcacgccagtatcacgtgcagttttttggagacgctccagagagggcgtggatcttcgaaaagagccttgtggccttcgagggcgagggccaatttgaaaagttgtgccaggagtctgccaagcaggccccaacgaaggcggagaagatcaagttgttgaagccgattagcggaaagttacgcgctcaatgggagatgggtatcgtccaggcggaagaggctgcctcaatgagcgtggaggagaggaaagccaagttcacatttttgtacgtcggcgaccagcttcatctgaacccacaggttgccaaagaagctggaatcgccgctgagtccttaggggagatggccgagtcctcaggggtaagtgaagaagccgctgaaaaccccaaatcagtgcgcgaatag

SEQ ID NO: 246943 - DNA, 1890 bp, synthetic construct
  misc_feature 1..1890: note = Description of Artificial Sequence: Synthetic coding sequence
  source 1..1890: mol_type = other DNA
atggagttcagcatcaagcaaagccccctcagtgtgcagagcgtagtcaaatgcattaaaatgaaacaagcgcctgaaattctaggtagcgcaaacggcaagactccctcgtgtgaagtaaaccgtgagtgttccgtgttcctgtccaaggctcagttgagttcttccctgcaggagggtgtcatgcagaaatttaacggtcatgacgcactgccattcatccccgcagataagcttaaggacttgaccagcagagtgttcaatggcgagccaggcgctcacgacgcaaagctgcgctttgagtcacaagagatgaaaggcatcggtacaccgcctaacacaactcccattaagaacggcagtccagaaatcaagctgaagatcacaaagacctatatgaacggcaagcccctcttcgagagtagtatctgcggcgacagtgccgctgacgtgagtcaatctgaagagaacggccagaaacctgagaacaaagccagacgcaacagaaagcgtagtataaaatatgattcactgctggagcaggggttggtggaagctgctcttgtgtcaaagatcagcagcccatcagacaagaagattcccgctaaaaaggagagttgtccaaacactggtcgggacaaagaccacctgctgaaatacaacgtcggggatctggtctggtcaaaggtgtctggttacccttggtggccctgtatggtgagcgctgatcctctgcttcacagctacaccaaattaaaaggacaaaaaaaatctgccagacaataccatgtgcaattctttggggacgcaccagaaagggcctggatctttgagaagtcgctggtcgcatttgagggagagggacagttcgagaagctctgtcaggaaagcgctaagcaagctcctactaaagcggagaaaatcaaactgttgaagcccatcagtgggaaactacgggcacagtgggaaatgggtattgttcaggctgaagaagccgcttcgatgtctgtagaagaacgcaaggccaaattcactttcttgtacgttggcgaccaactgcacctcaacccccaggtggccaaagaggctgggatcgccgcagaaagcctgggggagatggctgaatcctccggcgtgagtgaggaagccgctgaaaatccaaaatctgtgagagaggagtgtatccctatgaaaaggcggagacgggctaaactgtgttcttcagcggagacactggaatctcaccctgacatcggaaagagcactccacagaaaacagctgaggctgatccccgacggggagtagggtcacccccagggaggaagaagacaacagtgtctatgcctcgctcccgtaagggtgatgccgcaagccaattcctggtgttctgtcaaaagcacagggatgaagtggttgcggaacatccggacgccagcggcgaggaaatagaggagctgctgagatcacagtggtcactgctgtcagaaaagcagagggccaggtataatacaaagtttgcccttgttgctcccgtccaggccgaggaggattccggtaacgttaacggcaaaaagagaaatcacacaaagcgcattcaggatccaactgaagacgctgaggctgaggacacacccaggaaacgattgcggacagacaaacacagcctgagaaaacgcgataccattaccgataagactgcacgcacctcttcctataaggcaatggaggcggcatccagtcttaagagccaggccgcaaccaaaaatctctcagacgcctgcaaaccactgaagaagagaaatcgcgctagtactgccgcaagttctgccctgggtttttcaaaatcttcgtcaccctcagcctctctcacagaaaatgaggtgaaatag

SEQ ID NO: 246944 - DNA, 600 bp, synthetic construct
  misc_feature 1..600: note = Description of Artificial Sequence: Synthetic coding sequence
  source 1..600: mol_type = other DNA
atggaatttagcattaaacagagccccctgagtgtacagagcgtggtgaagtgcattaaaatgaaacaggcacctgagatccttggctccgccaatggaaaaacacctagctgcgaggtgaaccgagagtgcagcgtctttttgagcaaggcccaactcagttctagcttgcaggagggcgttatgcagaaatttaacggtcatgatgctctcccatttatccccgctgacaagctcaaggatctaacaagcagggttttcaacggcgagcccggagctcacgatgcgaagttacgcttcgagagccaagaaatgaaaggaattggcacccccccaaatacaactcctataaagaacgggtcacccgagatcaagttaaagataaccaagacatacatgaacggcaaacctttgttcgaatcctctatctgcggggactcggccgcagatgtctcacagagtgaagaaaacgggcagaagcctgagaacaaggccaggcgcaacaggaagcgtagcatcaagtatgacagtctgttagaacaagggctcgtcgaagccgcactagtgtccaagatcagttccccaagcgataagaaatag

SEQ ID NO: 246945 - DNA, 1938 bp, synthetic construct
  misc_feature 1..1938: note = Description of Artificial Sequence: Synthetic coding sequence
  source 1..1938: mol_type = other DNA
atggatttctcgtttagcttcatgcaaggcatcatgggcaataccattcaacagcctccgcagttgatcgacagtgcaaatattcgccaagaagacgcttttgacaacaacagcgacatagcagaggacggaggtcagaccccatacgaagcaacattgcagcaggggtttcaataccctgccaccactgaggatctgccaccactgacgaacggctacccttccagcatctcagtgtatgaaactcagacaaagtatcagtcctataaccagtatcctaacggctctgccaatggcttcggtgccgtgcgcaacttttcgcccacagactactatcacagtgagatcccaaatacgcgcccacacgaaattctcgagaagccaagtcctccacagccccctccgcctccatctgtgccccagaccgtgattcccaaaaagactggttctcccgaaattaagctcaagatcacaaagacaatacaaaacgggagggagttattcgaaagctcactctgcggagacctcttgaatgaagtgcaggccagcgaacacaccaagagcaagcatgagagccggaaggaaaagagaaagaaatccaacaagcacgactcaagccggagcgaagagcgaaaatcacacaaaatccccaagcttgagcctgaggagcagaaccggccaaatgagcgggtggacactgttagcgaaaaacctagggaggagcccgtgctgaaagaagaggcccctgtgcaaccaattctgtccagcgtccctacaaccgaagtgagcaccggggtcaagtttcaggtgggcgatttggtctggagtaaggttggaacttacccatggtggccgtgtatggtttcctccgacccgcaactggaagtgcacactaaaattaatacaaggggggctcgggagtaccatgttcaattctttagcaatcaacccgagagggcgtgggtgcacgagaagcgagtgagggaatacaaaggacacaaacagtatgaagagcttcttgccgaggctacgaaacaggctagtaaccatagtgaaaaacagaagatccgaaaacctcgaccccaacgcgaaagagcacagtgggacatcgggattgctcatgcagaaaaggcactcaagatgactcgcgaggaaaggatcgagcagtacacatttatctacattgataagcaacccgaagaggcactcagccaagccaagaagtccgtcgcctcaaaaaccgaggtgaaaaagacaagacgacctcgttctgttcttaacacccaacccgaacagacaaacgccggtgaggttgctagctctctgagttcaacagagattaggcgccacagccaaaggcgccatacctctgctgaggaggaagaaccgcctccggtaaagatagcctggaagaccgctgctgcgagaaagagtcttcccgcaagtatcaccatgcataaaggatccttggacctgcagaaatgcaatatgtcacccgtggttaagatcgagcaggtctttgccctccagaacgcgacgggagacggtaagttcatcgatcagttcgtctactcaacaaaaggaattggaaacaaaaccgaaatctccgtccgcggtcaagacaggctcatcatttccacccccaatcagcggaatgagaaacccacccagtccgtctcctcccctgaagcaacatccgggtctacagggagtgtcgagaagaaacaacagcggaggagcattcgtactcgcagcgagtccgagaaatccaccgaagttgtgccgaaaaaaaaaatcaaaaaagagcaggtggagaccgttccccaagcaacggtcaaaacgggacttcaaaaaggcagtgccgacaggggagtgcaaggctcggtccggttttctgattcgtccgtgtcagccgctatcgaggagactgtcgactag

SEQ ID NO: 246946 - DNA, 4314 bp, synthetic construct
  misc_feature 1..4314: note = Description of Artificial Sequence: Synthetic coding sequence
  source 1..4314: mol_type = other DNA
atggacttctcgttcagtttcatgcagggaataatgggcaataccatccagcagccccctcagctaatcgattccgctaacatcagacaagaggacgcatttgacaataatagtgatatcgctgaagacggcggacaaacgccatacgaagctacactgcaacagggcttccaatatccagccaccaccgaggacctgcctccactaactaacgggtaccccagcagcatttctgtgtacgaaacccagacaaaatatcagagctacaaccaataccctaatggctccgcaaatgggtttggcgctgtcaggaatttcagtccaacagattattaccactctgagattccaaatacccgccctcacgaaatcttggagaagccctctccgcctcagccccctccaccccctagcgtgcctcagactgtgattccaaagaaaacaggctccccagagataaagctcaagatcaccaaaaccattcaaaatgggagggaactgtttgagagcagtctgtgtggagacctgctgaacgaggtgcaggcttccgagcacaccaagtccaaacatgaaagtagaaaagaaaaaagaaaaaagtctaataaacatgattcgtcccgtagcgaagaaaggaaatcccacaagatcccaaagcttgaaccagaggagcagaatcgcccaaacgagcgagtggacacagtgagcgagaaacccagggaagagcctgtactgaaagaagaagcccctgtgcagcctatactgtcgagtgtgccgacaactgaagtgtcaacaggagtcaaattccaggtcggtgacctggtttggtcaaaggtgggcacttacccgtggtggccatgtatggtttcctccgacccacagctggaggttcacactaagatcaacaccaggggcgctagagaataccatgtgcaattcttctcaaatcagccagaaagagcttgggtacatgagaagcgcgtaagagaatataaaggacataaacagtacgaagagcttctggcagaggccacaaagcaggcctccaatcactcagagaaacaaaaaatacgaaagccacggcctcagagagagagagcccagtgggatattggaatcgcccacgctgagaaggccctgaagatgacccgcgaagaacgcattgagcagtatacatttatctatattgataaacagcccgaggaagccctgtcgcaggctaagaaatctgtggcctccaaaaccgaagtgaaaaagacacgaaggccgagatcagtgcttaacactcaacccgagcagacaaacgcaggcgaagtggcatcgagcctgtctagcacagaaatccggagacactcccagcggagacatacttctgcagaggaggaggagcccccacctgtcaaaatagcctggaaaaccgccgcagcacggaagagtctgccagcctcaatcaccatgcacaaaggtagtcttgacctgcagaaatgtaacatgagccccgttgtgaaaatcgaacaagtattcgccctgcagaacgcgactggtgatggaaagttcatcgaccaattcgtgtacagtaccaaaggaatcggtaacaagaccgagatctctgtccgcggtcaagatagattgattatctccaccccgaatcagcgtaatgagaaacctacacagtcggtgtcgagccctgaagccacttctggatccacaggctccgttgagaagaaacagcagagacgtagtatccgaacccgaagcgaatccgaaaaaagtacggaggtagtccccaagaaaaagatcaaaaaggagcaagtagaaactgtgcctcaggccacagtcaaaaccggactgcagaagggcgcttccgagattagcgattcctgcaagcctttgaagaagagatctcgggcttccaccgatgttgagatgacatcgtcagcctatagagacacgtccgattccgacagtcgcggtctgagtgatcttcaggtaggttttggcaagcaagtagattcccccagcgcaactgccgacgcagatgtctcagacgtccagtcaatggatagctctctgagccgacggggaacaggaatgtctaaaaaagacaccgtttgccagatctgtgagtcatctggcgactccctcatcccctgcgagggtgagtgctgcaagcatttccatctcgaatgtttgggcttggcctctctgcccgactccaagtttatatgcatggagtgtaagacagggcagcacccttgcttttcctgtaaagtcagtgggaaagatgttaagagatgcagcgtcggagcttgtgggaaattttaccacgaggcatgcgttagaaagttcccaacagcaattttcgaatccaaaggctttcggtgtccccaacattgctgcagcgcatgtagtatggagaaggacatccacaaagcgagcaaaggacgcatgatgagatgtttgcgatgccctgtggcatatcattcgggagacgcctgtatcgcagcgggatctatgctggtttccagctatattcttatctgttctaatcatagtaagcgctcgagtaactcttctgccgtgaacgtcggattctgttttgtgtgtgcaagagggctgatcgtccaggatcactccgatcccatgttcagctcctacgcctacaagtctcactacctgctcaacgagtccaatagggcagaactcatgaagcttcctatgattccttcctcgtcggcgtcaaaaaagaagtgcgagaaagggggtcggttgctgtgttgcgagtcctgtcctgcctcattccacccagaatgcctgtccatcgaaatgcctgagggctgttggaactgtaatgactgcaaagcaggaaagaaactccactataagcagatagtctgggttaaacttggtaactatagatggtggccagcagagatctgtaatccccgtagcgtgcctctgaacattcaagggctgaagcacgatctgggcgatttccccgtgtttttttttggctctcacgattactattgggtccaccaagggagagtgttcccctacgtggagggcgataaatccttcgcagaggggcagaccagcatcaataaaacctttaaaaaggcccttgaggaggcggctaaaagatttcaggaactaaaagcccagagagaatccaaggaggccctggagattgaaaaaaactctcggaagcctcccccatacaagcatatcaaagcaaacaaagtgattggtaaagtgcagattcaagttgccgacctgtctgaaatcccgcgttgtaattgtaagcccgcagacgaaaatccctgtggactggaaagcgaatgtttgaacagaatgctgcaatatgagtgccacccccaggtttgccctgccggagaccgctgtcagaaccaatgctttacaaagcggttgtatcccgacgcagagattatcaagaccgagaggagaggatggggtttgcgaaccaagcggagtattaagaaaggggaattcgtgaacgagtacgtgggcgaactgatagatgaagaagagtgccgcctgagaatcaaacgcgctcacgagaacagtgtcactaacttctatatgctcaccgtgactaaggaccgtataatcgatgccggaccaaagggaaattattctagattcatgaaccacagctgtaatcctaactgcgaaactcagaagtggaccgtcaacggagatgtgcgcgtgggccttttcgcattgtgcgatattcccgctggaatggaactcacttttaactataacctagattgcctgggtaacgggagaacagaatgtcactgtggtgccgataattgctcaggcttcctaggggttcggccaaagtcagcctgtgcctcaacaaatgaagagaaggccaaaaacgctaagctgaaacagaagcgcagaaaaataaaaactgaacccaagcagatgcacgaagactattgtttccagtgtggggacggcggagaactcgttatgtgtgataaaaaagactgtcctaaggcttaccaccttttgtgtctgaacctgactcagcccccttatggaaaatgggagtgtccgtggcatcaatgcgatgaatgcagcagtgccgctgtgtcgttttgtgaattctgtcctcattccttctgcaaggaccatgaaaagggggcactcgtcccgtctgccctggaagggagactctgctgcagtgagcatgaccccatggcaccagtgtctcctgaatattggagcaaaataaagtgtaagtgggaatcacaggatcacggcgaagaagtaaaagagtag

SEQ ID NO: 246947 - DNA, 4167 bp, synthetic construct
  misc_feature 1..4167: note = Description of Artificial Sequence: Synthetic coding sequence
  source 1..4167: mol_type = other DNA
atggacttttcatttagcttcatgcaaggaattatggggaacaccattcaacagccaccccaactcatcgactccgcgaacatccgccaggaagacgcgttcgacaacaactctgatattgcagaggacggcggtcagactccttacgaggctacactacagcaaggctttcaatacccggctaccacagaggacctgcccccactgacaaatggttacccttcctccataagtgtctatgagactcagactaaatatcagtcatacaaccagtatcccaatggctccgctaacgggtttggcgcagtgcgtaatttcagcccaaccgactactatcactcagaaatacctaatacccgaccacatgagatcctggaaaaaccttctccgcctcagccacctccacctccaagcgtcccgcagaccgtgattcccaaaaagacgggcagccctgagattaaactcaagattacaaagaccattcagaacggcagggaactgttcgaatcatctctgtgtggggatctcctgaacgaagtgcaggcctccgagcacacaaagtcaaagcatgagtcccggaaggaaaagcgaaagaaatctaataaacacgacagcagtcgtagtgaggaacgaaagtcacataaaatcccaaagcttgagcccgaggagcagaatcgtcccaacgagcgcgttgataccgtttctgaaaaacccagagaggagcctgtgctgaaggaagaggcacccgtgcagcctatcctctcctcagttcctaccacagaggtctccaccggcgttaaattccaggtaggtgacctcgtctggtcgaaggtcgggacctacccttggtggccttgcatggtctcttcggacccgcagctcgaggtgcacacaaaaattaatacaaggggagctcgtgaatatcacgtccagttcttctcgaaccaacccgagcgcgcttgggtccacgaaaaacgggtgcgcgagtataaggggcacaaacagtacgaggagcttctcgctgaggcaaccaagcaggctagtaatcactcggagaagcagaagatccgcaagccacgccctcagcgtgagagggcacagtgggacattggcattgcgcacgcagaaaaggccttgaaaatgaccagagaggaacgcattgagcaatacacctttatctacatcgacaagcagcccgaggaagcactcagccaggctaagaagtctgtagccagcaaaacggaagtgaagaagactcgcaggcccaggtctgtgctcaatacccagcctgagcagacgaacgcgggagaagtggcctccagcctgtctagcacagagattaggcgccatagccagcggagacatacctcggctgaagaggaggaaccaccgcctgtaaagatagcctggaagaccgccgctgcgaggaagagcctgcctgcttccatcactatgcataagggttctctcgacctccagaaatgcaatatgtcccccgtcgtcaagattgaacaggtgtttgccttgcagaatgcaaccggggacggcaaattcatcgatcaatttgtgtactccactaaaggaatcgggaataagaccgagatcagcgtgcggggacaggataggctgattattagtacacccaatcagagaaatgaaaagcccacccagtctgttagttctccagaagctaccagtggatcaaccggatccgtagagaagaagcagcaaaggagatccatccggacacgctccgagtctgaaaaatccaccgaggtagtccctaagaaaaaaatcaaaaaggagcaggtggagaccgtcccccaggctaccgtgaaaactggactgcagaaaggggcttctgaaatttccgactcttgtaaaccactgaaaaaaagatctcgggcttccacagatgtggagatgactagcagcgcctacagggatacttctgacagcgactctagaggcctctccgatctccaggtgggatttggcaagcaggtggattcccccagcgccaccgccgacgcagatgtgagcgacgtacagagtatggactcttccctgagtaggcgtggtaccgggatgtccaagaaggacacagtgtgccagatctgtgagagctccggggactcattgataccttgtgagggcgagtgttgcaagcattttcacttggagtgtctcggactggcatccctacccgactccaagttcatatgtatggaatgcaaaacagggcagcacccttgtttttcctgtaaagtcagtggtaaagatgtgaaacgctgcagtgtgggtgcttgtggaaagttttaccatgaggcatgtgtaagaaagtttcccactgcaatttttgagagcaaaggcttccggtgcccccagcattgctgctcagcttgcagtatggagaaagatatccacaaggcctccaagggacggatgatgagatgcctgagatgtcccgtcgcttaccacagcggtgacgcctgtattgctgccggatcaatgcttgtaagcagctacattctcatctgctctaaccattctaagcgttcttccaacagttcagccgtgaacgtaggattttgctttgtgtgcgcaagaggtggcagactgctttgctgtgagtcttgtcccgctagtttccatcctgaatgtttgtctattgagatgccggaggggtgttggaattgtaacgattgtaaggctggaaaaaaactgcactacaaacaaatcgtatgggtcaagctggggaattacaggtggtggcccgctgaaatttgcaaccctcggagtgtgcccttaaacatccagggacttaagcacgatctgggcgattttccggtcttttttttcgggtcacacgattattattgggtgcatcaggggagggtgtttccttatgtggagggggacaaaagtttcgcagagggccagacatctatcaacaagacgttcaagaaggccctcgaagaggccgcaaaacgcttccaagagctcaaggcccaaagggaatcaaaggaagccctcgaaattgagaaaaactctcgcaagccacccccttacaaacatataaaggcaaacaaagtcatcggaaaggtgcagatccaggtcgcagacctcagcgagattccccgatgcaactgcaaacccgctgatgagaacccgtgtggacttgagagtgagtgtttgaatcgcatgctacaatatgaatgccatccccaggtgtgtcctgctggagaccggtgccaaaatcagtgcttcaccaagaggttgtaccctgatgcggagatcattaaaaccgaacggagaggatggggactgcggactaagcggtctataaagaagggggaatttgtgaatgagtatgtgggggagctaatcgacgaggaggagtgtcgccttcggattaagagagcgcacgaaaacagtgtgaccaacttctatatgttgaccgttactaaagataggattatcgacgcgggtccaaagggtaattactctcgtttcatgaaccattcatgcaaccccaattgtgaaactcagaaatggacagtcaacggggatgttcgggtgggtctcttcgccctgtgcgatattccagcaggaatggagctaacctttaattataacctcgactgtctggggaacggcagaacagagtgccactgcggcgcagacaattgcagcggatttctgggcgtgagacctaagagtgcctgtgctagcaccaacgaagaaaaggccaagaacgcaaaactgaagcagaagaggcggaagataaagaccgagccaaaacagatgcacgaagattattgttttcagtgtggcgacggtggcgagctagtcatgtgcgacaaaaaggactgccccaaggcatatcatctcctttgcctcaatctcacccagccaccttatgggaagtgggagtgtccttggcaccaatgtgacgaatgcagctcagctgccgtctccttctgcgaattctgcccacatagcttctgcaaggatcatgaaaaaggcgctcttgttccatctgctctcgagggcaggctgtgttgcagcgaacatgaccccatggccccagtgtctccggagtactggagcaaaataaaatgcaaatgggagtcccaggatcacggggaagaggtgaaagaatag

SEQ ID NO: 246948 - DNA, 4125 bp, synthetic construct
  misc_feature 1..4125: note = Description of Artificial Sequence: Synthetic coding sequence
  source 1..4125: mol_type = other DNA
atggatttcagctttagctttatgcaaggaattatgggcaataccattcagcagcccccacagcttattgattctgccaatatccggcaggaggatgccttcgataacaactctgatatcgctgaggatgggggacaaactccctatgaggccacactgcagcagggtttccagtatcccgctactactgaagatttaccacccctacctccaccacctccctccgtccctcaaaccgtgatacccaagaaaaccgggtcacccgagataaagcttaagatcactaaaactattcagaacggaagggagctatttgaaagcagcttgtgcggcgatctgctaaatgaggtgcaggcaagcgagcacactaagtccaagcacgaaagcagaaaagaaaaacgcaaaaaatctaataaacatgacagttcaagatctgaggagagaaagtctcataagattcccaagctggaacctgaagaacagaaccgtccgaacgagagggtggatacagttagcgaaaagccaagggaagaacccgtcttgaaagaggaggctcccgttcaacctatcctcagctcagtgcctacgactgaggtgtctacaggtgtgaaattccaggtaggagatctggtttggagtaaggtcgggacctacccctggtggccctgtatggtcagctccgatccacagctggaagtgcatactaagatcaatacaagaggtgcccgtgagtatcatgttcagttcttctccaatcagccagaaagagcctgggtgcacgagaaacgagttagagagtataagggccacaagcagtacgaggagttactagccgaggccacaaaacaagcaagcaaccacagcgagaaacagaaaattcggaagcccaggccccagagagagcgagctcaatgggatattgggatcgcacacgcggaaaaggccctcaagatgacaagagaggagcggatagagcaatacactttcatctacatcgacaagcagccagaagaagctctatctcaggcgaagaagagtgttgcaagcaaaaccgaggtgaaaaagacccgcagaccccgttctgtcttgaacacacagcccgagcagactaacgccggagaggtcgcaagctccttgtctagcacagagatccggcgacactctcagaggcggcacacgtctgccgaagaagaagaaccaccgccagttaagatcgcctggaagaccgcagcagcccgaaagtcccttccggcttctatcacaatgcacaaagggagtctggaccttcaaaaatgtaacatgagccctgtcgtgaagatcgagcaggtgtttgcgttgcagaatgccacgggggatggtaagtttatagatcagtttgtgtactctaccaaggggatagggaataagactgaaatcagtgtacggggacaggaccgcctcattatctctaccccgaaccagcgcaacgagaaacccacccaaagcgtgtcttcgcctgaagccacgagtggatccaccgggagtgtggagaagaaacagcagcgtcgctcaatccgaacacgttcagaatctgaaaaatctactgaggtcgtgccaaaaaagaagatcaaaaaggaacaggtcgagaccgttccgcaggcaactgtaaaaacagggctccagaagggcgcttctgaaattagtgacagctgtaagccgctcaagaaacgtagccgcgcatcaactgacgtcgaaatgacgagtagcgcttacagagacacctctgacagcgactcacgaggattgtccgatcttcaggtgggcttcggaaaacaggtcgatagtcccagtgccacagcagatgctgacgtgagcgatgtccagtccatggacagctctttaagtagaaggggcactggtatgtccaaaaaggacaccgtgtgtcagatttgcgagagctctggggattccctgatcccttgcgagggcgaatgttgcaaacattttcatctggagtgcctcggactcgctagtcttccagattctaaatttatctgcatggaatgcaagacggggcagcatccctgcttttcctgcaaggtctccgggaaggacgtaaaaaggtgctctgtgggcgcatgcgggaaattttatcatgaggcctgtgtgcggaaattcccaacagccattttcgaaagcaaagggttcaggtgtccacagcactgctgctctgcctgctctatggaaaaggacattcataaagcttcgaagggccgaatgatgagatgcttacgttgtcctgtggcttaccactcgggagacgcctgcattgccgctggcagcatgcttgtgtcttcttatattctcatctgttcgaaccactccaagcgctcctctaactcctctgccgtgaatgtaggcttctgcttcgtgtgcgctagaggactgatcgttcaggatcattcggacccaatgttcagttcttatgcatacaagtcccactatctgttaaacgagtcgaaccgcgctgaactgatgaagcttcctatgataccgtcttccagcgcatctaaaaaaaaatgtgagaaaggcggaagactactgtgctgtgaatcatgtccagcgagttttcatcctgagtgcctcagcattgagatgcctgagggctgttggaattgcaatgactgtaaggctgggaagaagctccactacaaacagattgtatgggtgaagcttggcaattaccgctggtggcccgctgagatctgcaaccccagatctgtgcccttgaatattcaaggcctcaaacatgatctgggggactttcccgtgttcttttttggctctcatgactattactgggtccaccaaggacgggtatttccatacgtggagggcgataagagtttcgctgaaggccagacgtccataaacaagacctttaaaaaagcactggaggaagccgctaagcggtttcaggaactcaaagcacagcgcgaatcaaaagaagctcttgagattgaaaaaaatagccggaaaccgcctccatataagcatatcaaagccaataaggttattggaaaggttcagatacaggttgcagatctatctgagatcccacggtgcaattgcaaacccgcagacgagaacccctgcggcctggagagcgagtgcctgaacaggatgctgcaatacgagtgtcacccgcaggtgtgtcccgcaggagatcgctgtcagaatcagtgttttactaagagactgtatcccgatgctgaaatcattaagacggaacgcaggggatggggcctccgtaccaagcgatctataaaaaagggtgaatttgtcaatgaatacgtgggcgagctcatcgatgaggaggagtgtcgcttgcgcataaaaagagcgcacgaaaactctgttacaaacttctatatgctcacagtgacaaaggaccgcatcatcgacgccggacctaaaggcaactattcacgatttatgaaccactcttgtaatcctaactgcgaaacccagaagtggacagttaacggagacgtaagggttggtctgttcgccttgtgcgacatccccgcagggatggagttaacctttaattacaacctggattgtctgggtaacggcaggacggagtgccactgtggggcagacaattgctcagggtttcttggtgtgcgcccaaagagcgcctgtgcctccaccaatgaggagaaggccaaaaatgccaagttgaaacagaaaagaaggaagattaaaacagagcctaagcagatgcatgaagactattgcttccagtgtggcgatggaggcgaactcgtcatgtgcgataagaaagactgtcctaaagcctatcatctcctgtgtctgaatcttacccaacctccatatggaaagtgggaatgcccctggcaccagtgcgatgagtgcagttccgcagccgtgtctttttgcgagttctgtccccacagtttctgcaaagatcacgaaaaaggcgctcttgtaccatctgcactcgagggcaggctgtgttgtagtgaacatgatccaatggcaccggtgtctcccgaatactggtccaaaattaaatgcaagtgggaatctcaggaccacggagaagaggtaaaggagtag

SEQ ID NO: 246949 - DNA, 4281 bp, synthetic construct
  misc_feature 1..4281: note = Description of Artificial Sequence: Synthetic coding sequence
  source 1..4281: mol_type = other DNA
atggacttctccttttcatttatgcagggcatcatgggcaacacgatacaacaaccaccacagctgattgatagcgctaacatcagacaggaggacgccttcgataataactctgacatcgctgaggatggtggtcagaccccctacgaggctacgttgcagcagggatttcaatatccagccaccacagaggatctgcctccgctgaccaacggctacccgagctctatatccgtttacgaaacacaaacaaagtaccagtcttacaatcagtaccctaatgggtcagccaatgggttcggggctgtcaggaatttctctcctactgattattaccattccgaaataccaaacaccagaccccatgagattctggagaagccgtcacctcctcagcccccaccacccccttcagtcccccagactgtgatccctaagaaaactggttccccagagatcaagttgaaaataaccaagaccatccaaaacggtcgggaattgtttgagagctccttatgcggcgaccttctgaacgaggttcaggcatcggagcacacaaaatccaagcacgagagccggaaggagaagcggaaaaagtccaataaacacgattccagcaggtccgaggaacgaaaaagccacaagattcctaagcttgagccagaagagcagaatcgccctaatgagcgcgtcgataccgtgagcgaaaagcccagggaggaaccagtgctgaaggaggaggcgcctgttcaaccaatcctcagttccgtgcccactaccgaagtatctaccggagtaaagttccaagttggggaccttgtctggtcaaaagtggggacctacccctggtggccctgcatggtgagttctgatcctcagttagaagtccacaccaaaattaacacaaggggggcaagagaatatcatgtccagttcttcagtaaccagccggaacgcgcatgggttcacgagaaacgcgtgagagaatacaaagggcacaaacaatatgaggaactcctggctgaggcaacaaagcaagccagtaaccactcggagaagcaaaagattcggaagcccaggccacagagagagcgggctcagtgggacatagggattgctcatgcagagaaggccctgaagatgacaagagaagagcgaatcgaacagtatacctttatttacattgataagcagccagaggaggccttaagccaggcaaagaagagcgtggctagcaagaccgaggtcaagaaaacacggagacccagaagcgtcttaaatactcagcccgagcagacaaatgcgggagaggtggcttcttcgctaagcagcaccgagattaggaggcactcacagagaaggcacacttcagccgaagaggaagagccacctcccgtcaagattgcatggaaaactgccgcagccagaaaatctcttccagcctccataacaatgcacaagggcagcctcgatcttcagaaatgcaacatgagcccagtcgtgaaaatagaacaggtgtttgctctgcagaacgcaaccggagacgggaaatttattgatcaattcgtgtatagtactaaggggatcgggaacaagaccgaaattagcgtgagaggacaggatcggttaatcatcagtactcctaaccaaagaaacgagaaaccaactcaatccgtgagttcaccagaagcgaccagcgggtccacggggtccgtcgagaagaaacagcagcggaggtccattcgcactcgttccgaaagcgagaaatctacagaggtcgtgccaaagaagaagataaaaaaggaacaggtcgaaaccgtccctcaagcgactgtgaaaactggcctgcagaagggtgcatctgagatttccgactcttgtaaacctttaaaaaagagatcccgagcttccactgatgtggaaatgactagctctgcctatcgagatacaagcgattctgacagccgtggtctctccgatttacaggtgggctttggaaagcaggtggattctccatcagctaccgctgacgcagatgtgtctgatgtgcagtctatggactccagtctgtctcgaagaggcacaggcatgtctaagaaggacacagtctgccagatttgcgagtcctctggggactccttaatcccatgtgagggcgagtgctgtaaacacttccacttagagtgcctgggcctggcatctctccctgactcaaaattcatctgcatggagtgtaaaaccggtcaacatccctgcttttcctgcaaggtgtctggcaaggacgttaaacgctgttctgtgggtgcctgcggcaagttctatcacgaggcctgtgtgcgaaagttcccgacagctattttcgagtctaagggttttagatgcccacagcattgctgttctgcatgtagcatggagaaagatatacacaaggcaagtaagggaagaatgatgcgatgtctcaggtgtcccgtcgcataccactcaggagacgcctgtatcgccgctgggtccatgctggttagctcgtatatcctgatctgttccaatcactctaagcgttccagtaatagtagcgctgtcaacgtgggattctgttttgtgtgcgctaggggcctcatcgtccaggaccacagtgatcctatgtttagctcttacgcttacaaatctcactacctcctcaatgaatccaaccgtgccgagctgatgaagctgccgatgatcccctcaagctcagcgtccaaaaagaagtgcgagaagggcggaagattattatgttgcgaatcgtgccctgccagcttccacccagaatgcctgagcattgagatgcccgaagggtgctggaactgtaatgattgcaaagctggtaaaaaactacactacaaacagattgtctgggtgaagttgggaaattaccgctggtggcccgctgaaatctgtaatcccagatccgtaccgcttaatattcagggtctcaagcatgatctcggcgacttccccgtgtttttctttggcagccatgattactactgggtgcatcagggtagagtattcccctacgtggaaggagataagagcttcgccgaaggccaaacctcaattaacaaaacatttaagaaggcacttgaggaagcagctaagcgctttcaggagctgaaagctcagagggagtcgaaagaggctctggagatcgagaaaaactcgcgaaaaccccctccgtacaaacatatcaaggctaacaaggtgatcggtaaagttcagattcaggttgcagatttgagcgaaattccaagatgcaattgcaagcctgcggacgagaacccttgcggattggagagtgaatgtctcaaccggatgctccagtacgagtgccatccacaggtatgtccagccggagatagatgtcagaatcagtgcttcactaagcgtctttatccggatgccgagatcattaaaacagagagaagggggtggggcctccgtaccaaacgcagcattaaaaagggggaattcgtgaatgagtatgtcggcgaattaatagacgaggaagagtgtcggttgcggatcaaaagagcccatgagaattccgacaggataattgatgccggacccaaaggtaactactccaggttcatgaatcactcttgcaatcccaactgcgagacccagaaatggaccgtgaacggggacgttcgagtaggactctttgcactttgcgacatccctgccggaatggagttaacattcaattataatctggactgcctggggaacggcagaactgagtgtcattgcggggcagacaattgctctgggttccttggtgttagacccaagagtgcctgcgcgtctaccaacgaggaaaaggccaagaacgcgaaactgaagcagaagcggagaaaaattaagactgaacccaagcagatgcacgaggactactgcttccaatgcggggatgggggagaactcgtaatgtgtgacaaaaaggactgtcctaaggcctatcatctcctgtgtctgaatcttacccagcctccatatggcaaatgggaatgtccatggcatcagtgtgatgagtgtagcagcgccgcagttagcttttgtgaattttgtcctcactccttttgcaaggatcatgaaaaaggcgcactcgtgccgagtgcactggaaggaaggttgtgttgttccgaacatgaccccatggcccctgtctctcccgaatactggagtaagatcaaatgcaagtgggagtctcaggatcatggggaggaggtgaaagagtag

SEQ ID NO: 246950 - DNA, 849 bp, synthetic construct
  misc_feature 1..849: note = Description of Artificial Sequence: Synthetic coding sequence
  source 1..849: mol_type = other DNA
atggatttctcatttagctttatgcaaggtataatgggcaataccattcagcagccccctcagctgattgacagcgctaatatcagacaagaagatgcattcgataacaattctgacattgcagaagatggcggacagaccccatatgaagcaacactgcaacagggctttcagtatcccgcaaccacagaagatctgccccctctcacaaacgggtacccatcctccattagtgtgtatgagacgcagacaaagtaccagtcctacaaccaatacccaaatggatctgcaaatggcttcggagcagtgcgaaatttcagccccacagactactatcactcagagataccaaacacacgccctcatgagatactggagaaaccgagccctccccaacctccaccccctccctctgttcctcagaccgtgattcccaagaaaacggggtcccccgaaataaagctcaagatcactaaaaccattcagaatggtagagagttgtttgaatcatcgttatgcggggatctcctgaatgaagtccaagccagcgagcacactaaatctaagcacgagtccaggaaggaaaagcgtaaaaaatcaaacaaacatgactcatccaggtctgaagagcgaaaaagtcacaagatcccaaagttggagccagaagagcaaaatagaccgaacgagagggtcgacaccgtgtccgagaagcctagagaagaacccgtgctgaaagaggaagcccctgtccagcctatcttgagcagcgtgccaaccactgaggtgagtaccggtgtgaagttccaagtgggagacttggtgtggtctaaagtcgggacatatccctag

SEQ ID NO: 246951 - DNA, 78 bp, synthetic construct
  misc_feature 1..78: note = Description of Artificial Sequence: Synthetic coding sequence
  source 1..78: mol_type = other DNA
atggactttagcttcagctttatgcagggcataatgggaaataccattcagcagcccccacagctgatcgactcttag

SEQ ID NO: 246952 - DNA, 48 bp, synthetic construct
  misc_feature 1..48: note = Description of Artificial Sequence: Synthetic coding sequence
  source 1..48: mol_type = other DNA
atggatttcagcttctcgtttatgcagggaattatggggaacacctag

SEQ ID NO: 246953 - DNA, 1620 bp, synthetic construct
  misc_feature 1..1620: note = Description of Artificial Sequence: Synthetic coding sequence
  source 1..1620: mol_type = other DNA
atgccgggacagaggagagcactgtcaccaaaaatggcttctatgcgagagagcgacactgggctgtggctgcataacaaattgggggcaaccgatgagctgtgggccccaccttccatcgcgtcactccttaccgccgctgtgatcgataatattaggctgtgctttcacggtctgtcctcggccgtcaaattaaagctgctgctaggaaccctccatctgccacgtcggactgtggacgaaatgaaaggtgccctcatggagattattcaactggcatccctagattcagatccatgggtgctgatggtggccgacatcctgaaaagcttcccagacacaggctctctgaacctcgagctggaggaacagaacccgaacgtccaagacattctcggtgagctacgagagaaggtcggagagtgtgaggcctcagcaatgctgccactggagtgtcagtacttaaataaaaacgctctgacgacactggctggtccgttaacccctccggtgaagcacttccagttgaaacggaaacctaagagtgccacacttcgggcagaactgctccagaagtctactgaaactgcccagcagcttaaaaggagcgcaggcgttccatttcatgcaaaggggcgaggcctactgagaaaaatggataccaccactcctctcaaggggattcccaagcaggccccttttagatcccccacagccccatctgtttttagtcctaccggtaaccgcacacctatacctccttctagaacgctgctccgcaaagaaaggggggtgaaactcctcgatattagcgagctagacatggtgggggctgggagagaagccaagcgacgcaggaagactctcgacgctgaagttgttgagaagccagccaaggaggagactgtggtggagaacgccacacccgattatgcagcaggtctcgtcagtacacagaagcttggatccctgaataatgagccggctctgccaagtacgtcttatctccccagcacgcccagcgtagttcccgcaagttcctatatccctagttcagagactcccccagcccctagctcacgcgaagcttcacgccctccagaggaacccagcgcacctagccctacactgcccgctcagttcaaacagcgggcacctatgtacaactcggggctttctcccgcaactccaacccctgctgctccaaccagtcctctgacccctacaacgccccctgccgtcgctcctactacccagaccccacctgtcgcaatggttgcccctcagacccaggctcctgcgcaacagcagcccaaaaaaaacctctcattgacgagagagcaaatgttcgcagcccaggaaatgtttaagaccgcgaataaagtcactcgccctgagaaagcactgatacttgggtttatggccggttcacgggaaaatccttgccaagagcagggtgatgtcattcagattaagctgagcgagcatacagaggacctccccaaggcagacggacagggcagtacaactatgctggttgacacagtgttcgagatgaattacgccaccgggcagtggaccaggttcaagaagtacaagcccatgacgaacgtgtcttag

SEQ ID NO: 246954 - DNA, 1587 bp, synthetic construct
  misc_feature 1..1587: note = Description of Artificial Sequence: Synthetic coding sequence
  source 1..1587: mol_type = other DNA
atggcctctatgagagagagtgatactggcttgtggcttcacaataagctgggagccacagatgaactctgggcgccaccgagtatagccagtttgctgaccgccgctgtcatcgataacattcggctctgcttccatggattgtccagcgcagtcaaactgaaacttcttctcggcaccctgcatctgcctcgcagaaccgtggacgagatgaaaggagcgttgatggagataattcaacttgcatccctggactccgatccatgggtgctcatggtggcggacatcctgaaatcctttcccgataccggctccctgaacctcgaacttgaggaacagaacccgaacgtccaggacattcttggcgagttgcgggagaaggtcggagagtgcgaggcttccgcgatgctgccactagagtgccaatatctcaataagaacgcgctaaccactctcgccggacccctcacaccccctgttaagcacttccagctgaagcgcaaaccgaagagtgccacactgcgcgcagaattgctgcagaagagcaccgagactgcccagcagttgaagcgctccgccggtgtcccctttcacgccaaagggagaggactcctgcgcaagatggatactacaacaccactcaaaggcataccgaagcaagctccctttaggagtcctacggctcccagtgttttctccccaacaggaaatagaacaccgatcccccctagcagaacgttactaagaaaggagcgcggagtgaagttgctggatatttctgagctcgatatggtgggcgcaggcagggaagctaagcggagacgaaaaacattagacgctgaggttgttgaaaaacctgccaaagaggagactgttgtggagaatgccactcccgactatgccgctgggctagtctcaacacagaaactcggctctttaaataacgagccggctttgccctctacgtcctatctgccaagcacccccagcgtagtgcctgcttcttcatacatcccgtcaagcgagacacccccagccccttcttctcgggaggcgagtagacctcctgaagaaccttctgcaccttctcctactttgccagctcagttcaagcagcgcgcacctatgtacaactcaggactctcaccagcaacccctactcccgcagcccctacctcacccttaaccccaactacaccgcctgctgtggccccaacaacccagacccctcctgtagcgatggtggcacctcagactcaggctcctgcccagcaacagcccaaaaaaaatctgagccttacgcgcgagcagatgttcgccgcacaggagatgttcaagacggctaataaggttacaaggccagagaaagcccttatcctgggctttatggcagggtccagagagaacccttgccaggagcaaggcgatgttattcagatcaagctcagcgaacacacggaggatctccccaaagctgatgggcaggggagcactaccatgctggtcgacactgtgtttgaaatgaattatgctaccggccagtggacaagattcaagaaatacaagcccatgacaaacgtcagttag

SEQ ID NO: 246955 - DNA, 1182 bp, synthetic construct
  misc_feature 1..1182: note = Description of Artificial Sequence: Synthetic coding sequence
  source 1..1182: mol_type = other DNA
atgctccccctagagtgtcagtacttaaacaagaacgcacttactaccctggcgggtccactcacgccccctgtcaaacattttcagctcaagaggaaacctaaatcagccaccttgagggccgagctgctgcaaaaaagcaccgaaactgcccagcaattgaagcggagcgctggggttcccttccacgccaagggcaggggcctcctgaggaagatggatacaacgaccccacttaaggggattcctaagcaggccccttttaggagccctaccgctccttccgtcttttcacccaccgggaaccggacgcctatcccaccctccagaaccttactcaggaaggaaaggggtgtgaagctactcgatattagcgagctggacatggtgggagccggaagagaggccaaaaggaggagaaaaacactcgacgctgaggtggtggaaaaacccgcaaaagaagaaactgtcgttgagaatgcgacccccgattacgcagctgggcttgtctcaacccagaagctgggctcactaaacaacgagcctgcactgcctagcaccagctacctccccagcactccctcagtagttcctgcgtcctcgtatatcccctcaagcgaaacccccccagccccttcatcccgcgaggcatcacggcctcccgaggaaccgtcagcaccatctcctacactgccagcacagtttaagcagcgcgctccgatgtataacagtggcctttctccagccacccccactccggctgcacccacctctcccctgaccccgaccacaccacccgctgtcgcccctaccacccagacaccaccagttgctatggtggcaccacagacgcaagctcccgcacagcaacagcccaagaagaacctttctctgacaagagaacagatgtttgctgcacaggaaatgttcaaaacagccaataaagttacacgcccagagaaggcactgatcctgggatttatggcgggatcacgtgagaacccctgtcaggaacagggcgacgtgatacaaatcaaactctctgagcatacagaggatttacccaaggccgacggccaaggcagtaccacaatgttggtggacacagtgttcgagatgaactacgccactggacagtggacgagattcaagaagtataaacctatgacaaatgtatcatag

SEQ ID NO: 246956 - DNA, 462 bp, synthetic construct
  misc_feature 1..462: note = Description of Artificial Sequence: Synthetic coding sequence
  source 1..462: mol_type = other DNA
atgtatagaatgcaacttctatcatgcatcgccctatctttggcactggtaacaaattccgctcccacctcgtcctctactaaaaagacccaacttcagcttgagcacctcctgctggatcttcagatgatcctcaatggaatcaacaactacaagaatcctaaattaacgaggatgttaacgtttaaattctacatgccaaagaaagccaccgagctgaaacatctacaatgtcttgaagaagaactgaagccactggaagaagtgttaaacctggctcagtctaagaacttccatttgaggccgagggatttgattagcaatataaatgttatcgtgctggagcttaaggggagtgagaccacattcatgtgcgagtatgcagacgaaactgcgactatagtggaattcctgaacaggtggataactttttgtcagagcatcatctccaccttgacttag

SEQ ID NO: 246957 - DNA, 2673 bp, synthetic construct
  misc_feature 1..2673: note = Description of Artificial Sequence: Synthetic coding sequence
  source 1..2673: mol_type = other DNA
atggatagcaataccgctccacttgggccaagctgcccccagcctcctccagcccctcaaccacaggctaggtctagactaaacgctacggccagtcttgaacaggagaggagtgagcggcctcgggcacccggtcctcaggcgggacctggccctggggtgagggacgccgcagctccagcggagccacaggcacaacacactcgctcgagggaaagggcagacggaaccggacccaccaaaggcgacatggagatccccttcgaggaagtactagaaagggcaaaggcaggggatcccaaagcccagacagaggtaggaaagcactacctgcagctagcgggagatactgacgaggaactgaatagttgtacggctgtggactggctggtgctggcagcaaagcagggcagaagagaagcggtgaagctactgagacggtgtctggctgaccggcgtggtattacctctgaaaatgagagggaggtgcgccagctgtctagcgagacagaccttgagcgggctgtaaggaaagctgcactcgttatgtactggaagctgaaccccaagaaaaaaaaacaagtggccgtagccgagcttttggaaaatgttggccaagtgaacgagcatgacggcggagctcagccaggccctgtgccaaagtccctccagaaacagaggcgtatgctagagaggttagtgtcgtcagagtcaaagaattacattgcgctcgatgatttcgtggaaattacaaaaaagtatgccaagggggtcataccatcatctctcttcctgcaggacgacgaggacgatgacgaattggcagggaagagccccgaggacctgcccctccggctcaaagtagtaaaatacccgctgcacgccatcatggaaattaaggaatacctgatcgacatggcttccagggccggaatgcactggctgtcaaccataattccaacccaccacataaacgcactaatttttttctttatagtgtcaaatttgactattgacttttttgccttttttatacctcttgtgatcttttatctgtctttcatctctatggtgatatgtaccctgaaggtgtttcaggactcaaaggcctgggaaaactttcggacccttaccgacctcctccttagatttgaacctaacttagacgtcgaacaggcggaggttaacttcggttggaaccatctggaaccttacgctcacttccttttgtctgtcttctttgtgatattttcgtttccgattgcctccaaggactgtataccttgctcagagttggccgtgatcactggctttttcaccgtgacctcctatctgagcctatccacccacgccgaaccctacacaaggagggcattagccacagaggtcaccgcagggttactctccctcctgcccagtatgccactgaattggccgtacctgaaagtgctggggcagaccttcattacggttccagtcggacacctagtggtacttaacgtctccgtgccttgtctgctgtatgtctaccttctgtacttgttcttccgcatggcacaattgcgcaacttcaaaggaacttactgctatctggttccatatctcgtatgctttatgtggtgcgaactgtctgtggtaattcttttagaatccactggacttggcttgctgagggcctccataggctatttcctatttctgtttgccttgcccatactggtcgctgggctcgcgctcgtgggagtcttacagttcgctcgatggttcacctccctggagctaactaagattgctgtgacagtagcagtttgttctgtgcccctgcttctccggtggtggactaaagcatcattctcagttgtcggtatggtgaagtcccttactcggtcaagcatggtcaaactcatcctcgtctggctgacggcaatcgtcctgttttgttggttttatgtgtacagaagtgaaggcatgaaggtgtacaactctacacttacttggcaacagtatggggctctctgcgggcctcgagcgtggaaagaaactaacatggccaggactcagatcctgtgctcccatcttgaaggtcacagggtgacatggacaggaaggtttaagtacgtccgagtcacagacatcgacaattcagcggaatcggccattaacatgcttccattctttatcggagattggatgcgctgtctgtatggtgaggcctatcccgcatgctcacctggaaacacgtccaccgccgaagaggagctttgccgactcaaattgctggccaaacatccgtgtcacatcaaaaaatttgaccgctacaaattcgaaattacggttggaatgccgttcagctccggcgctgatggctcaagaagccgggaagaagacgacgttaccaaagacatcgtattgcgggctagttctgaattcaaaagcgtgctgctttccctgcgacaggggagtctcatagagttcagcaccatcttagagggcagacttggcagtaaatggcctgtgtttgagttaaaggctatttcctgtctgaactgtatggcccagttgagtcccaccagaaggcatgtcaagatcgaacacgactggcggagcaccgttcacggggctgttaaatttgctttcgacttcttcttctttccatttttgtctgcagcatag

SEQ ID NO: 246958 - DNA, 807 bp, synthetic construct
  misc_feature 1..807: note = Description of Artificial Sequence: Synthetic coding sequence
  source 1..807: mol_type = other DNA
atggttaaatccttaacccgctcctccatggtcaaattgattcttgtatggttgactgctattgtgttgttctgttggttctacgtctaccggtcggaaggcatgaaagtctataattcaacccttacatggcagcaatacggggctctctgcggcccaagggcttggaaagagactaacatggcaagaacgcagatcctttgctcacacctcgaagggcatcgggtaacctggaccggcagattcaaatatgtccgcgtgactgacatcgacaactccgccgaatcagcaatcaacatgttaccattttttatcggggactggatgaggtgcctttatggcgaagcatatcctgcttgctctccaggaaacacatcgaccgccgaagaagagctgtgccgcctgaagttattagccaagcatccctgccacataaaaaagttcgatcgttataagtttgagattacagtgggtatgccattcagctcaggagccgatggtagcagatcaagagaagaggatgatgtcactaaggatatagtgctccgggcatcatcagaattcaaatccgtgttactctcacttaggcaggggtctttgattgaattctccaccattctagagggaagactggggtcaaaatggcccgtgtttgagctgaaggcgataagctgcctgaattgcatggctcaactcagccccactcggagacacgtgaaaattgagcacgattggcggtcaaccgtgcatggcgctgtcaagtttgcatttgacttcttcttcttcccattcctgtccgccgcttag

SEQ ID NO: 246959 - DNA, 3342 bp, synthetic construct
  misc_feature 1..3342: note = Description of Artificial Sequence: Synthetic coding sequence
  source 1..3342: mol_type = other DNA
atgcctagaccagagctccccttgcctgagggctgggaggaggcacgggatttcgatggcaaggtttattatattgaccacacgaatcgcaccacatcctggattgatcccagggatcgatataccaaaccactcacattcgctgactgtatttccgacgaattaccgctgggatgggaagaagcatacgatccacaggtcggggattacttcattgatcacaacactaagaccacacagattgaggaccccagggtccagtggcgacgggagcaggaacatatgttaaaggattatttggttgtcgcccaagaggccctgtctgcccagaaggaaatctatcaggtcaaacaacagaggcttgagctcgctcagcaggagtaccagcaactacacgccgtgtgggagcataagctgggaagccaggtgtccttggtatcagggtcctcatcaagtagcaagtacgaccccgaaattttgaaggccgaaattgccacagccaagagtcgcgtcaacaagcttaagagagaaatggtccacctgcagcacgagcttcagtttaaagagcgcggtttccagactttaaagaagattgacaaaaagatgagcgacgcacaggggtcctataagttggacgaagcccaggccgtgctgagggaaaccaaggcaatcaagaaagccatcacctgtggcgagaaagaaaagcaggatttgattaagagcctggccatgctgaaggatggctttagaaccgatcgcggtagccacagcgacctgtggtcctcaagcagcagcctggaatcctcctcatttcccctgcccaagcagtacttggacgttagctcccagactgatataagcggctcgtttggcatcaatagcaataatcagttagccgagaaggttagactccggctccggtatgaagaagcaaaaaggagaatcgccaacctcaagattcagctggctaagctggatagtgaggcttggcctggagttctggactccgaacgagaccgactgatccttatcaacgagaaagaagagctgctcaaagagatgcgattcatatctccaaggaaatggactcagggagaagtggagcagctagagatggccagaaaacgactcgagaaagaccttcaagcggctagagacactcagtcaaaagccctgaccgagagattaaagttgaattccaaaaggaatcaattggtccgtgaacttgaagaggcgaccaggcaggtggcgacactccattcacaattgaagtccctctcctctagtatgcagagcctcagcagcggaagcagcccaggatccctgacaagtagtcgcggttcgctggtggctagttccctggatagctccactagcgcttcatttaccgatctctattacgacccgtttgagcagctggatagtgagctccagtccaaagtcgaattcctccttctagaaggggctactgggtttcgtccgagcggctgcatcactacaattcacgaggatgaggtcgccaaaacacagaaagccgagggcggaggacggctgcaggctcttagaagcttatccggtacaccaaaaagcatgaccagtctgagcccacgctctagcttaagttctccatcacctccctgcagtcctctaatggcagaccctctgttggctggcgacgcttttttgaactctttggagtttgaagaccctgaattgtccgccactctttgtgagctgagcctggggaactctgcgcaggagcggtatcgtctggaagaaccgggtaccgaaggaaaacagctagggcaggcagtgaacacggcacagggctgcggacttaaagtggcctgtgtctctgccgctgtgtcagatgagtccgtggcaggcgattcaggagtgtatgaagcctccgtacagaggctcggtgcttcagaggcagcagcctttgactccgatgagtctgaagctgtgggcgctactcggatacagattgctttgaaatacgatgagaaaaacaaacaatttgcaattctgataattcagctgtccaacctatcggcgttactgcaacagcaagatcagaaagtcaacattagagttgcggtcctgccttgttccgagagcaccacttgtctgtttcggacacgccctcttgacgcatctgacaccctcgtgttcaacgaggtgttctgggttagtatgtcctaccccgctctgcaccagaagaccctgcgtgtggacgtatgtaccaccgacaggtcacacctggaggaatgtctcggaggagcccagatttcccttgccgaagtatgccggagcggtgaacgatccacccgctggtacaacctactttcatataagtatctcaaaaaacagagtcgagagctgaaacctgttggagttatggcaccggctagcgggccagcgtccacggacgctgtctcagccctgttggagcagactgccgtggaactggaaaagcgccaggaaggtagaagctccacccaaaccctagaagattcctggagatatgaagagacctccgagaatgaagcagtggcggaggaagaggaggaggaagtggaggaagaggaaggggaagaggacgtcttcactgaaaaggctagtccggatatggacggctaccctgcccttaaagtcgacaaggaaaccaacactgaaactccagccccatctccaactgtagtcagacctaaagacagacgcgtggggaccccatcccagggtccttttctacgcggaagtacaattatcaggagcaaaacttttagccccggtcctcagagtcagtacgtgtgtagacttaacaggagtgatagcgactcctccaccctgagtaagaaaccgccatttgtgaggaactctctggagcgccgatcagtgaggatgaaacgcccatcaagtgtgaaatccctgcgctccgaacggctgatcaggacatccctcgacctggaattggatttacaggcaaccagaacatggcactcccagctcacccaagaaatctcagttttgaaggaactgaaagagcagctggagcaggccaagagccatggcgaaaaggagctgcctcagtggctcagagaggatgaaaggttccgcctgctcctgaggatgctggagaaaagacagatggacagggccgagcataaaggcgagctccaaactgataagatgatgagagcagccgctaaggatgttcaccgcctccgcggtcagagttgtaaggagcctcctgaagtgcagtcatttcgagagaaaatggcattcttcactcgccctcgaatgaacatacccgcattaagcgccgacgacgtgtag

SEQ ID NO: 246960 - DNA, 3360 bp, synthetic construct
  misc_feature 1..3360: note = Description of Artificial Sequence: Synthetic coding sequence
  source 1..3360: mol_type = other DNA
atgccacgccctgagctgcctcttccagaagggtgggaagaggctcgagatttcgacggcaaggtctactacattgaccacaccaaccgcactacttcttggattgacccaagagaccggtacactaagcccttgaccttcgctgactgcatatctgacgagctgccgctgggctgggaagaagcttatgatcctcaggtgggagattacttcattgatcataacaccaagactacccaaatcgaggaccccagggtgcagtggcgaagggagcaggaacatatgctcaaggactacttagtggtcgcgcaggaagccttgtcagcacaaaaggagatatatcaagttaaacagcaaagactggagctcgctcagcaggaatatcagcagctgcacgcagtgtgggaacataaactggggagtcaggtgagcttggtgtccggcagttcatcttcgagcaaatacgaccccgaaatcctgaaagctgagatcgccactgctaaaagcagagtgaacaagctcaagagagaaatggtgcaccttcagcatgaactccagtttaaggaaagaggctttcaaaccttaaagaagattgacaaaaagatgtccgacgcccaggggtcatataagctggacgaggcacaggcggtgctgagggaaactaaggcgattaaaaaagccattacatgtggggagaaggagaaacaagacttgatcaagtcgctagctatgttaaaggatggctttcggactgatagagggtcacattcggacttgtggagcagtagtagttcattggagagctcttcatttcccctgcccaaacagtacctggatgtttcaagccagaccgacattagcgggagtttcggaataaactcaaacaaccagctagcagaaaaggttagactgagattgcggtatgaggaggccaaaaggcgcattgccaacctgaagatccagcttgcaaagttagatagtgaggcctggccgggagttctcgactctgagcgagacaggcttatcctgattaacgagaaggaagaattgcttaaggaaatgcggttcattagtcccaggaaatggacgcagggagaggtggaacaattggagatggcccgaaaaaggttagagaaggatctccaggccgctagggatactcaatctaaggcgctgaccgagcgcttaaagttgaacagcaaacgcaaccagttggtgcgcgaactggaagaagcgactaggcaggttgctacgttgcacagccagctcaaaagcctatcttccagcatgcaaagtctgagcagtggaagcagcccgggatcactcaccagctcaagaggtagcttggtcgcgtccagcctcgactcaagcaccagtgccagtttcactgatctttactacgacccattcgagcaactggattccgaactgcagtctaaagtggaattcctcctcctagaaggcgctaccgggtttcgacccagtggctgcattacaacgatccatgaagacgaggtcgccaagacacagaaggcggaggggggtggtcgtctccaggctctcagatctcttagcggcacccctaaaagcatgactagccttagcccccgttcgagcctatcatcaccatctcctccctgctcacctctcatggccgacccattgctggccggagatgcattcctaaactctctcgaatttgaagaccctgagttgtccgctactctttgtgagttgtccctgggtaatagcgcccaggaacgatatcgtctggaggaacccggaacggagggtaagcagctcggccaggcagtgaatacagcccagggatgtggcttaaaggtggcctgtgtgtctgccgctgtaagcgacgagtcagtggccggtgactctggggtttacgaagcctcagtgcagcgcctcggtgccagcgaggccgctgccttcgactcagatgagagcgaggccgtgggggctaccaggattcaaattgccctcaagtatgacgaaaaaaacaagcagtttgcaattttgattatacagctttcaaatctgagcgctctgcttcagcagcaagatcagaaggtaaacatccgggtagcggtgctgccatgtagtgagagtacaacttgcctctttcgcactagacccctagatgccagtgacaccttagtgtttaacgaggtgttttgggtgtccatgtcctaccctgcccttcaccagaagaccctgagagtggatgtgtgtaccacagatcgaagccatctagaagagtgcctaggtggtgcgcagatcagcttggctgaagtgtgtagaagcggcgaaaggagcacccgctggtacaacctgctgagttacaaatacctgaaaaagcagtcacgcgagttgaaacccgtcggcgtgatggccccagcttccggccctgcctccacggacgccgtgtctgctcttcttgaacaaacggcagtagaactggagaagcgccaggaaggtcgtagttctacgcagacgcttgaagacagctggcgttacgaggagacctctgagaatgaggctgtggccgaggaggaagaagaagaagtcgaagaggaggaaggagaggaggatgtgtttacggaaaaggcctcacctgatatggacggatatcccgcactaaaagttgacaaagaaacaaatacagagacccccgcaccaagccctaccgttgtcaggcctaaggatcgacgcgtaggaaccccaagtcagggcccatttctgaggggttcaacaataatacggtctaaaaccttttcacctgggccacagtctcagtatgtgtgtagactcaatcgctctgactctgactcatctaccttgtctaaaaaaccccctttcgtgcgcaatagtctggagcgtcggtccgttcgtatgaaaaggccctctccacccccacagccctcttcagttaaaagtttgcgttcagaacgcctcatacggacctcccttgatttggaactggacctccaggcaacacgaacatggcattcacaactcacgcaggagatctccgtcctgaaagaattgaaggagcagcttgaacaggccaaaagccacggtgaaaaggagcttcctcagtggctccgggaagatgaacgttttaggctcttgcttcggatgctcgagaagcgccagatggacagagccgaacacaagggtgagctacagaccgacaagatgatgagagctgctgccaaagatgtgcatcgcctccgtggacagtcctgtaaggagcccccagaggtccaatctttccgggaaaaaatggctttctttacaagaccaagaatgaatatcccagcgttgtctgccgatgatgtttag

SEQ ID NO: 246961 - DNA, 438 bp, synthetic construct
  misc_feature 1..438: note = Description of Artificial Sequence: Synthetic coding sequence
  source 1..438: mol_type = other DNA
atggcagaagtagagcagaaaaagaagagaacatttcgcaagttcacttatcggggtgtggacctggatcaactactggacatgagctatgagcagttgatgcaactctatagtgctcggcagcggaggagactgaataggggccttaggaggaagcaacactcccttttgaagaggctacgcaaagccaaaaaggaagctcctcccatggagaaacccgaggtcgtgaagacacatcttcgcgacatgatcattctgcctgagatggtcggaagcatggttggggtgtataacggaaaaacatttaaccaggttgaaattaagcccgaaatgattggccactacctgggagaattctcgattacatataaacccgttaagcacgggagacctgggatcggagccacccatagcagccgttttattcccctgaagtag

SEQ ID NO: 246962 - DNA, 786 bp, synthetic construct
  misc_feature 1..786: note = Description of Artificial Sequence: Synthetic coding sequence
  source 1..786: mol_type = other DNA
atggcactgaacaaaaatcattcggaaggcggaggcgttatagtgaacaacactgagtctatcctgatgagttacgaccacgtagagctcacatttaacgatatgaaaaacgtgccagaggccttcaaggggacaaagaaaggaaccgtctacctcacgccatatcgcgttatcttcttgagtaagggaaaggacgccatgcaatcctttatgatgccattctacttaatgaaggattgtgagattaaacagcctgtgttcggagctaattatatcaaaggcacagttaaagcagaggccggaggaggctgggaggggagtgcttcttacaaactgacattcacagcagggggtgccattgagtttggccagcgaatgctgcaggtcgcctcacaggcgagtagaggagaggttcctagcggcgcatatggatacagctatatgccgtctggggcatacgtgtatcccccacccgtggccaacggcatgtatccttgtcctccaggatacccttaccccccacctcccccagagttctaccccggaccaccgatgatggacggagctatgggatacgtccagccaccaccccctccctatcctggacccatggagccaccagtctctggaccagacgtgccttcaaccccggcagccgaggccaaggctgcggaagctgctgccagcgcctattataaccccggaaacccacataacgtgtacatgcctacgtctcagccccctccacctccgtactatcctcctgaggacaaaaagactcagtag

SEQ ID NO: 246963 - DNA, 720 bp, synthetic construct
  misc_feature 1..720: note = Description of Artificial Sequence: Synthetic coding sequence
  source 1..720: mol_type = other DNA
atgagttatgatcacgtggagctgactttcaacgacatgaagaatgtgcccgaggcatttaagggaacgaaaaaaggtaccgtttacctgactccctaccgggttatcttcctgagcaaaggaaaggatgccatgcagtcctttatgatgcctttctacttaatgaaggactgtgagattaagcagccagttttcggggctaactacataaaggggactgtgaaggccgaagcaggcggtggttgggagggatctgctagctacaagctgacctttacagctgggggtgctattgagtttggtcagagaatgctgcaagtcgcatcccaggcctcccggggtgaagtgccaagtggagcctatggttactcctatatgcctagcggggcttacgtgtatccaccccctgttgctaacgggatgtacccatgtccacctggttacccgtacccaccgcctccacccgagttctatcccggtcccccaatgatggacggtgccatgggatatgtgcaaccaccgcctcccccttatccgggacctatggagccacccgtgtccgggccagacgttccgagtacccctgctgccgaagccaaggctgcggaggctgccgcatccgcctactacaaccctggaaacccccacaatgtgtacatgcccacaagtcaacctccaccgcctccctattacccacctgaggataaaaagacgcagtag

SEQ ID NO: 246964 - DNA, 654 bp, synthetic construct
  misc_feature 1..654: note = Description of Artificial Sequence: Synthetic coding sequence
  source 1..654: mol_type = other DNA
atggctctgaacaaaaaccacagtgaagggggtggtgttattgtcaacaatacagagtctattctaatgtcatatgaccatgtggagctgacgttcaacgatatgaaaaacgtgccggaagcctttaagggtactaaaaaaggtactgtgtacctgaccccctaccgcgtgatcttcctgagcaaggggaaggatgcgatgcagtccttcatgatgcctttctacctgatgaaggactgtgaaatcaagcagcctgtgtttggagcgaactacattaaaggtaccgtgaaagctgaagccggtgcctcacggggagaagtaccctcaggtgcctatggctattcatatatgcccagcggagcttatgtgtacccccctcccgtggcaaacggcatgtacccatgccctccgggatatccatacccaccccctccacctgaattctaccctggccctcccatgatggacggcgctatgggctatgttcagccgcctcctccaccctacccagggccaatggagcctcctgtgtccggtccggacgtacctagcacccctgcaggtgaggggccttgggtgctggcggctctgcgggaccagccatcacccccacggtgccgtactgagtcactgcggatggcaagggattgctag

SEQ ID NO: 246965 - DNA, 630 bp, synthetic construct
  misc_feature 1..630: note = Description of Artificial Sequence: Synthetic coding sequence
  source 1..630: mol_type = other DNA
atggctctgaataagaatcattctgaaggaggcggagtcattgtcaacaacacagaatccatactcatgtcttacgaccacgtggaactcacatttaacgacatgaagaatgtgcccgaggccttcaaaggtactaagaaaggtactgtgtacttgaccccatacagagtgatcttcctgtcgaagggcaaggatgctatgcaatcatttatgatgcccttttacttgatgaaagactgtgaaattaaacaacctgtatttggggctaactacataaaaggaaccgtgaaagccgaagccggtgggggatgggaaggcagcgcatcatataaactcactttcacagctccaatgtcgcctcctttgctgcagcccaaaccacggccacagaaacagccacccgcacctataacaacccaggccatcgcctccagacgacacctccccactacccaccgcaagattgaggatccagttggtcccccagcatctctcccgccaacactgattagtttgccgtatccaagtcatcgtggatgcgccggtgcctggggcggagagggcgcaccctgctctccctcgcgctctgatcataagcaactgccaggaacaagcatcgtggggcattag

SEQ ID NO: 246966 - DNA, 651 bp, synthetic construct
  misc_feature 1..651: note = Description of Artificial Sequence: Synthetic coding sequence
  source 1..651: mol_type = other DNA
atggcactgaacaagaaccactctgagggtggaggggtcatcgtaaacaataccgagtccatcctgatgagctacgatcatgttgagctcacatttaacgacatgaagaatgttcctgaagcgttcaaggggaccaaaaagggaacagtttacctgacgccgtatcgtgtcatcttcctttccaagggaaaagatgcaatgcagagttttatgatgccattctatctgatgaaagactgcgagatcaaacagcccgtgtttggagccaactacatcaagggaaccgttaaggccgaggcaggtggagggtgggaggggagcgctagctacaaactgacctttacggccggtggggcaatcgagtttggtcaaagaatgctgcaggtagcaagccaggaattctaccccggaccccctatgatggacggcgctatgggctacgtgcagccacccccaccaccctatcctggacctatggaaccgccagtatccgggccagacgtgcccagtacaccagcagctgaagcaaaggccgctgaagcagccgcatccgcatactataaccccggtaatcctcataacgtatatatgcccacaagccagcccccacctccaccatattatcccccagaggataagaagactcaatag

SEQ ID NO: 246967 - DNA, 2769 bp, synthetic construct
  misc_feature 1..2769: note = Description of Artificial Sequence: Synthetic coding sequence
  source 1..2769: mol_type = other DNA
atggctaccgcctccccacgatccgataccagcaacaatcatagcggcaggttgcagctgcaggtaacggtgtctagtgccaagctcaaacgcaagaaaaattggttcggaaccgccatctatactgaggtcgtcgtggacggggaaatcacaaaaactgcaaagtcttcctccagtagcaacccaaaatgggatgaacagctcacagtcaatgtaacaccacagactaccctggagtttcaggtgtggtctcatagaacactgaaggcagacgctcttctgggcaaggcaacgattgacctgaaacaggcactgttgattcataatcgcaaactggagagggtgaaggagcagctaaagttgtcattagagaataagaacggtattgcccaaactggcgaactaactgtcgttctggatgggttggtgatcgaacaggagaatatcactaattgttcttcctcgcctactatcgagatccaggaaaatggcgacgccctacacgagaacggagagccaagtgcaagaactacagccaggctcgccgtagagggcaccaatggtatcgataaccacgtacctaccagtaccctggtccaaaattcttgttgcagttatgtcgttaatggagataatacaccaagtagcccttcccaagtggcggcacgtcccaagaacacccccgctccgaaaccattagcatctgaacccgctgatgacacagtgaacggggagtcttcatcatttgccccaactgataatgcctccgtaaccggaactcccgtcgtgagtgaagaaaatgcactgtctcccaattgtactagcaccacggttgaagaccctcctgtccaagaaatccttacatcttcggagaataacgagtgtattccctccacaagcgccgagctggaatccgaagctcggtcaattcttgagcctgatacctccaattctagatcatccagtgctttcgaggctgccaagtcaagacagccagacgggtgtatggaccctgtcagacagcagtcaggtaacgccaatacagagaccttgccttcaggatgggaacagcgaaaggacccgcacggacggacatattacgttgatcacaatactcgaaccaccacttgggagcggccacaacctctcccacccggatgggagagacgcgtggacgatcgtaggagggtatactatgttgatcacaacacaaggaccacaacctggcagcgtccaactatggaaagtgtccggaacttcgaacagtggcaatctcaaagaaaccagctccagggcgcaatgcagcagtttaatcagaggtatctctattctgccagtatgctggccgctgaaaatgacccatatggcccactgccgcctggatgggaaaaacgcgtggacagtactgatcgagtctatttcgttaaccacaatacgaagacaacacaatgggaggaccctagaactcagggattgcagaacgaggagccactgcctgaggggtgggagatacgatatactagggaaggagtaagatacttcgtggaccacaatactagaaccactaccttcaaggaccctcggaacgggaagtccagcgtcacaaaggggggacctcaaatcgcctatgagcggggtttcagatggaagttggcccacttccgctatctgtgtcagtctaacgccttgccatcccacgttaaaatcaacgtctctagacagacgctgttcgaggattctttccagcagattatggctctgaagccctacgatttaagaaggcgcctttacgttatttttcggggagaggaaggcctcgattatggcggtctggcaagagagtggttcttccttctcagccatgaagtgctaaatccaatgtattgtctttttgagtatgccggaaagaacaactattgcctccagattaatcctgctagtacgatcaatcctgatcacctgagttacttttgtttcattggcagatttatcgcgatggccctcttccacggcaagtttatagatactgggttctctctgccattctataagcggatgctgtctaagaagttgaccatcaaggacctcgagagtatcgacacagaattctataatagcctgatttggattagggacaacaacattgaggagtgcgggctggagatgtattttagtgtcgatatggagatcctcgggaaagtgacttcccacgatctcaaactagggggtagcaacatcctggtgacagaagaaaataaagacgaatacattggcctgatgaccgagtggaggttttctagaggggttcaggaacagacgaaggcattcttagacggcttcaacgaggtggttccactacagtggcttcagtattttgatgagaaggagctggaggtgatgctgtgcggtatgcaggaggtggaccttgcagattggcagcgaaataccgtgtaccggcactatacacggaattctaagcagattatatggttctggcaattcgtcaaggagaccgataacgaagtgcgcatgaggttgttgcagttcgtaaccggaacttgccggctccctctggggggatttgctgaattaatgggctccaatggtccccaaaaattttgtattgaaaaggtgggaaaagacacatggctgcctcgatctcacacctgctttaacaggctggatttaccaccgtacaaatcgtacgaacagctcaaggaaaaacttctattcgccatcgaggagacagaaggcttcgggcaggagtag

SEQ ID NO: 246968 - DNA, 2379 bp, synthetic construct
  misc_feature 1..2379: note = Description of Artificial Sequence: Synthetic coding sequence
  source 1..2379: mol_type = other DNA
atggcaaccgcatctccccgaagcgatacatctaacaaccactctgggaggctccagcttcaggtgactgtgtcttccgccaaacttaagagaaagaaaaattggtttggaacagcaatctacactgaagttgtcgtcgatggagagataactaagaccgccaagagtagcagtagcagcaatcctaagtgggacgaacagttgactgtaaacgtcactcctcagaccaccttggaatttcaggtgtggtcccatcgaaccttgaaggctgatgccctgctgggcaaggctactatcgatctcaaacaggccctcttgattcacaaccgcaagtttaacggagagtcatccagcttcgcccctaccgacaatgcctctgtgacaggcacgcccgtggtgagcgaggagaacgccttgtcgcctaattgcacgtccaccacggttgaggatcctccagtccaggaaatcttgacctcttcagagaataatgagtgcatcccatcaactagcgcggaactagagtcagaagccaggtctatcttggagcctgatacttccaatagtcgaagttcatccgcttttgaagccgcaaagagccggcagcctgatggatgcatggaccctgtaagacagcagtcgggaaatgccaacacagagactttgccctctggttgggagcagaggaaggacccccacgggaggacgtattacgtggatcataacacgcgtaccacgacatgggaacgcccacagccattgcctcccggatgggagagacgtgtcgacgaccgccgacgtgtgtactatgtagatcacaatacccgtacgactacctggcagagacccacaatggagagcgttcggaattttgaacagtggcagtcccagcggaatcagctgcaaggagcaatgcaacagtttaaccaaaggtatctgtatagtgcaagtatgcttgccgctgagaatgatccctatggccctctcccgccaggatgggagaagcgggtggatagcacggatagagtgtacttcgtcaaccataacacaaagacaacacagtgggaggaccccaggactcaggggttacagaacgaggagcccctgcctgagggctgggaaatcagatacacaagggaaggtgtgcgctattttgtggatcacaatactagaacaactacattcaaagacccaagaaacggaaagagcagtgttacaaagggcggaccccagattgcgtacgagcggggatttcggtggaagctcgctcattttcgttatttgtgccagtctaacgccctgccatcccatgtgaagatcaatgtctcaagacagaccctattcgaagacagttttcagcagattatggccttgaagccctacgacctgagacgtagactctacgtaatctttcgcggagaggaaggtttggactacgggggattggcaagggaatggtttttcctgctctctcacgaggtcctaaatccgatgtactgtctgtttgagtacgctgggaagaacaactattgcctgcaaatcaatcccgcttcaacaatcaaccccgaccacctcagctatttctgctttatcgggaggtttatcgccatggccttattccatggaaaattcattgatacaggtttctcacttcctttctacaaacggatgttatcaaaaaaacttaccattaaggacctcgagagcatcgacactgagttctacaacagtctcatttggatcagagacaacaacatagaagaatgcggtttagagatgtatttttccgtggacatggagatcctgggaaaggtcacatcccatgatcttaagttgggcggatccaatatcctggtaacagaagagaataaagatgagtacatcggccttatgacagaatggagattcagccgaggagtccaggaacagacaaaagctttcctcgacggcttcaacgaggtagtgcctctgcagtggcttcagtatttcgatgaaaaagagctggaagtcatgctctgtggaatgcaagaggtggacctcgccgactggcagagaaacactgtctatcgccactatactcggaactctaagcaaatcatatggttttggcagttcgtgaaagagaccgacaacgaggtcaggatgcgcctcttacagtttgtgaccggaacatgcaggctccccttgggtggattcgccgagctgatggggtctaacgggccacagaagttctgtatagagaaggtcgggaaggatacatggcttccccgttcacatacctgttttaaccggctcgatcttccaccatacaagtcttacgagcagctcaaggagaagctgctattcgcaatcgaggagacggaggggtttggtcaggaatag

SEQ ID NO: 246969 - DNA, 2115 bp, synthetic construct
  misc_feature 1..2115: note = Description of Artificial Sequence: Synthetic coding sequence
  source 1..2115: mol_type = other DNA
atggccacggctagcccacgtagcgacacctctaataaccattccggacggttgcagctacaggtgacagtgaacggcgaatctagctctttcgcacccactgataatgcatctgttactggaacccccgtggtgtccgaagagaacgccttgtccccaaattgcacctcaaccactgtggaggatccacctgtccaagagatcttgacatcaagcgagaataatgaatgcatccctagcactagcgctgaactggaatcagaggctagaagtattttagaacccgacacatccaactcccggagttctagcgcgtttgaagccgctaaaagcagacagcccgacggctgcatggatcctgtgcgtcaacaatccgggaatgcgaataccgagactttgccctccggttgggagcagcggaaggatccacacggtcgcacatactatgtcgaccacaacactcggacaacaacttgggagcgccctcaaccgctgcctccgggatgggagagacgtgtggacgaccgcaggagagtatattatgttgaccacaacactcggactaccacttggcagagacctactatggagagcgtgagaaattttgagcagtggcagtcacagaggaatcagctgcagggagctatgcagcagtttaatcagcgatacctgtattctgcctccatgctcgctgccgaaaacgacccctacgggcctctcccgcctggctgggaaaagagggtggactcaacagaccgcgtatacttcgtgaatcataacacaaagaccacgcagtgggaagatccccgtacacaaggactgcagaatgaagaacctctacccgagggatgggagatcagatatactcgagagggagtgcgctactttgtcgaccacaacacgaggacgaccacattcaaggacccgcgaaatgggaaaagctctgtaacaaaagggggtccacaaatagcctacgagcgaggcttccgctggaaactcgctcacttccggtacctatgtcagtccaacgcactgccctcacatgtcaaaataaatgtgtctaggcagacgctgtttgaagacagcttccaacaaatcatggccctgaagccctacgacctgagacgccgtctgtacgtcattttccgcggtgaggaagggctggactatgggggacttgcacgggagtggtttttcctcctcagtcacgaagtgctcaacccaatgtactgcctctttgagtacgctggcaagaataattattgtttacagataaatcccgctagtacaatcaaccctgaccacctgtcctatttttgcttcattggtagattcatagccatggccctgtttcacggcaaattcatcgacaccggattttcattgcccttctataaacggatgctctctaagaagctaacgataaaagatctagaatccattgacacggaattctacaattcgcttatctggattagagacaataacattgaggagtgtggtttggagatgtatttttcagtcgacatggaaatactcggcaaggttacgagtcacgaccttaaactgggcggtagcaatatactcgtgaccgaggagaacaaggatgaatacatcgggttaatgactgagtggcggttctccagaggagttcaggagcagacaaaggcattcctcgatgggtttaacgaggtcgtgccactgcagtggttgcaatattttgatgagaaagagttagaggtaatgctgtgcggcatgcaggaagtcgatttagctgattggcaacgtaataccgtgtacaggcattacactagaaattctaaacagattatctggttctggcagtttgtcaaggaaacagataatgaggtgcgtatgcgactcctgcagtttgtgactggtacatgcaggctcccgctaggaggcttcgctgaactgatgggctcgaacgggccacagaagttctgcattgaaaaggtgggaaaagatacttggctcccacggagccatacctgctttaatcggctggacctgcctccatacaaatcctatgaacaacttaaagagaaattgctatttgccattgaagagaccgagggctttggccaggaatag

SEQ ID NO: 246970 - DNA, 336 bp, synthetic construct
  misc_feature 1..336: note = Description of Artificial Sequence: Synthetic coding sequence
  source 1..336: mol_type = other DNA
atggcgacggccagcccaagaagtgatacatcaaacaaccactccggcagactgcagctgcaggtgacagtctcttccgccaaacttaaaaggaaaaaaaactggtttggcaccgcaatttatacagaagtggtggtcgacggggagataacgaagacagccaagagttccagctcgtccaaccccaaatgggatgagcagctcaccgtcaatgttacgccacagaccaccttggagttccaggtctggagccacaggactttgaaagctgacgccctgctgggcaaggcaaccattgaccttaaacaagccctacttattcataataggaagtag

SEQ ID NO: 246971 - DNA, 2769 bp, synthetic construct
  misc_feature 1..2769: note = Description of Artificial Sequence: Synthetic coding sequence
  source 1..2769: mol_type = other DNA
atggccaccgccagtcccaggtctgacacgtctaacaaccattctgggagactccagttgcaagtgaccgtttcaagtgccaaactcaaaaggaagaagaactggttcgggaccgcaatctataccgaggtagtggtcgatggtgaaattactaaaactgccaaatcatccagctcttccaacccgaaatgggatgaacagctgactgtcaacgtgacccctcagaccacactggaattccaagtgtggagccatagaactctgaaggccgacgcactgctggggaaggcaactatcgacctgaaacaggcattattaatccacaacaggaagctggagagggtgaaagaacagttaaagttgtcgctggagaacaagaatgggatcgcccagaccggagaactgaccgtcgtgctcgatggactggtgatagaacaggaaaatatcaccaactgctccagctcccctactattgagattcaggagaacggcgacgcactgcatgaaaacggggagccgagtgcaagaacgactgctcgccttgctgtggaaggaaccaacgggattgacaaccacgtccccactagtacactggttcagaacagttgctgttcatacgtagtgaacggcgacaatactccttcttcccccagccaggtggcggcaaggcccaagaacactcctgcccctaaacctcttgcttcagaacctgccgatgacacagttaacggcgaatcatcatccttcgcgcctaccgataatgcttccgtcactggcacacctgtcgtttccgaggaaaacgcacttagtcctaactgcaccagcaccaccgtagaggatccaccagtgcaggaaattctaacgtcctcagagaacaatgaatgtattccaagtacctcagcggaactggaatcagaagccagaagtattctggagccagatacgtctaattcacgatcgagctctgcatttgaggcggctaaaagtaggcagcctgatggatgcatggatcccgtgaggcagcagtctggaaatgcgaatacagagaccctgccctccggctgggaacagagaaaggacccacacggccgtacctattacgttgatcacaacactagaactactacttgggaaagaccacaaccactgcctccgggatgggaacggagggtggatgatcgcagacgcgtgtactacgtggatcacaacaccagaaccactacgtggcagcggcctaccatggaaagcgttaggaacttcgaacagtggcagtctcaacgcaatcagttgcagggggctatgcagcagttcaatcaacggtacctgtactctgcttctatgctggctgcagagaacgatccatatggtcccctgcccccaggatgggagaagcgagtggacagtacggatcgcgtttattttgttaaccacaacacaaaaaccactcagtgggaggacccaaggacccaaggtttacagaacgaagaacctcttcccgagggatgggaaatccgatatacacgcgagggggttagatatttcgtggatcacaatacgagaactactacgtttaaggatcctagaaatggcaagagctccgtcaccaaggggggaccccaaatcgcctacgaacggggtttcagatggaaattagcccactttcgatacctgtgccagagcaacgctctgccatcacacgtcaaaattaacgtctcccgccagacactcttcgaggattcctttcagcagattatggcgttgaagccatatgatctccggagaaggctgtatgtgatttttcgcggagaggaaggtctcgattacggcggactcgcgagggaatggttcttcttgctctcacatgaggttttaaaccctatgtactgcttgtttgaatacgccggaaagaacaattactgcttacagattaatcccgcttccacgatcaaccccgatcatttgtcatacttttgtttcattggacgctttattgctatggccctatttcatggcaaatttatcgacaccggcttttctctccccttttataaacgtatgctcagtaagaaactgactataaaggatctcgagtccatcgatactgaattttacaactccctcatctggataagagataataatatcgaggagtgtggcttggaaatgtacttctccgtagacatggaaatcctgggcaaggttacgtctcacgacctgaaactggggggatcaaatatcctggtgactgaagaaaacaaggacgaatatattggtctgatgaccgaatggcgcttttctcggggagttcaagagcaaacaaaagcatttctggatggtttcaacgaagtggttcccctccagtggctgcagtactttgatgaaaaggagctcgaggtgatgctttgtggaatgcaagaagttgacttggcagactggcagagaaacacagtgtaccggcactatacgaggaactcaaagcagattatctggttctggcagtttgttaaggaaactgacaatgaagtgcggatgaggttgcttcagtttgttacaggaacgtgcaggctccccctggggggattcgccgaactaatgggctccaatggccctcagaagttctgtattgaaaaagtcggtaaggacacttggctgcctcgcagtcacacatgcttcaataggctggatctgcctccctataaatcctacgagcagttaaaggagaagctgctgttcgcaattgaagagactgagggtttcggtcaggagtag

SEQ ID NO: 246972 - DNA, 2613 bp, synthetic construct
  misc_feature 1..2613: note = Description of Artificial Sequence: Synthetic coding sequence
  source 1..2613: mol_type = other DNA
atggcctccgcatcttctagtcgagccggtgttgctctgcccttcgaaaagtctcagctgaccttgaaggtcgtgtcagctaagccaaaggttcacaacaggcagcctcgcatcaattcttacgtggaggtggccgtcgatggattgcctagtgaaacaaaaaaaactggaaagaggattggtagcagtgaactcttgtggaatgagattattatcctgaatgttactgctcagtctcacctggacctgaaagtatggagttgccacaccctgaggaatgaacttctgggcactgccagcgtgaatctgagtaatgtcctcaaaaataatggaggcaaaatggagaacatgcaactgacactgaatctgcagaccgagaacaagggctctgtggtctccggcggtgagctcactatttttctggacggccctacagttgacttagggaatgttcccaatggaagtgctctcacagacggttctcagctgccctcacgagattcatcgggtacagctgtggcacctgagaatcggcaccaaccaccctctaccaactgctttggagggagatccaggacgcacaggcactctggcgctagcgcacgtaccacacctgcaaccggtgagcaatccccgggagcccgatccagacaccggcaacccgtgaaaaacagtggtcactccggactcgctaatggcactgtgaatgatgagccgacgactgctaccgatccagaggaacccagtgtggtaggggtgacctcaccaccagcagcgcctttgtcggtcacgccaaaccccaatacaacgtcactgccagctcctgccaccccggcagaaggcgaggagccatctacctctgggacgcaacagctcccggcagccgctcaagcccctgatgccttgccagcaggctgggagcagcgagagctgcccaatggcagggtatactacgtggaccataacactaagaccacaacatgggaacgtccactgccaccagggtgggagaagaggactgaccctagaggcagattctactatgtggatcataataccaggacaaccacttggcaacgcccaacggctgagtatgtgagaaattacgaacagtggcaatcgcaaaggaatcaactacagggagctatgcagcatttcagccaacgatttctgtaccagtcttcatctgcctccaccgatcacgatccgctgggaccgctcccacctggttgggagaagcgacaggataacggacgcgtctattatgttaatcacaacacgagaaccactcagtgggaagatcctcggactcagggcatgatccaggagcccgcattgcctccgggatgggagatgaagtacacatcggaaggtgttagatacttcgttgatcacaatacaagaactaccacctttaaggatcctcgcccagggtttgaatcaggcacaaaacaaggctcgccaggcgcttacgatcgctcatttcggtggaaatatcaccaatttagattcctatgccacagcaacgccctgccatcccatgtgaagatatccgtgagtcgacagactctattcgaagattctttccagcaaattatgaacatgaagccttacgatctgaggcggaggctctatattatcatgaggggggaggaggggctggattacggaggaatcgccagggaatggttcttcctgctcagccacgaggtgttgaatccaatgtactgtctgttcgaatacgccggaaagaacaactattgcttacagattaaccctgcctccagcatcaaccccgaccacctcacatatttccggttcataggtagatttatcgctatggccctgtaccacgggaagttcattgacaccggtttcaccctgccgttttacaagcggatgctgaacaaacgcccaaccctgaaagatttagagtcgatcgatcccgagttttataactcgattgtgtggatcaaggaaaataacctcgaggagtgcggcttggagttatatttcatccaggatatggaaattctggggaaagtcacaacacatgaattgaaggaaggaggggagtcaatacgcgtgacagaagaaaacaaggaagagtacatcatgttgcttacagattggcggtttactaggggcgttgaggagcaaacgaaggccttcctggacggctttaacgaggtggcgcctctggagtggctccgatacttcgacgaaaaggagctcgagctgatgctttgtggtatgcaggaaatcgacatgtccgactggcagaaatccacaatctaccgtcactacactaaaaatagcaaacagattcagtggttttggcaagtggtaaaggagatggataacgaaaagcgcattagactgctgcagttcgtaactggcacctgtaggctgcccgtggggggattcgccgagctgattggaagtaacgggccacagaagttctgcattgacaaagtgggaaaggaaacatggctccccagatcacatacctgtttcaaccgcctcgaccttcccccatacaagtcatatgagcaactgcgcgagaaactcctctatgccattgaggaaacagagggattcggccaggagtag

SEQ ID NO: 246973 - DNA, 2613 bp, synthetic construct
  misc_feature 1..2613: note = Description of Artificial Sequence: Synthetic coding sequence
  source 1..2613: mol_type = other DNA
atggctagcgcgtcttcgagtcgagccggtgtggccctcccattcgaaaagtctcagctgactttgaaagtggtgagtgcaaaacctaaggttcataaccgacaaccacgcatcaatagttatgtcgaggtggccgtggacggcttgccaagtgagactaagaagactggcaagcggatcggaagctcagaactgttatggaacgagatcatcattttgaacgtaacagctcagtctcacctggatctcaaggtgtggtcttgtcacaccttacgcaacgagctgctgggcaccgcatccgtgaacctgtccaatgtgcttaagaacaatgggggtaagatggaaaacatgcagctcactttgaatctgcagactgagaataaagggtctgttgtgagcgggggtgaattaactatctttcttgacggccctaccgtcgacttaggtaacgtgcccaacggctccgcccttacagatggctcccagttaccctctagagactcgtcgggaacagcagtcgcccctgagaatcgccatcagccccctagcacaaactgcttcggcggtcgttccaggactcatcgccactcgggagccagcgctcgaactactcctgccactggggagcagtctccaggcgcaagatccagacacaggcagccggttaaaaactctggacattctgggctcgcgaatggaacagtgaatgacgagcccaccactgctacagaccctgaagaaccctccgtggtaggtgtgacgagcccacccgctgcccctctcagcgtgactcccaaccccaacaccacaagcctaccagcaccagccacccccgcagaaggggaggaaccctctacctcggggactcagcagctgcctgccgcagcgcaagcaccggatgctctaccagctgggtgggagcagagggagctgccaaacggtagggtctactatgtggatcacaataccaaaacaacgacgtgggaaaggcctttgccacccggttgggagaagaggacagatcccagagggcgtttttattatgtcgaccacaacacaagaaccacaacctggcagcgtcctacagccgagtacgtgcgaaactatgagcagtggcagtctcagcgaaaccagctgcagggtgccatgcaacacttctcacaacgcttcctctatcagtctagcagtgccagcacagaccacgaccccctaggacccttgccacctggttgggaaaagcgacaggataatgggagggtttactatgtgaatcataatacacgcacaacccaatgggaggacccacgtacccagggcatgatccaggagcctgccctgccaccaggctgggagatgaagtatacttctgagggggtgcggtactttgtggaccataacacccgcaccacaactttcaaagaccctagaccaggatttgagagtggtacgaagcaggggtctcctggtgcatatgatcgctcgtttcgctggaaatatcaccagttcaggttcctgtgccactccaatgccctgccatcacacgtgaagattagcgtctctaggcagacactgttcgaggactctttccagcagatcatgaatatgaaaccttatgatctccggagaaggttatacattatcatgcggggagaagagggcctggattacggaggcattgccagggagtggttcttccttctctcacacgaggtgctgaacccaatgtactgtctctttgaatacgctggaaaaaacaactattgtctccagataaatcccgcatcttctattaatcccgaccacctgacctacttccggttcatcggacggtttattgcgatggccttgtaccacggaaagttcattgacaccgggttcacattgcctttttacaaaaggatgctgaacaagcgtcctacacttaaagaccttgagagtatagatcccgagttttacaatagcattgtgtggatcaaggagaataatttggaagaatgcggactggaactgtattttattcaggatatggagatccttgggaaggtgaccactcacgagctgaaagagggaggtgagagcattagagttacagaggaaaataaagaagagtacattatgctcctgaccgactggagatttacacggggagtcgaagaacagacaaaagcctttctagatggcttcaatgaggtagcaccactggaatggttgcgctatttcgatgaaaaggagttagaactcatgctttgcgggatgcaggaaattgatatgtccgactggcagaaatctacgatctacaggcattatactaagaactccaaacaaattcaatggttttggcaggtggtgaaagagatggacaatgaaaagcgcatcagactgctgcagtttgttacaggaacctgtcgactcccggtgggagggtttgccgagttgatcggatcaaatggtcctcagaagttttgtatcgataaagtgggcaaggaaacttggttaccccgttctcacacttgctttaataggctcgatctgccaccgtacaaaagctatgagcaattgcgcgaaaagttgctatatgcaatcgaagagactgaaggtttcggacaagagtag

SEQ ID NO: 246974 - DNA, 2613 bp, synthetic construct
  misc_feature 1..2613: note = Description of Artificial Sequence: Synthetic coding sequence
  source 1..2613: mol_type = other DNA
atggcttctgctagctcctctcgcgctggagtggccctgcctttcgagaagtcccaattaaccctaaaggtagtgtcagctaaaccaaaagtgcataacagacagccacgcattaattcatacgtggaggtggctgtggatggacttcctagtgaaactaaaaagacgggaaagaggatcggcagctccgaactactctggaatgagataatcattctgaatgttacggcccagagccatctggatttgaaagtctggtcatgccatacccttcgcaacgagctgctaggcactgccagcgtgaacctaagcaacgtcctcaaaaataacggagggaaaatggagaatatgcaactgacactgaatctgcagactgagaacaaaggctcggtagtgagtggaggcgaattgaccatcttcctcgatggtccgacagtcgacctgggaaacgtgcctaacggatccgccctgactgacggtagtcagctgccatcacgagactcctccggcacagccgttgcaccagagaacagacatcagccgccttcaaccaactgcttcggcggacgctctaggacccacagacactcaggagcaagcgccagaacaacgcctgccactggcgagcagtcacctggggcaaggtcaaggcaccgtcagcctgtgaagaatagcgggcactccggcctggccaacggtactgtcaacgacgaaccaactactgccacagaccctgaagaaccatctgtcgtcggagtcactagccctcctgcagctcccctgtcagtgactcccaatcctaatacaactagcctgccggcaccagcgactccagccgaaggagaggagcctagcaccagcggaacgcaacagttacccgcagccgctcaggccccagatgccctccccgcagggtgggagcagcgggagttgcccaacggccgtgtgtattatgtggaccacaatacaaaaaccactacttgggagcgacccctgcccccaggatgggaaaaaagaactgaccccagaggacgattttattatgtggatcataacactcggactacaacatggcagcgacctaccgccgagtatgtgcgtaattatgagcagtggcagtcacagaggaaccagctccaaggggcaatgcaacatttttcacagcgatttttatatcaaagttcgtccgcgtcaactgatcatgatccattaggccctcttccgcctgggtgggagaaaagacaggacaatggcagggtttactatgtgaatcataacacaagaaccacacagtgggaggacccaagaacccagggtatgattcaggagccagctctgcccccaggatgggagatgaagtatacctccgagggggttcgctacttcgtggatcacaatacaagaactaccacatttaaggaccccagaccaggattcgagtctgggaccaaacaggggagccccggagcgtatgatagaagcttccgttggaagtatcatcagttccgctttctctgccattccaacgccttgccatctcatgtcaagatctcggtctcacgccagacgctgtttgaagatagtttccagcagatcatgaacatgaagccgtacgacttgcgtagaaggttatacatcataatgagaggcgaggagggcctcgattacggcggaattgctagggagtggttttttctgctaagtcacgaagtgctcaaccccatgtattgcctgtttgaatatgctgggaaaaataactattgtctacaaatcaaccctgccagcagtattaatcccgaccatctgacttactttagatttattgggaggttcatcgctatggctttgtaccacgggaaattcatcgatacaggatttaccctgcctttctacaagcggatgctcaataaaagacccacgctgaaggacctggagtccattgaccccgaattttacaactcgatcgtttggataaaggagaacaatctggaggagtgtggcctggaactgtatttcatccaagacatggagattttgggaaaggttaccacacacgaactcaaagaaggcggtgagagcattcgggttacagaagagaacaaagaagaatatataatgcttcttacggactggcgcttcacaaggggcgtggaagagcaaaccaaggcttttctggatggtttcaatgaagttgccccattggagtggctgcgttacttcgacgagaaggaactggagctgatgctctgtggaatgcaggagatagacatgtcagactggcagaagtctactatctacaggcactatactaagaacagtaaacaaatccagtggttctggcaggtcgtaaaggagatggacaacgaaaaacggatcaggcttcttcagttcgtcaccggaacctgccgcctgcctgtgggcggatttgccgagctaatagggtcaaatggaccccaaaagttctgcatcgataaagtggggaaagagacatggcttcctcggagccatacctgcttcaataggctcgaccttcccccatataagtcctacgaacagcttcgagagaaattgctgtatgcgattgaggaaaccgagggttttggtcaggaatag

SEQ ID NO: 246975 - DNA, 2265 bp, synthetic construct
  misc_feature 1..2265: note = Description of Artificial Sequence: Synthetic coding sequence
  source 1..2265: mol_type = other DNA
atgcagttgactctgaatctgcagacagaaaacaaaggcagcgttgtcagcggaggagaactgaccatcttcctcgacggtccaactgtggacctcggcaacgtgcctaatgggagcgccctcactgatggctcccagctgccttcaagggactccagtggaactgccgtcgcccctgaaaatagacatcagcctcccagcacaaactgttttggcggaagaagtagaacccatcggcatagcggtgcctccgcccgtaccactcctgcgaccggcgaacaaagccccggagccaggtcgagacacaggcagccggtgaaaaattctgggcattccggcctggctaacggtacggtgaatgatgaacctactactgcgacagatcccgaagagccatccgtcgtgggagtaacctccccgccagccgcaccgctgtctgtcaccccaaaccctaataccacgtcccttccggctcccgcaactccagctgagggcgaggagccttctacatctggaacacagcaactgccagcagcggctcaggcccctgacgccctgccagctggctgggaacagagggagctgccgaacggcagagtatattatgtcgaccataacactaagacaaccacctgggaacggccacttcccccaggatgggagaaaaggactgatccacgaggacgattttactacgtggaccacaataccagaacaacaacttggcaacgtccgacagccgagtacgtgcggaattacgagcagtggcagtcacaaagaaatcagctgcagggggctatgcagcacttttctcagagatttctgtatcagagctcgtcagcctcaacagaccatgatcctctgggccctctgcctccagggtgggagaagagacaggacaatggtcgggtctattacgtaaatcataataccagaaccacacagtgggaggatcccaggacccaaggcatgatacaggagccggctctacctcccggatgggaaatgaagtatacaagtgagggcgtgaggtactttgtcgaccataatacacggaccacaacctttaaagacccgaggcctggttttgagtcaggcactaagcagggtagcccaggagcatacgaccgttcatttagatggaagtaccaccagttcagattcctgtgccatagtaatgcactacccagccatgtcaaaatcagcgttagccgtcagacactgttcgaggactcctttcaacagataatgaatatgaaaccttatgatctgcgcaggagattatatataattatgcggggtgaagagggcctagattatggcggtatagcacgcgaatggttcttcttgctcagtcatgaggttttgaaccctatgtattgcctgttcgagtatgctgggaagaacaattactgcctccagatcaatcctgctagctcgatcaatcccgatcatctgacctattttagattcatcggtcggttcattgcaatggctctgtatcacggtaaattcattgataccggttttactcttccattttacaagagaatgctgaataagcgcccaaccctgaaagatctggaatctattgatccagagttctacaactctatagtgtggatcaaggaaaacaacctggaggaatgtggattagagctgtattttattcaggacatggaaatcctcgggaaagtgacaacacacgagctgaaagaggggggagaaagtattcgtgtgacggaagagaataaggaggagtacattatgctgctaaccgactggcgtttcacaagaggtgttgaggagcagactaaggcatttctggatgggtttaacgaagtagcacccctcgagtggctccgatattttgacgagaaggagctagagctcatgctatgcggaatgcaggagatagatatgtctgactggcagaaaagcaccatctaccgtcactataccaaaaattctaagcagatccagtggttttggcaggtggtgaaggaaatggataatgaaaagagaataagacttcttcagtttgtcaccggcacgtgtaggttgcccgttggcggattcgccgaattaatcgggagtaatgggccacaaaaattttgcattgataaggttggtaaagagacatggcttcctcgcagccatacctgtttcaacagactcgacctccccccatacaaatcttatgaacaactgcgggaaaagctactctatgccatcgaggaaacggaagggttcgggcaggaatag

SEQ ID NO: 246976 - DNA, 2274 bp, synthetic construct
  misc_feature 1..2274: note = Description of Artificial Sequence: Synthetic coding sequence
  source 1..2274: mol_type = other DNA
atggagaacatgcaactgacactgaacctgcaaaccgagaataaggggtcagtggtttccggtggtgaacttaccatctttttggacgggcctacggtggacctcggcaacgtgcccaatgggagcgctttgacggatgggtctcagttgcccagcagagattcctctggaacagcggtggcaccagagaataggcaccagccaccatcaaccaattgcttcgggggacgtagcaggacccaccgccactccggagcttctgctcgtactactcccgctactggggagcagtcacccggagcacggtcaaggcatagacagcccgtgaaaaacagcggacattctggcctcgccaatggtacagtgaacgatgaacccaccacagccaccgatcctgaagagccctccgtcgtaggagtcacatctcctccagcggcaccattaagcgtgaccccaaaccccaataccacctctctacccgcaccagctactcccgcagaaggggaggaaccttctacatccggaacacaacaactccccgcagctgcccaggcaccagatgctctccctgcgggatgggagcagagagagctgcccaacggcagggtctactacgtggatcacaacactaaaactactacatgggaaaggccgctgcctccaggatgggaaaagagaacagacccgagggggcgattctactacgtcgatcacaacactaggaccaccacttggcagcgacctactgcggagtatgtacgcaattacgaacagtggcagtctcagcgcaatcagctgcagggcgctatgcagcatttctctcagaggtttctgtatcagtcaagttcagcctccacagaccatgatccacttggcccattaccccctggttgggagaagcgccaggataacgggcgtgtgtattacgtaaatcataatacccgcactacacagtgggaagaccccagaacccagggaatgatccaagagcctgcactgccgcctggctgggaaatgaaatacacctcagaaggggttcgttatttcgtcgatcacaacactagaactaccacatttaaggatcctagacctgggtttgagagcggaacgaagcagggctcgcctggggcatacgatcgctctttcagatggaagtaccaccaatttcggtttctctgccacagcaatgccctaccaagccatgtgaaaatatccgtttccagacaaacactctttgaagactccttccagcagatcatgaacatgaaaccttatgacctccggagaagattgtatatcattatgaggggagaggaaggcctggattatggcggtatcgccagggaatggtttttcctgcttagccacgaggtcctcaaccccatgtactgtctgtttgaatatgccggaaagaataactactgtttacagatcaaccctgcctcatcaatcaatcccgaccaccttacctattttcgtttcattggcagatttatcgccatggctctttatcacggcaagtttattgatacagggtttacattgcccttttataagcggatgctcaacaaacgcccaactctgaaggatctagagtccatcgaccctgagttctacaactccatagtatggatcaaggaaaacaatctcgaagagtgcggcctggaactgtattttatacaagatatggaaattctaggcaaagtgactacccatgagctcaaggaaggcggagagtcaatcagggtaaccgaagaaaataaggaagaatacataatgctgcttacagattggaggtttactcggggagtcgaggagcagacaaaagcttttcttgatggttttaatgaagtggcacctttggagtggctcaggtacttcgatgagaaggaactggagctgatgttatgcggcatgcaggaaattgacatgtccgactggcagaagtccactatctataggcactacactaaaaactccaaacagatccaatggttctggcaggtggtcaaagaaatggacaacgagaagagaattagactccttcagtttgtaactggcacttgtcgcttacctgtgggcggttttgcagagctcatcggatccaatggacctcagaagttttgtattgacaaggtgggcaaagagacctggttgccaaggagtcatacatgctttaacaggttagacctccctccatataaaagctacgagcagctgagggaaaagctcttatacgcgatcgaagaaactgaaggctttggacaagaatag

SEQ ID NO: 246977 - DNA, 1029 bp, synthetic construct
  misc_feature 1..1029: note = Description of Artificial Sequence: Synthetic coding sequence
  source 1..1029: mol_type = other DNA
atgatccaggagcccgcactcccacccggatgggaaatgaaatatacatctgagggagtaagatactttgtggaccacaacacccgcactacaacttttaaagacccgcgtccaggattcgaatctggtaccaaacagggaagccctggggcatacgatagaagcttcaggtggaaataccaccagtttcggtttctgtgtcattccaatgcactgccctcccatgtgaagatcagcgtctctcgccagaccctgttcgaggattcctttcaacagatcatgaacatgaagccatatgacctgaggcgcaggctgtacattattatgagaggggaagaaggcctcgattacggcggaatcgctcgagagtggttttttctgctgagccatgaagttctaaaccccatgtactgcttgttcgagtatgcaggtaagaataattattgtctgcaaattaaccccgcatccagcatcaacccagatcacctgacatacttcagatttatcggtaggttcattgcaatggcattataccacggcaagttcattgataccggctttacactccctttttacaagcgcatgctcaataaacgccctacactgaaggatttggaatccatagaccccgagttctataacagcattgtgtggattaaggagaataatctagaagagtgtggcctcgagctatacttcattcaagatatggagatcctgggaaaagtcacaacccatgagctgaaggagggcggtgaaagtatcagagtgaccgaggaaaacaaggaggagtatatcatgttgttgaccgactggcggtttacgcggggagttgaagagcagaccaaggcattcctggatggcttcaacgaagtcgcacctctcgaatggctgaggtatttcgatgagaaagagctggagttgatgctgtgcggtatgcaggaaattgatgctactggccgtcgggcacccagcaccgggaccacgcccaggacagcctcgcgaagcagcgggagcggtcggtggtag

SEQ ID NO: 246978 - DNA, 1296 bp, synthetic construct
  misc_feature 1..1296: note = Description of Artificial Sequence: Synthetic coding sequence
  source 1..1296: mol_type = other DNA
atgatccaggagccagccttaccacctggctgggaaatgaagtacacatctgaaggagtgagatatttcgttgaccacaacactaggactaccacctttaaagatccacgcccaggctttgagtctggcaccaaacaagggagtcctggggcatatgatcggagcttccgatggaagtatcaccaatttcggtttctttgccattctaacgctttgcccagccacgtcaagatatctgtcagtaggcagacccttttcgaggattccttccaacagatcatgaatatgaaaccctatgacttacgcaggcggctgtacattataatgcgcggagaagaggggctagactatggcggaatcgcgagggagtggttttttctactgagtcacgaggttctgaatcccatgtattgtctgttcgagtacgctggaaagaataactactgcctacaaatcaatcctgcgtcatccattaatccagatcaccttacctactttcgcttcatagggagattcatcgctatggctctctaccacggaaagtttatcgatacaggattcaccctgcccttctataaaagaatgctcaataagagaccgacactgaaagatctcgagtcaatcgacccagaattttataactctatcgtttggataaaggaaaacaacctggaagagtgcggactggaattgtatttcatccaggacatggaaattctcggtaaggttaccacccacgaactcaaggaaggcggtgagagtattcgcgtcacagaggaaaataaagaagaatacatcatgctgctgacagactggagattcactcgcggagttgaggaacagacgaaggccttcctggacggatttaatgaggttgccccacttgaatggttgagatatttcgatgagaaagaattggaactgatgctgtgcgggatgcaggagattgatatgtccgactggcaaaagtctacgatctatcggcactatactaaaaacagtaagcagatccagtggttctggcaggtggttaaggagatggacaacgagaagagaatacgcttgctccagtttgtgacgggtacatgtcgattgccagtcgggggattcgccgagttgattggctctaacggtccccagaaattttgtatcgataaagtcggcaaggaaacgtggctccctcggagtcatacttgctttaacagacttgatttgccaccatataaatcctacgaacagctgcgggagaagctactgtacgccatcgaagagaccgaagggtttggccaggagtag

SEQ ID NO: 246979 - DNA, 1008 bp, synthetic construct
  misc_feature 1..1008: note = Description of Artificial Sequence: Synthetic coding sequence
  source 1..1008: mol_type = other DNA
atggcgagcgccagcagcagtcgcgcaggggtggccctgccctttgagaaatctcagctgacgctaaaggttgtttccgccaaacctaaggttcacaaccggcagcccagaattaacagttacgtcgaggtggcggtagatggattaccgagtgagaccaagaaaacaggcaaacggatcgggtcgagcgagttgctgtggaacgaaatcataatcttgaatgtcacagcccagtcgcatctggaccttaaggtttggtcctgccatactctccggaacgagctgcttgggactgcctccgtgaacctgagtaatgtacttaaaaacaacgggggaaagatggagaacatgcagctaacactgaacctccagactgaaaataaaggtagcgttgtctccggtggcgagcttaccatttttctggatggaccaaccgtcgatctagggaatgttccaaacgggtccgcattgacagacggatcccaattaccttctcgcgatagcagcggcacagccgttgcccctgaaaatcggcatcagccaccctcgaccaactgctttggcggtagatcgcgcacgcacaggcatagcggggcatctgcgaggaccacacctgccactggcgagcagagtccgggagcacggtctcggcacagacaacccgttaagaactccggccactctggcctggccaacggcaccgtgaacgatgagcccacaaccgcgactgatcccgaggaaccttccgttgttggagtcacctctcctcccgcagccccactgtccgtcacgcccaaccctaatacaaccagcctgcctgcccctgctacgcccgcagaaggtgaagagcctagcacatctggtacccagcagttaccagcagccgcacaggctcctgatgcactgcccgctggatgggagcagagggagcttcctaacggaagggtctactatgtggatcataacacaaaaaccacaacctgggagcggcctctaccccctggctag

SEQ ID NO: 246980 - DNA, 210 bp, synthetic construct
  misc_feature 1..210: note = Description of Artificial Sequence: Synthetic coding sequence
  source 1..210: mol_type = other DNA
atggagtcccctaaaaaaaagaaccagcagctgaaggtgggcatcttgcatctggggtcaaggcaaaaaaagatccgaatccagctgcgcagtcaggtgctgggacgggaaatgcgggacatggaaggcgatctccaagagttgcaccagagtaatactggggacaaatccggatttgggtttcgacgccagggtgaagataatacctag

SEQ ID NO: 246981 - DNA, 246 bp, synthetic construct
  misc_feature 1..246: note = Description of Artificial Sequence: Synthetic coding sequence
  source 1..246: mol_type = other DNA
atggagtctcctaagaagaaaaaccagcagctgaaagtcgggatcttgcacttaggttcccgtcagaagaaaatccggatccagttgagaagtcagtgcgccacttggaaggtcatttgtaagagctgtattagccagacgccgggaattaatttggatttgggcagcggagtaaaggtcaagatcattccgaaagaagagcactgcaaaatgccggaggctggggaagaacagcctcaggtgtag

SEQ ID NO: 246982 - DNA, 441 bp, synthetic construct
  misc_feature 1..441: note = Description of Artificial Sequence: Synthetic coding sequence
  source 1..441: mol_type = other DNA
atgttactatggtgtccaccgcagtgtgcctgctcccttggcgtttttcctagtgcccctagtccagtttggggaacccgcagaagttgtgagcctgccaccagggtgcctgaggtgtggattctgtccccactgcttaggcacgggggacacacccagacccagaaccacacggccagtcctagatcccctgtcatggagagcccaaagaaaaaaaaccagcagctcaaagtgggcattctacatctggggtcacgacagaaaaagatccgcatccagctaaggagccagtgtgcgacttggaaagtgatctgcaagtcatgcatctctcagaccccaggcatcaacctggatctgggttcaggcgtcaaagtgaagatcataccaaaggaggagcattgcaagatgccagaagcgggagaagagcaaccccaagtctag

SEQ ID NO: 246983 - DNA, 210 bp, synthetic construct
  misc_feature 1..210: note = Description of Artificial Sequence: Synthetic coding sequence
  source 1..210: mol_type = other DNA
atggagagcccgaagaagaagaaccaacagctgaaggtgggcatcctgcatttaggcagtcggcaaaaaaagatccgaattcaattgcgtagccaagtcttaggcagagaaatgcgcgatatggaaggagatctccaagagctgcaccaatccaacaccggggataaatccgggtttgggttcaggcgtcagggagaggacaatacatag

SEQ ID NO: 246984 - DNA, 210 bp, synthetic construct
  misc_feature 1..210: note = Description of Artificial Sequence: Synthetic coding sequence
  source 1..210: mol_type = other DNA
atggagagccccaaaaagaagaaccagcagctcaaagtgggaatcctgcacctgggctcaagacaaaaaaagatccgcattcagcttagaagtcaagtcctcggccgtgagatgcgagacatggaaggcgatctgcaggaactccaccagtcaaatacgggcgacaagagcgggttcggcttcagacgtcagggcgaagataacacttag

SEQ ID NO: 246985 - DNA, 246 bp, synthetic construct
  misc_feature 1..246: note = Description of Artificial Sequence: Synthetic coding sequence
  source 1..246: mol_type = other DNA
atggagtcaccaaagaagaagaatcagcagctcaaggtgggcatcttgcatctgggatcccggcaaaagaagattagaattcagttgcgcagtcaatgcgcgacctggaaggtgatatgtaaaagttgtatcagtcagacccctggcattaatctggatcttggatccggggtgaaggttaaaattatcccaaaagaagaacattgcaaaatgccagaagcgggtgaagaacaaccccaggtgtag

SEQ ID NO: 246986 - DNA, 210 bp, synthetic construct
  misc_feature 1..210: note = Description of Artificial Sequence: Synthetic coding sequence
  source 1..210: mol_type = other DNA
atggagagtcccaaaaagaagaatcagcagctgaaggtagggatattacacttggggagccgacagaagaagatccgcattcagctccgctctcaggtcttaggaagagagatgcgggacatggagggcgatctccaggaattgcaccagagcaatacgggagataagagtggtttcgggttccgcaggcaaggcgaggacaatacatag

SEQ ID NO: 246987 - DNA, 441 bp, synthetic construct
  misc_feature 1..441: note = Description of Artificial Sequence: Synthetic coding sequence
  source 1..441: mol_type = other DNA
atgctgctgtggtgccctcctcagtgcgcctgcagcttgggtgttttcccatcagcgccaagcccagtgtggggcactcggaggtcatgcgagcccgcaaccagagtgccggaggtctggattctctcccccctgctccgacatggtggccatacccaaactcagaatcacacagcgtctccaagatccccagtcatggaaagccccaaaaagaaaaatcagcagctgaaagtgggcatcttgcatctcgggagcagacagaaaaagattcgcattcagttaagaagccagtgcgcaacatggaaagtgatatgtaagagctgcatttcccagacacctggaatcaatttggacctcggtagtggggtgaaagtgaaaataattccaaaggaagaacattgcaagatgccggaagcaggagaagagcaaccgcaggtgtag

SEQ ID NO: 246988 - DNA, 246 bp, synthetic construct
  misc_feature 1..246: note = Description of Artificial Sequence: Synthetic coding sequence
  source 1..246: mol_type = other DNA
atggaatctcccaaaaaaaagaaccagcagctgaaggtcggcattcttcacctcggcagtaggcagaagaaaattagaatccaacttagaagtcaatgtgctacctggaaagtcatatgcaaatcctgcatcagtcagacacccggaattaatcttgatctggggagcggcgtcaaagtcaagattataccaaaagaggaacactgcaagatgcctgaagcaggtgaggagcagccacaggtttag

SEQ ID NO: 246989 - DNA, 210 bp, synthetic construct
  misc_feature 1..210: note = Description of Artificial Sequence: Synthetic coding sequence
  source 1..210: mol_type = other DNA
atggagtcccccaaaaagaagaatcagcagttgaaagttggcattctacacttaggaagtcgccagaaaaagatcaggatccagttaaggagtcaagttcttggacgggaaatgcgcgacatggagggggacttacaagagctccatcagtcaaatacaggggataagagcggcttcgggttccgtcgtcagggggaggataatacatag

SEQ ID NO: 246990 - DNA, 246 bp, synthetic construct
  misc_feature 1..246: note = Description of Artificial Sequence: Synthetic coding sequence
  source 1..246: mol_type = other DNA
atggaaagccccaagaagaagaatcagcagttgaaggtcggcatattgcacctcggctcgcggcagaagaaaatacggatacagctgcggagtcagtgcgctacatggaaggtcatctgtaaatcgtgtatctctcagactcctggaatcaatctggacttgggatcaggtgtcaaggttaaaatcatacctaaagaagaacattgcaaaatgccggaagccggagaggagcaacctcaggtctag

SEQ ID NO: 246991 - DNA, 441 bp, synthetic construct
  misc_feature 1..441: note = Description of Artificial Sequence: Synthetic coding sequence
  source 1..441: mol_type = other DNA
atgctgctgtggtgccccccacaatgtgcctgcagcttgggcgtattccccagtgcacctagccccgtatggggcactcggaggagctgtgaacccgctacacgcgttcccgaggtgtggatcctaagtccccttttgcggcatgggggacacacacagacgcaaaatcataccgcgagcccaaggagtccagtgatggaatcaccaaagaagaagaaccagcagctaaaggtggggatcctgcatctgggctctcgtcagaaaaagataagaattcagctgagaagtcagtgtgcaacttggaaggtgatttgcaagtcctgtatttcccaaacaccgggaatcaatctggacctgggttctggagtgaaagtcaagattattccaaaagaggagcactgcaaaatgccagaggcaggagaagaacagcctcaagtctag

SEQ ID NO: 246992 - DNA, 210 bp, synthetic construct
  misc_feature 1..210: note = Description of Artificial Sequence: Synthetic coding sequence
  source 1..210: mol_type = other DNA
atggagtctcctaagaagaaaaatcagcagctgaaagttggcatactccacctaggaagtaggcaaaaaaagattaggattcagctgcgcagtcaggtcctgggcagagaaatgagggacatggaaggagacctgcaggagctgcaccagtcaaacactggggataaaagcgggtttggcttccggcgacaaggtgaagataatacatag

SEQ ID NO: 246993 - DNA, 210 bp, synthetic construct
  misc_feature 1..210: note = Description of Artificial Sequence: Synthetic coding sequence
  source 1..210: mol_type = other DNA
atggaaagccccaaaaagaagaaccaacaacttaaggtggggatcctacatctaggatctcgccagaaaaaaattcgcatccaactgagaagtcaagtactggggcgagaaatgagggatatggagggtgacctacaagagcttcaccaaagtaatacaggcgacaagtcgggtttcggtttccgcagacagggagaggacaatacctag

SEQ ID NO: 246994 - DNA, 246 bp, synthetic construct
  misc_feature 1..246: note = Description of Artificial Sequence: Synthetic coding sequence
  source 1..246: mol_type = other DNA
atggaatccccgaaaaagaaaaatcagcagctcaaggtgggtatacttcaccttggcagcagacaaaagaagattcgaatccagttgcggagccagtgcgctacctggaaggtgatctgtaagtcctgcatctctcaaacccctggcattaatctagacctcggctcaggtgttaaagtgaaaatcatccccaaagaagaacattgtaaaatgcctgaggccggtgaggagcagccacaggtctag

SEQ ID NO: 246995 - DNA, 441 bp, synthetic construct
  misc_feature 1..441: note = Description of Artificial Sequence: Synthetic coding sequence
  source 1..441: mol_type = other DNA
atgctgctctggtgtccacctcagtgcgcttgctctctgggggtgtttcccagcgccccatcccccgtgtggggaacccggcgaagttgtgagcctgctacacgggtgccagaagtgtggatactgtcccccctgttacgacacggcggacacacacagacgcaaaaccatacagcctctccaaggagcccagtgatggagtccccaaagaagaaaaatcaacaactgaaggtcgggatactgcacttgggtagccggcagaagaaaattcgcatccagttgagatctcagtgtgcaacgtggaaagtcatctgtaagtcctgcatttctcaaacccctggcatcaacctcgatcttggttctggggtcaaagtgaaaattatcccgaaggaggagcactgcaaaatgccggaggccggtgaagagcagcctcaggtgtag

SEQ ID NO: 246996 - DNA, 336 bp, synthetic construct
  misc_feature 1..336: note = Description of Artificial Sequence: Synthetic coding sequence
  source 1..336: mol_type = other DNA
atgatctggagaggcaggtcaacttatcggccacggcctaggcgctctgtcccaccaccagagctgatcggtcccatgttagaaccaggggacgaagaacctcagcaggaggaacctcccaccgaatcccgcgacccggcaccaggccaggaacgcgaggaggaccagggggctgccgaaacccaggtgccagacctggaagcggatctccaggagctttcccaatccaaaacagggggtgaatgcggcaatggacctgacgatcaggggaagatcctgccaaagtccgaacagtttaaaatgcccgaaggcggagatcggcagcctcaggtttag

SEQ ID NO: 246997 - DNA, 336 bp, synthetic construct
  misc_feature 1..336: note = Description of Artificial Sequence: Synthetic coding sequence
  source 1..336: mol_type = other DNA
atgatctggcgtggtcgttcaacctatagaccacggccaaggcgtagcgtacctcctccagaacttattgggcctatgcttgagcccggagacgaagaaccacagcaggaagagcctccaacggaaagcagggatcccgctcccggtcaagaaagggaagaggaccaaggggctgccgagacacaggtacctgatctcgaagccgaccttcaagaattatctcaatccaaaaccgggggagagtgcgggaacggccctgacgatcaaggcaagatccttcccaaaagcgaacagtttaaaatgcccgaggggggagataggcagcctcaggtatag

SEQ ID NO: 246998 - DNA, 4002 bp, synthetic construct
  misc_feature 1..4002: note = Description of Artificial Sequence: Synthetic coding sequence
  source 1..4002: mol_type = other DNA
atgactgcagataaactagtgttcttcgtgaatggcagaaaggtggtggaaaagaatgccgaccccgagacaacactgttggcctaccttcgcagaaagctcggcttgtccgggaccaaactggggtgcggggaggggggttgtggcgcatgcactgtgatgcttagtaagtacgatcggttgcagaacaagatcgtacacttctccgcgaacgcctgtctcgccccaatctgctctctgcaccatgtggccgtgaccacggtggaaggaataggcagcacaaagaccaggcttcaccctgtccaggaaaggattgcgaagtcccacggcagccagtgcgggttttgcaccccaggtatagttatgtccatgtacacactgctgcggaatcaacccgagccaaccatggaagaaattgagaatgcttttcaaggcaacctgtgtagatgcaccggatatagaccgattctacaaggctttagaacattcgcccgagatggtgggtgctgcggcggtgacgggaataaccctaactgctgcatgaatcagaagaaggatcactccgtctccttaagtccgtccctgttcaagcccgaggagttcacgccccttgatcccacccaggagccaatcttcccgccagagcttcttcgactgaaggacacgcccagaaagcagctgcgcttcgagggggagagggttacctggattcaggcctccactctcaaggagttactagacctcaaggcccaacacccggacgcaaagctcgttgttggaaatactgagatcggcattgaaatgaaatttaagaacatgttgtttccgatgatcgtttgccctgcttggattcccgagctcaattctgtggagcatggccctgacggtatctcattcggtgccgcttgtccgctttctattgttgagaagactttagtggacgcggtcgccaaactgcctgcccagaagacagaagtttttcgcggagtgctcgaacagttgcgctggtttgcaggtaaacaggtcaagagtgtggcatcagtcggcggtaatatcatcaccgcaagcccaattagtgatcttaaccccgtgttcatggcatccggcgcaaaacttacgctggttagtcggggaactagacgtaccgtgcagatggaccataccttcttccctggttaccggaagacgctgctgagcccagaggagatattgctcagtatcgagattccctactctagagagggcgaatatttttcagcctttaagcaggctagtagaagagaggatgatatcgccaaggtgaccagcggaatgagagtgctgttcaaaccaggaaccaccgaggttcaagaactggcactttgttacgggggtatggccaatagaacaatctccgctctgaaaacgactcagcgacaactctcaaagttgtggaaagaagaactgcttcaggacgtatgtgcaggtcttgccgaggaactccacttgccaccagacgcaccgggtggcatggtggatttcaggtgtacacttacccttagcttctttttcaagttctacctcacagtgctacagaaactggggcaggaaaacctggaggacaagtgcgggaagctagatcctacctttgcgtctgcaaccctgttattccagaaggacccccctgcggacgtgcagcttttccaggaagtcccaaaaggacagtcagaagaggatatggtgggtcgtccactgccacacctcgcagcagacatgcaggcatccggcgaggctgtgtactgcgatgatatacccaggtacgagaacgaactttccctaagactggttaccagcacacgagcacacgccaaaatcaaaagcatagatacaagcgaagccaagaaggtgccaggttttgtttgtttcatcagtgccgatgatgtgccgggttccaatatcacaggcatctgcaatgacgaaacggtcttcgctaaagacaaggtgacatgtgtcggccacatcatcggcgctgttgtggcagacacccctgaacatacccaacgagcggcacagggggtaaagattacttacgaggagcttcctgccataattacaattgaggacgccattaagaacaattcattctacggacccgagctgaaaatagagaagggggatctcaagaaaggattctccgaggctgacaatgttgtgagcggggagatctacatcgggggacaggaacacttctatctagagacccactgtactatcgccgtgcctaagggggaggcaggggagatggaattgtttgtctcaactcagaacacaatgaaaacacaatcttttgtcgccaagatgttaggcgtcccagctaatagaattgtagtccgcgtaaaaaggatgggtggcggtttcgggggtaaggagacgcgttcaaccgtggtgtcaaccgccgttgcattagctgcatacaaaacgggaagacctgtcagatgtatgctggaccgagatgaagatatgcttattactggcggaagacatcctttcctggctagatacaaggtaggttttatgaagactggtacagtggtcgctctagaagttgatcatttctctaatgtgggcaacacacaggacctgtcacagtccattatggaaagagctttgtttcatatggacaattgttataagattccgaacatcagggggaccggacgcctctgcaagacgaacttgccttcaaacactgctttcagaggcttcggcggacctcaggggatgctgattgccgaatgctggatgagcgaggtcgccgtcacctgcgggatgccagcagaggaagtgcggcgaaaaaatttgtacaaggagggagacttgactcattttaatcagaagctggagggatttaccctccccagatgctgggaggaatgtttggcttcgtcccagtatcatgcccgtaaatctgaagttgacaaattcaataaagagaactgctggaagaagcgcggtctttgcatcatccctacgaagtttgggatatcatttaccgtgccatttctgaaccaagcaggagccttgctgcatgtgtatacagatgggtctgtcctcctgactcacggtggtaccgagatgggccaaggtctgcacacaaagatggtgcaggtggcctctagggcccttaaaattcctacaagcaagatatacattagtgagacctctacaaatacggtccctaatacatctcctacagcagcttcagtgagcgctgacttgaacgggcaggctgtctacgccgcttgtcaaacaatcctgaagcgccttgaaccgtataaaaaaaaaaacccatccggatcctgggaggattgggtgacagcagcctacatggacaccgtatccctaagtgccaccggcttttacaggacaccaaacctgggttattctttcgaaacgaacagcggcaacccgttccattacttttcctacggggtggcctgtagcgaggtagaaatcgattgtctaaccggtgatcacaagaatttgcggaccgacattgttatggacgtgggctcctccctgaatccagccattgatattggtcaggtggagggagcttttgtgcagggcctcgggcttttcactcttgaggagttgcactactcaccagagggctcacttcacacacggggaccatccacgtataagatccctgcattcggcagtattcccatagagttccgcgtctccctccttcgggactgtccaaataaaaaagcaatctacgcctccaaggccgtgggcgagcctcccctatttcttgctgcatccatttttttcgccatcaaggatgctatccgtgcggcacgcgctcaacacactggcaataatgtaaaggaattgtttcggctggactcaccggctactccagagaagatacggaacgcttgcgtggacaagttcactactctgtgcgttaccggcgtgcccgagaactgcaaaccatggtcagtgagagtgtag

SEQ ID NO: 246999 - DNA, 1896 bp, synthetic construct
  misc_feature 1..1896: note = Description of Artificial Sequence: Synthetic coding sequence
  source 1..1896: mol_type = other DNA
atgaagttcgccgagcacctgagtgcccacataaccccagagtggcggaaacagtatatacagtacgaggcctttaaggacatgctgtactcagctcaggaccaggcaccttctgtggaagtcaccgacgaggatactgtaaagcgttacttcgccaaatttgaggaaaagttctttcagacatgtgagaaagaattggctaaaatcaatacgttttactcagagaagcttgctgaggcccagcggaggttcgccaccctccagaatgagttgcagtcatcactggacgcacagaaagaatctacaggagttacgaccctgcgtcagaggagaaagcccgtttttcacctatcgcatgaagagcgggtgcaacatcgcaatataaaggatctgaaacttgccttctctgagttttatctgagtttgattctgctgcaaaactatcagaatcttaactttaccgggttccgaaagattctgaaaaaacatgataagatcttagaaacaagcaggggcgctgactggcgggtggcccatgtcgaggttgctcctttctacacttgtaaaaaaataaaccagctgattagtgagacagaggctgtggtgactaacgaacttgaagacggggatcggcagaaggcaatgaaacgattaagggtcccgccactgggggcagcccagcctgcccctgcttggactacttttagagtcgggctgttttgcgggatctttatcgttctcaacattacgctggtcctggccgcagtctttaaactcgagactgatagatcaatttggcctttgataagaatctatagaggtggcttcttgctgatcgaatttttgtttctactgggcataaatacatatgggtggagacaggccggagtaaaccatgttctgatcttcgagttgaaccccaggtccaatctgagtcaccagcatctgtttgagatagctggctttcttgggattctgtggtgtctttctctcctggcctgctttttcgcccctataagcgtgatccccacttacgtgtaccctctggccctgtatgggttcatggtcttcttcttaatcaatccaacgaaaactttctattacaagagtcggttctggttacttaagttgctgttcagggtatttacagccccttttcataaggtcggattcgcagacttttggctggccgaccagttgaactctctgagtgtaatcctgatggaccttgagtacatgatttgcttctactccctcgaactaaaatgggacgagagtaagggacttctccccaataacagtgaagaaagagggcactctgacaccatggtgttcttctatctatggatagtcttctacattatcagctcctgttatacacttatttgggaccttaagatggactggggactgtttgacaagaacgccggtgagaacacttttctaagagaggaaatagtttaccctcagaaggcgtactattactgcgcaatcatcgaggacgtcatcctgcggtttgcttggaccatccagattagcattacaagtactacactgctgccccattccggcgatatcatagccaccgtttttgcccctcttgaggtgtttaggaggtttgtgtggaactttttccgcctggagaacgagcacttgaataattgcggggagttccgggctgtaagggatataagcgtcgccccactgaacgccgacgatcagacattactcgaacagatgatggatcaggatgatggtgtcaggaatagacagaaaaataggtcgtggaaatacaaccaatccatctctctccggagaccaaggctcgcctcccagtcgaaagctagggataccaaggtgttgatagaggacaccgacgatgaagccaatacatag

SEQ ID NO: 247000 - DNA, 2091 bp, synthetic construct
  misc_feature 1..2091: note = Description of Artificial Sequence: Synthetic coding sequence
  source 1..2091: mol_type = other DNA
atgaagtttgctgagcacctttctgcccatattacacccgagtggaggaaacagtatattcagtatgaggctttcaaggatatgctgtattctgcgcaggaccaggcccctagtgtcgaagtcacagacgaggacacggtcaagcgatattttgccaagtttgaggagaagttcttccagacctgcgagaaagaactggccaagatcaataccttttattccgaaaagctagctgaagcccagaggcgctttgctaccttacagaatgaactgcagtcaagcctcgacgcacaaaaggagtctacaggagtcacaacactcaggcagaggagaaagccggtgtttcatttgtctcatgaggagcgcgtgcaacaccggaacataaaagatctcaaacttgctttcagcgaattttacctatcactcatattactccagaattatcagaacctgaactttaccggattccgcaaaatcttgaagaagcacgacaaaatcctggagacgtcacggggagccgactggagggtggctcacgtagaggtagccccattttacacgtgtaaaaaaatcaaccagctgatatcagaaacagaagcagttgtcaccaatgagctggaagatggcgaccgacagaaggcaatgaagagattacgggtcccgcctcttggagccgctcaaccggctcccgcttggaccacatttagggtcgggttattttgcggaatttttatcgtcctgaacatcaccttagtgctggctgcagtttttaaacttgagaccgatcgaagtatctggccactgattcggatctatagagggggattcctgctgatcgagttcttattcctgttagggatcaatacctatggttggagacaagcaggagtaaaccatgtgttgatcttcgaactgaatcctcgctccaatctgtcacaccagcacctatttgaaatcgctggttttctggggatcctgtggtgtctttccctgctggcgtgcttttttgctcccatttccgtgatccctacctacgtgtatcccctggcgctgtacggttttatggtgttttttttgattaaccccacaaaaaccttttattataaatctagattttggctgttaaagctgctttttcgtgttttcactgccccttttcataaagttgggtttgcagatttctggctggctgaccagctgaactcacttagcgtgatccttatggacctggaatacatgatctgtttctattctctggaactgaagtgggacgaatccaagggcctattaccgaataacagtgaggaatctggcatttgccacaaatatacctatggagtgcgggcaattgtacagtgtatcccagcctggttgagatttattcaatgtctccgccgataccgcgataccaaaagagcctttccacatcttgttaatgctggtaagtattctactaccttctttatggtgacgttcgccgctttgtattccacgcacaaagagaggggtcactccgatacaatggtgtttttttatttgtggattgtgttttacataatttcctcctgctacacactgatctgggatctgaaaatggactggggcttgttcgataagaacgccggagagaatacatttctgcgcgaagagatcgtatatccccagaaagcttactattactgtgcaatcatcgaggacgtgattttgcggttcgcctggactattcagatctccattacctccaccacgctgttgccgcactctggcgacattatagccaccgtctttgccccattagaggtcttcaggcggttcgtgtggaacttctttagactggagaatgaacacctcaacaactgcggagagtttcgggcagtgagagatatcagcgtagcccctctcaacgcggacgatcagacacttctggagcagatgatggatcaggatgatggcgtcaggaataggcagaaaaaccggtcatggaaatataaccaatcaatttcgctgagaagacccagactggcttcgcagagtaaggcccgtgataccaaggtgctgatagaagatacagatgatgaagcaaacacctag

SEQ ID NO: 247001 - DNA, 543 bp, synthetic construct
  misc_feature 1..543: note = Description of Artificial Sequence: Synthetic coding sequence
  source 1..543: mol_type = other DNA
atggagtcctggtgggggttgccatgtctcgcctttttgtgttttctgatgcacgccaggggccaaagagatttcgacttagctgacgccctggatgaccccgagcctactaagaaaccaaatagcgatatttatcctaagcctaagccaccctactacccgcagccagaaaacccggactcaggcggtaatatctacccaaggcccaagcccagaccccagccccagcctgggaatagcggaaactcgggaggatactttaacgatgtcgatcgggatgacggcagataccctcctcgaccaagaccgaggccacctgctggcggagggggaggaggctattcctcatatgggaatagtgacaacacgcacggcggagaccaccacagtacttacgggaacccggagggcaatatggttgcaaagattgtgagccccattgtgtccgtcgtagtcgttacactgcttggcgcagccgcttcttacttcaagctgaataatcggaggaattgctttcgcactcatgaaccagaaaatgtgtag

SEQ ID NO: 247002 - DNA, 588 bp, synthetic construct
  misc_feature 1..588: note = Description of Artificial Sequence: Synthetic coding sequence
  source 1..588: mol_type = other DNA
atggagtcatggtggggccttccttgcctcgccttcctctgcttcttgatgcatgccagaggtcagagagatttcgatctcgcagatgctctggatgaccctgagccaactaagaagcccaacagcgatatttatcctaagcccaagcccccttattatcctcagcccgaaaaccccgactctggcggtaacatctaccctagacctaaaccaaggccacagcctcaacctggaaacagcggcaactcaggcggatacttcaacgacgtggatcgcgatgatggcaggtatccccctcgccctaggcccaggcccccagccggtggcggagggggtggttacagttcctacggaaactcagataacacccacggcagaggtggatatcgcctgaatagtcggtacggtaacacttatggaggtgatcaccactctacctatggaaatcccgaaggcaacatggtggcgaaaatagtctccccaatcgtgagtgtcgtggtcgtaaccttactgggcgcagcagctagttattttaagttgaacaatcggaggaattgcttcaggacccacgaaccagagaatgtttag

SEQ ID NO: 247003 - DNA, 546 bp, synthetic construct
  misc_feature 1..546: note = Description of Artificial Sequence: Synthetic coding sequence
  source 1..546: mol_type = other DNA
atggagtcctggtggggtttaccctgtctggccttcctgtgttttttgatgcacgctcggggtcagcgggactttgaccttgctgatgcgctggatgaccctgaaccaactaagaaacctaactctgacatctacccgaaacccaagcctccttactacccccagccggaaaatccagatagtggcggaaacatctatcctcgcccaaagccccgaccacagccccagccaggcaacagcgggaatagcggaggctcttatttcaacgatgtcgatcgtgatgacggaaggtatccacctcggcctcggcctcgtccccctgccggaggtgggggaggtgggtacagctcttatgggaattctgataatacccatggtggggatcaccattccacgtacggaaaccccgagggcaacatggtcgccaaaatagtgtcccccatcgtcagtgtcgtggtggtgacgctgctgggggcagccgcttcttactttaagctcaacaaccgcaggaattgttttcgtacacacgagcctgaaaacgtgtag

SEQ ID NO: 247004 - DNA, 129 bp, synthetic construct
  misc_feature 1..129: note = Description of Artificial Sequence: Synthetic coding sequence
  source 1..129: mol_type = other DNA
atggttgctaagatcgtttctcccattgtctccgtcgttgttgtgaccctccttggggcagccgcatcttattttaagctgaataacaggaggaactgcttcagaactcacgagccagaaaacgtttag

SEQ ID NO: 247005 - DNA, 10650 bp, synthetic construct
  misc_feature 1..10650: note = Description of Artificial Sequence: Synthetic coding sequence
  source 1..10650: mol_type = other DNA
atgtttccaatgcagaaagggagtctgaatctcctacgacagaagtgggagtcctgcgactaccagcgctcggagtgtcatcccagggactctcattgtactatattccagcctcaggagtccaagctcttggcccctgagggtgaggtagtttccgctcctcagagcctggatcctacctccctgccttatagtaccggagaagagatgtggagttcaaagcccgaagagaaggactccgttgacaagtctaacaacactcgtgaatacgggcgacccgaagttctgaaagaggacagtctgagctcacgtcgcaggatcgagagatttagcattgctctcgacgagctgagaagtgtttttgaagctcctaagtccgggaataaacccgctgagtatgggggtaaagaggttgaaatcgagcgtagtctgtgctcacctgcctttaagtctcaccccggttctcagctggaagattcagtcaaagatagcgataagaagggaaaggaaacctctttcgataagatgtcacccgaaagcgggcattcccgcattttcgaagctacagcaggaccaaacaagcccgagtctggctttgctgaggattctgcagctaggggcgaaggtgtcagcgacctccacgaggtggtgtctctgaaggaacgtatggctcgttaccaggccgcagtgtctagaggcgattgcagatccttttccgctaacatgatggaagaatcagagatgtgtgcggtgccgggagggctcgcaaaggtgaagaagcagtttgaagacgaaattaccagttcgagaaacacgtttgcacagtatcaatatcagcatcagaataggtcagagcaggaggctatccatagctctcaagtagggacctctaggtcaagccaggagatggcacgcaacgaacaagaagggtccaaagtccagaaaatcgacgttcacgggacggaaatggtgtcacatctagagaagcacactgaagaggttaaccaggcatctcagtttcaccagtacgtgcaggagactgttatcgacactccagaagacgaggaaattcccaaggtgtccacaaagctcctgaaggaacaatttgaaaaatctgcacaggaaaagatcttgtatagtgataaggagatgaccactccagccaagcagattaagacagaatccgagtatgaggagacttttaaaccctcgtccgtggtgagtacatcatcaacttcttgcgtgtcgaccagccagcgaaaggaaacgagcacaactaggtattctgatcacagcgtgactagctccactctggcacagatcaacgctacctcgtctggtatgacagaagagtttccaccaccaccacctgacgtattgcagacgtccgtcgatgtgacagctttcagccaatcgccggaactcccctcacctccccgacggctgccagtgccgaaggatgtgtactcaaaacaacgcaatctgtatgagctgaataggctctacaagcatattcatcctgagctgcgaaagaacctggagaaggattatattagcgaagtgtccgagattgttagcagtcagatgaatagtgggagcagcgtcagcgccgatgttcagcaggccagatatgtctttgaaaataccaacgattcatcccaaaaagatctcaattctgagagggagtacttggagtgggatgaaattctgaagggtgaagtgcagagcataaggtggatattcgagaaccagccacttgacagtattaacaatggctcccccgatgagggcgatatctctcggggtatcgcggaccaagagatcattgccggaggggacgtgaagtatactacatggatgtttgagacccagcccattgacactctgggcgcatattcttccgacacggtggaaaatgcggagaagattcccgagctggccagaggcgatgtgtgtactgccagatggatgttcgaaaccaggcccctggactctatgaacaagatgcatcagagccaggaggaatccgcggttacgatcagcaaagatataacgggcggagacgtcaagactgtgaggtatatgtttgagacgcagcacctggatcaactggggcagttgcactccgtcgacgaggttcacctccttcagctgcgatctgagctgaaagagatcaaaggcaacgtgaagagaagcatcaaatgtttcgaaacgcagcctctttatgttatccgggacgggtcaggacagatgctcgagataaaaactgtgcatagggaggacgtggagaaaggagatgtcagaacggcacgctggatgttcgagacacaacctttggacacaatcaacaaggatattaccgaaatcaaggtggtccggggaatatccatggaagagaatgtaaaagggggtgtatctaaggctaagtggttgtttgaaacccagcccctcgagaaaattaaggaatccgaagaggtgattatcgagaaggagaaaattatcggtaccgacgtgtctagaaaatgctggatgtttgaaactcaaccgctagatattttgaaggaagtccccgatgccgactctctgcagcgggaggagatcataggaggagacgtacagacaaccaaacacctcttcgagactcttccgatcgaagccttaaaggattcacctgacattggcaagcttcagaagatcacggcttccgaagaggagaaaggggacgtgagacatcagaagtggatctttgagacacaacctctcgaagatattagaaaagacaagaaggaatacaccagaacagtgaaactcgaagaagtcgatagaggggacgttaagaattatacacacatatttgaaagcaataatcttattaagttcgacgcttcccacaagatagaggtggaaggagtaacacgaggcgctgtcgagctaaataagtcattgttcgagactacgcctctttacgcaatccaggaccccctaggcaagtatcaccaggtgaagacggtacagcaggaggagatcgttcgaggtgacgtgcgtagctgcagatggctgtttgagacccgcccaattgatcagttcgatgagtcaattcacaaattccagataattcggggaatctcagcccaagaaatccagactgggaacgtcaagagcgccaaatggcttttcgagacacagcccttagattcaatcaaatacttcagcgatgtggaagagaccgaaagcaaaacagagcaaactcgagacattgtaaaaggagatgtgaagacgtgcaagtggctgtttgagacccagcctatggaaagtctgtacgagaaggttagcctgatgaccagctcagaggaaatccacaagggtgacgtgaagacctgcacctggttgttcgagacccagcccctggacacgatcaaggacgactcggaaacggcggtcaagctccagactgtgaagcaggaggaaattcaaggaggtgacgtccggacagcttgtttcctattcgagaccgaaaacctggactcgattcagggggaagaggtgaaagagattaagccagtggagatggatatccaggcaggggacgtaagtagtatgcgctacaagtttgaaaaccaatctttggactcgatctcatccagctcagaggaggttctgaagaagatcaaaacacttaaaaccgaggacatccagaaagggaatgtcctgaattgtaggtggctctttgaaaaccagcctatcgacaagatcaaggaatctcaggagggcgatgagtgcgtcaaaaccgtgacagatatccaaggtggtgacgttagaaaaggatgctttatctttgagactttttcactcgacgagatcaaggaggagagcgattacatcagcaccaaaaagaccataactgaggaggtgatccaaggggatgtgaaaagctatagaatgctgttcgagacccagcccctgtacgcgatccaagacagagagggaagctaccatgaggttaccaccgttaagaaggaggaagtgattcacggagatgtaaggggtacacggtggctcttcgaaactaagcccctggatagtattaataaatccgagacagtgtatgtaatcaaaagtgtgacacaggaggatatccagaagggcgacgtgtcctccgttagatataggtttgaaacacagcccctggatcagatcagcgaagaatcacacaacatcatgccttctattgatcacatacagggcggaaacgtcaaaacctcgcgccagttctttgaatccgaaaattttgataagaacaattacatcaggacggtgtcagtgaacgagattcaaaagggcaatgtgaaaaccagtacgtggcttttcgagacccacacaatggatgaactacgaggagagggcctcgaatacgaaaacatcaagaccgtgactcaagaggatgttcagaaaggcgatgtcaaacaggcagtgtggctgttcgagaaccgaacctttgactccattatggaggcacataaagggataactaaaatgacaaaggaggagattcccccatcagatgttaaaaccacgacttggctgttcgagactacgcccctgcacgaattcaacgaaactcgggtggaaaaaatcgaaattatcgggaagagtataaaggaaacacttgaagacctgtactctcagaaggtcatccaagcccctgggatcatcattgaggccgacgaaataggtgatgtgcgaatggccaagtacaagctcatgaatcaggcgtctcccgagattcagaaggaggagatcattcgagctgacttgcgaaatattatggtgaacctattgagcaagcgggactgtaccgagcgcgagatacttatctctgaagaagagaagggcaacgtgaacttaacaaagactcagcttttgaatcgatcaaccgagttccatgccgagaaggaggagattgtgaaaggagacgtacagcaggcaattaagaatctgtttagcgaagaaagatccgtcaagaaggggatcctgatccaagaggacgagaaaggtgacattaatatgacaatctactgcttgctccacgagaatgacggcgacacgatagaaagggaggaagtgattggtggcgacgtcaaacggacgatccataatctcctctcaagtacatccaataacaaaatcagcgaacgggcaaagattgatgcttcggagcgagggaatgtgcagttcttcacaacgtgcatagaggcaggggcactggattacttgaagcagttgcacacagaaagcaatgagactttaaccgccaagaagcaagaaggcgagaaagagattatagggggagacgtggagggtactaaactcctgttgaagaaacggcagtcattagtggagaggaccgtgtccgaaacagatattattcccggtgacgttcacaacactgtcaaagtgttcatgaccgagccacaatcgacatttggcaaaattccaaaagaggagattattaaaggcgacctcacatccacactgaactcactaagccaggcggtgaatcagaagacagttaccaaaacggaagaaataattaaaggaaatatgctggcaacattaaaatcactgaaagaatcatctcataggtggaaagaatcaaagcaacccgatgcaataccaggggatatagaaaaagctattgaatgtcttgaaaaagcgacaaacacaaagacagaaatcctgaagaaggaacttctgaaggacgacctcgaaaccagcctgaggagtctcaaggaggcccaaagatcatttaaggaggtccataaggagggtgtgattaagaaagatgctaaggctgtgatggccggttcctcaggtgagcaaaaaaccgatattcatcaggtggctgttcagaggaacaagaactccctgctgcagccgaagcccggtcctttcgaacccgctgccaagtggcagggcggtgcagatacacttagccagactatgggaaagagctgtcatgggaatctagtggaggaacgcacagaagtcaaccttcctaaagcgcctaaaggcaccgtaaagatcgtgattgacagggaacagaacaacgacgccctggagaagtcactacggcgactatccaacagtcaccacaagtctaacgtgctcgagtctggtgataagaccggagtttggacggacaccacaggtgaacagcatttacgcgacgagtatatgtccagacagctgacctccaccgtgtctgtcaagaataacctcactaccaaggagtcagatagagcagtgcgtgagcttaagaaagatgatgtgttcaactccatacaatcggcaggaaaaaccgttgggaaacagcaaacgtatgaactgagaaacgaccaccaaaagatggaaggcttccacattaaaagcccaaaaaaaactaagaacattaagatccttacagacacccagtcatcgaagcctagcccaacccagcatccagtctcaatgccagtgggaggcacttacgacctgtcgggagatttccaaaagcagacactgttaaagcaagagacgaagtattccaacaaggatatcaagaagaaaaatataaatcttcagccaatgtggcaattactccccgtcgaacaggatacctcgaatgtgacagaaatgaaagtgagcgagaaatctcataacacctttaaagccacgaataagaagcgagagactgatgtgcatctgaagagtcaggattttcttatgaagaccaacacaagcaccggactgaagatggccatggagagaagcttgaatcctatcaactttaatcccgagaataatgttaaggagagtgaatgtcctctgccaccaccctcccctccccctcctcctccatccaatgccagctccgagattgaatttccattacctcctcctccccctttaatgatgttccctgaaaagaatggcttcctcccttctctgagcactgaaaagataaaagccgaatttgagtcatttccaggtttacctctgccccctcctccggtagacgaaaagtcggagagggagagctcttcaatgtttctgccacctccgcctcccccaacgccatctcagaaacctgcacatctcctcagtagctccgcaccagagaagcatagtggtgattttatgcagcagtatagtcagaaggaggcaagcaattctcagaattcccaagcgaagatcattactgggaaaaccggagtgctgcctccgccaacattgcccaaaccgaagctgccaaaacatattaaagacaacaaaaacgacttcagtcctaaagtggaactagcaactagcctgtccgacatggagtgtaaaatcaccacatccaaggatcaaaagaaagtcatggtgatgacaagcagtgaacacactgaaacaaagcagaatgtcatctccaagtcactcgatgaacgaaagcagttgtccatcgacagtgctaattgcctatcacacaccgttcctggaacctctgccccacgcaagaagcagatcgctccccttattaagagccatagtttccccgagagcagtggccagcagaaccccaaaccttatatgcgcaagtttaagaccccactgatgattgccgaggaaaaatatcggcagcagaaggaggaaatcgaaaagcaaaaacaggaaagctcgtattataatatcgtaaagacccaaagtcaaaaccagcacattaccgaggtggaaaaagaaatgccactccagaaaaccaacgaagaagtgtcgctgagtggcatcgatagcgagtgcacggtagtgcaaccatctccgggaagccagtccaacgctagaattctgggcgtttgctctgacaatcagctaagtacaacgtcacctgaaacggttgctgcaaagagactacatcacgtgcttgctgcctctgaagacaaagataaaatgaaaaaggaggtgttacagtccagtcgagacatcatgcaatcaaagagcgcttgtgagattaagcagtcccatcaggagtgtagtactcagcaaactcaacagaagaagtacctcgaacaattacacttaccccaatctaagccaatttcacctaatttcaaagtgaaaactatcaagctgcctacactggatcataccctcaacgagactgaccactcgtatgaaagtcataagcagcagtccgaaatagacgtgcagactttcaccaaaaagcagtacctgaaaacgaagaagaccgaagctagcacagaatgttcccataagcagtctctcgccgagagacactaccagctgccaaagaaagaaaagcgagtgactgtccagttaccgacagaaagcattcagaaaaaccaggaggacaagttgaaaatggtgccgagaaaacaaagggaattcagcggcagtgacaggggtaagttgcctggaagcgaagagaagaaccagggcccttccatgatcggcagaaaggaagaaaggttgattaccgaacggaagcatgaacatcttaagaacaagtctgccccaaaggttgtgaaacaaaaggttattgacgctcacctggactctcagacacaaaacttccagcagacgcagattcagacagctgagtctaaagccgagcataagaaactaccccagccctataactctctgcaagaggaaaagtgtctggaggtgaaaggaatccaagaaaaacaagtgttttccaacactaaggatagcaagcaggagataacacaaaacaagtcctttttcagttctgtcaaagagagccaacgcgacgacggcaagggagctttaaacatcgttgagtttctgcgcaagcgggaagagctccagcaaatactgagcagagttaagcagttcgaggctgagcccaacaagtccggactgaaaacctttcaaactctcctgaacactatccctggttggctgatttctgaagacaagcgcgaatacgccgtgcatatcgcaatggagaataatctggaaaaggtcaaggaggagataacacacattaaaactcaggcagaggacatgcttgtgtcatacgaaaatattattcagactgcgatgatgagcagtaagaccggtaaaccgggaaacaaaccaaccagcctcgatgaaacgtcctctaaagtatcaaacgttcacgtttcaaataacaaaaactctgagcagaaagagaataagatcgctaaagagaagactgttcagcatcaagttgcagcccaccacgaagctacagttcgttcccacgtgaaaacacatcaggagatcaagctagatgattccaacattccccctccttctctgaagacacgccctcctagccccaccttcatcactatagagtccacagccaggcggacagagaatcccactaaaaacgaattaagccaaagcccaaaaaaggattcctatgtggaaccaccacctcgaagaccaatgtcccagaaatcagagatccaccgggcaaacaccagcccttccccacccaggagccggtctgaacagttggtgcgcttgaaagacacaactgcaaagctgtccaagggagccatcccctgtcccgcagctacccccgtccccatagtggagaaaaggtcagagatcattatgagcccagccaccctaaggaggcagatcaaaatcgagactcggggacgcgatagtcctcccaccatcactatacctgtaaatattaaccacgctgcgagcgggtctttccgtgaaagcgtggacgcgcaagaggaaatccggaaagtggaaaaaagggcaacatatgtccataaggatggattgaattccacggaccacatggtccctgatacagaatcctacgatgctgtggagatcatcagaaaggtcgctgtccctccaaggctcagtgagcacacgcagcggtacgaggcagctaatcgcacggtgcagatggctgaaaacttcgtgaatgacccagagaacgagattaataggtggttcagagaatttgagcacggtcccgtttccgaagccaagagcaaccgcagggtctatgcaaagggtgaaacaaaccacaacatccagcaggagagcaggactttttgtaaggaagagttcgggctgactagtttaggcaatacctcctttaccgatttttcctgtaaacatccacgcgagcttcgagagaaaatccctgtaaaacagcccaggatctgttcagaaacccggtccctgtctgaacatttcagcggtatggacgcctttgaaagtcagatagtggaaagcaagatgaagacatcatcaagccactcatccgaagcaggcaaatcaggatgcgatttcaaacacgctcctccaacttatgaagacgtaattgctggacatatacttgatatctcagatagccctaaggaggtgcgcaaaaacttccaaaagacatggcaggagtcaggcagagtattcaaaggccttgggtatgccacagccgatgcttccgcaacggaaatgcggacaacatttcaggaggagtctgcctttattagtgaagctgctgcccctagacaggggaacatgtacacgctctccaaagatagcctttccaacggggtgcccagtggaaggcaggccgaattcagctag

SEQ ID NO: 247006 - DNA, 2817 bp, synthetic construct
  misc_feature 1..2817: note = Description of Artificial Sequence: Synthetic coding sequence
  source 1..2817: mol_type = other DNA
atgttccctatgcagaagggatctctgaacttgctgagacagaagtgggagtcttgcgactatcagcgctctgagtgtcaccctagggactctcattgcactattttccagccccaggagtcaaagctcttagcaccagagggggaagtggtcagcgcaccacagtctctggaccccacatcactaccatacagtaccggagaagagatgtggtcctctaaaccagaagaaaaggatagcgtggataagagcaacaacacccgcgaatatgggagacccgaggtgctaaaagaggactcactgtcatctagacggcgaatcgagaggtttagtatagctctcgatgaacttcgaagcgtatttgaggcccctaaatcagggaataaacctgcagaatacgggggtaaggaagtcgagatagagcgtagcctttgctcccccgcttttaagtcgcaccctggctctcagctagaagattctgtgaaggactcagataaaaaaggtaaagagacatccttcgacaagatgagtccggagagcggtcattcccgcatcttcgaagcaaccgctggccctaataagccagagtctggattcgctgaggactccgcagcgaggggcgaaggtgtgtccgatttgcatgaagtggtgtccctcaaggagcggatggccagatatcaagcggcagtgtccaggggcgattgccgcagcttctccgccaacatgatggaagaatccgagatgtgtgccgtgccagggggtttggccaaggttaagaaacaatttgaggacgaaattacaagctcaagaaatacatttgcgcagtaccagtaccaacaccaaaatcgaagtgaacaagaggctattcactccagccaggttgggacatcaagatcatctcaggagatggctagaaatgagcaagaaggatcaaaagtccagaagatagacgtccatggcacagagatggtgtcccatctcgagaagcatacagaagaagttaaccaggcatcgcagtttcaccaatacgtccaggaaacagtcatcgacacccccgaagatgaggaaattcctaaggtgagcactaagctgctgaaagaacagtttgagaaaagtgcacaggaaaaaattttgtattcagataaagaaatgactacaccggcaaaacagatcaagaaattgctcttacaggacaaagaaatttgtatcctctgtcaaaagactgtttatccaatggaatgtctggtggcagataaacagaacttccataagtcatgctttcgctgccaccactgtaactcaaagttgtctctcggaaattatgccagccttcacggtcagatttactgcaaaccgcactttaagcaactcttcaagtccaagggcaattacgacgagggatttgggcataaacaacataaagatcgctggaactgtaaaaatcagtcccggtcagtagacttcatcccgaatgaagagccaaacatgtgcaaaaatatcgccgagaatactctggtcccaggagaccgaaatgaacatctggatgctggcaatagcgaggggcagcgtaatgacctgaggaagttgggggagagaggtaagctcaaagtgatctggccgcctagtaaggagatccccaaaaaaaccctcccgtttgaagaagagctgaagatgtcaaagcccaaatggcccccagagatgaccacattattatcccccgagttcaaaagtgagtctctgctggaagatgtccgcacccccgagaacaagggccagagacaggaccactttccctttctgcagccatatctccagtcgacccatgtgtgccagaaggaagacgtgatcggtattaaggaaatgaaaatgcctgaaggaagaaaagacgaaaagaaggagggcagaaagaatgtccaggaccggccttctgaagctgaggatacgaaatcgaacaggaaatccgctatggatttgaacgacaacaacaacgttatcgtgcagtctgccgaaaaggagaagaacgaaaaaaccaaccagacaaatggggcagaggtccttcaggtgacaaacacagacgacgagatgatgcctgagaatcataaagaaaacctgaacaaaaataacaacaacaattacgtcgcagttagctatctgaataactgccggcagaaaacaagtatcctagagtttctggacctcctgccactctccagtgaggccaatgacaccgcaaatgagtacgaaattgagaagctggagaataccagccggattagtgagttgctggggatattcgagagcgaaaagacatacagtcgcaatgtcctggctatggcacttaagaaacaaacagatcgcgctgccgctggcagccccgtccaacccgctcccaaaccgtcactaagtagaggcctcatggtcaaaggaggatcatccattatctcccccgataccaaccttctcaacatcaaaggcagccattcaaagagtaaaaacctacacttttttttctcaaatactgttaagattactgcttttagcaagaagaatgagaatatcttcaactgtgatctcatcgactctgttgaccagattaaaaacatgccctgtcttgatctgagagaattcggcaaagatgtgaagccgtggcacgtagagaccacagaagctgccagaaacaatgaaaatacgggctttgacgccttaagtcatgagtgtaccgccaaacctctcttcccaagggtcgaagttcagtccgaacagctcacagttgaggaacagataaagagaaatcggtgttacagcgacactgagtag

SEQ ID NO: 247007 - DNA, 10650 bp, synthetic construct
  misc_feature 1..10650: note = Description of Artificial Sequence: Synthetic coding sequence
  source 1..10650: mol_type = other DNA
atgtttccaatgcaaaaaggaagcctgaacctgttaaggcagaaatgggaaagctgcgactaccagaggtctgagtgccatcccagggattcacattgcacaatatttcaaccgcaggagagcaagctgctggcgcctgagggcgaagttgtgagcgcacctcagagcctggaccccacctcactcccctacagcaccggagaggaaatgtggtcatccaaacctgaagagaaagattccgttgacaagtctaacaacacccgcgaatatgggagacctgaggtcctgaaggaggacagtctgagcagccgacggagaatagaacgcttctctatcgccctggatgaattgcgcagtgtgtttgaagcacccaaaagcggcaacaaacctgccgaatacggcggaaaagaagtggagattgagagatccttgtgcagtcctgcctttaaatcccaccccggttctcagctggaagattcggtgaaagacagtgacaagaaaggaaaagagacttcttttgataaaatgtcgccagaatcagggcattccaggatcttcgaggctactgcaggtcctaataaacccgagagcggatttgccgaggacagcgctgccagaggggagggggtgagtgaccttcacgaggtggtgtcactgaaggagcggatggccagataccaggcggcagtgtcccgaggcgattgtagatccttctctgccaacatgatggaagagagcgagatgtgtgctgtgccagggggactggcaaaggtcaagaaacagttcgaagacgagatcacgagttcccgcaacacgtttgcccagtatcagtaccagcaccagaaccgctccgagcaggaggcgatacatagttctcaggtgggcacctccaggagcagtcaggaaatggcgagaaacgaacaggagggatctaaagtacagaaaatagacgtacatggaacggagatggtgtcccacctagagaaacacactgaagaggtgaatcaggcatcccagttccaccagtatgtgcaggaaaccgtcattgatacccctgaggatgaggaaatcccaaaagttagcacaaaactgctaaaggagcagtttgagaagtccgcccaggaaaagatactttactctgacaaggaaatgactacacctgctaagcagattaagacagaaagtgagtacgaagaaacctttaagccatcttctgtggttagcacatcatccaccagttgcgtgtccacgtctcaacgcaaggagacttccactacccggtacagcgatcattctgtgacctcctcaaccctggcccagattaatgccacgtcatcaggcatgaccgaagagtttcccccacctcccccagacgtactgcagacttctgtcgatgtgactgccttctcacagtcccccgaactgcctagccccccacggagactaccagtgccaaaagatgtgtattccaagcagaggaacttgtatgagctgaacagactttataagcatatccatccggagttgagaaagaaccttgagaaagactacataagcgaggtcagtgaaattgtctcttcacagatgaactctggcagcagtgtgagcgccgacgtccagcaggcccgttacgtgtttgagaacacaaatgattcaagccagaaggacctaaacagtgagagagaatacctcgaatgggacgagattttaaaaggcgaagttcaatccattagatggatctttgaaaatcaacctctggatagtattaacaatgggagcccggatgagggagacatcagccgagggatagcagaccaggagataattgctgggggagatgttaagtatacaacctggatgtttgagactcagcctatcgacaccctaggcgcatactcgtccgacacagtggaaaacgctgagaagataccagagctggccaggggggacgtgtgtactgcacggtggatgttcgaaacccggcctctcgactcaatgaacaagatgcaccagagtcaagaagaaagcgccgtgaccatatccaaggacataactggcggagacgtgaaaacggtaagatatatgttcgagactcagcaccttgaccagctcggccaattgcactccgtggacgaggtgcacctcctgcagttgcgcagcgagttgaaagaaatcaagggaaacgtcaagaggtccataaaatgctttgagacacagccattatatgtcatccgtgacggatccggacagatgctcgaaattaagacagttcatcgcgaagacgttgagaaaggcgatgtgcgcaccgcgagatggatgttcgagacgcagcccctcgacacaatcaataaagatatcacagagattaaagttgtgagaggcattagtatggaggaaaacgtaaaggggggtgtaagcaaggccaaatggctgtttgaaacccagcccctcgagaagatcaaagaatcagaggaagtcatcattgagaaggagaagattatcggcaccgatgtcagtcgcaagtgctggatgttcgagacgcagccactggatattctcaaagaggtacctgatgcagattcactccagcgcgaggaaatcattggtggagacgttcagactacgaaacacctttttgagaccttgccgattgaggccttgaaagatagcccggacatcggaaaacttcagaaaattaccgcatctgaggaggaaaagggagacgtgcgacaccagaagtggatcttcgaaacacagcctctggaggacatcaggaaggacaaaaaagagtacactcgcacagtcaaacttgaggaggtggataggggagatgttaagaactatacccatattttcgaatccaataatttaattaagtttgacgcttctcataagatcgaggtcgagggggtgacccggggagccgtcgaactgaataagagcctgttcgagacaactccattgtacgccatccaggatccactcggtaagtaccaccaagtgaaaactgtccagcaggaggagattgtgaggggcgacgttcggagttgcagatggcttttcgagacacggccaatcgaccagtttgatgagagtatccacaaattccagattatcagggggatctccgcccaggaaattcagacaggcaacgtcaagtccgccaaatggttgtttgaaacacagcctttagacagtattaaatacttttccgacgtggaagaaaccgagtcaaagactgagcagacacgcgatatcgtgaaaggcgatgtgaaaacttgtaagtggctctttgaaacccagcccatggaatccctgtacgaaaaagtgtcactgatgacttcgagtgaggaaattcacaagggcgacgtgaaaacttgcacatggttgttcgagacacagcccttggatactatcaaagatgattctgagactgctgtgaagctccagactgtaaagcaggaggagatccagggcggagatgtgcggactgcatgtttcctattcgagaccgagaatcttgactccatacagggcgaggaggttaaggagatcaaaccagtggagatggacatccaggccggagacgttagctccatgcggtataaattcgagaaccaaagcctcgactccatttcctcctcttctgaggaagtactcaagaagattaagacccttaaaactgaggacatccagaagggaaatgtgttgaactgtagatggctattcgaaaaccaacccattgacaaaattaaggagtcgcaggagggtgacgaatgcgtcaaaaccgtgactgacattcagggcggtgatgttaggaaaggctgttttatattcgaaaccttttcactggatgagataaaggaggaaagcgattacatctccactaagaagacgattactgaagaggtcattcagggggatgttaagagctaccgtatgctctttgaaacccaaccactttatgccatccaggaccgtgaggggtcctaccatgaggtcacgaccgtgaagaaggaggaggtgatccacggggacgtgagggggaccagatggctgtttgagacaaaacctttagattcaatcaacaagtccgagactgtctacgttattaagagcgttactcaggaggacatccagaagggcgatgtgagctccgtcagatatagattcgagactcaaccattagaccaaattagcgaggaaagccacaatatcatgcccagcattgaccatattcagggtgggaatgtgaagacttcgaggcagtttttcgagtctgagaattttgacaagaacaattatatacgaactgtctccgtgaatgagattcagaagggtaacgtgaagacctctacctggttattcgaaacacacacaatggacgaacttaggggtgagggcctcgagtatgaaaacataaaaactgtcactcaggaggatgtgcagaaaggagacgtgaaacaggccgtgtggttgttcgaaaatcgcacctttgatagtatcatggaagcacacaagggaatcacaaaaatgaccaaggaagagataccccctagcgacgttaagaccacaacatggctgtttgagacaacccctctccacgaatttaacgagacacgcgtcgaaaagatcgaaatcataggcaaatccatcaaggagactctggaggacctttattcccagaaggtcatccaggctccagggataattatcgaggccgacgagattggtgacgtgaggatggcaaaatacaaactcatgaatcaggccagtcctgaaatccagaaggaggaaattatccgggcagatttgcgcaacatcatggtaaatttgctgtctaagcgcgattgcacagagagggaaattcttatctccgaagaggaaaaagggaatgtgaacctcacaaaaacccagctcctgaatcggagcactgaatttcatgccgagaaagaagaaatagtcaaaggcgacgtccagcaggcaatcaaaaacctgttttcggaagaaaggtcagtgaagaaagggattctcattcaggaagacgaaaagggtgacataaacatgaccatctattgcctgttgcacgaaaacgacggtgatactatcgaacgtgaggaagtgataggcggagatgtgaaacggactatccacaatctgttgtcttcaacatcaaataataaaatttccgagagagccaagattgatgccagtgaaaggggcaatgtccagttcttcaccacctgtatagaggcaggcgcacttgactacctcaaacagctgcatactgagagcaatgagactcttactgcgaaaaaacaggaaggcgaaaaagagatcatagggggtgacgtggaggggactaagttattgctcaagaagcggcaaagcctggtggagcgcaccgtaagtgagacagatataattccgggtgacgtacataatacagtcaaggtgtttatgacggaaccacagtcgacgttcggcaagatccccaaagaggagatcatcaaaggagacttaactagtactctgaacagtttgtctcaagctgtgaaccagaaaacggtcacgaaaacagaggagattatcaaagggaacatgttggctacgctcaagagtctcaaggaatctagtcatcggtggaaagagtcaaaacagcccgatgccatccccggtgatattgaaaaagctattgagtgccttgaaaaggcaaccaataccaagacagaaatattgaagaaagagctgttaaaagatgaccttgagacatcacttcggagcctcaaagaggctcaacggtcattcaaggaggttcataaggagggcgttatcaaaaaggatgctaaggccgtgatggccggttcctcaggtgagcagaagacagatattcatcaggtggctgtgcagcgaaataagaactccctcctccagcctaagccgggtccctttgaaccagccgctaagtggcagggtggggcagacactttaagtcaaacaatgggaaagagctgccatggcaacttagtcgaagaaaggaccgaggttaatctcccaaaggcgcctaaggggacagtcaaaattgtgatcgaccgcgagcagaataacgatgccttggaaaagagcctaagacgcctctcaaattcgcaccacaaatccaatgtgctcgaatcgggggataagacaggggtatggaccgataccaccggagaacaacaccttagagatgagtacatgtctaggcagctgacgtcgactgtctccgtcaaaaataatcttactacaaaagaaagtgaccgggctgtgcgtgagctgaaaaaagatgacgtgttcaactctatccagtcagccggaaaaacagtgggtaaacagcagacatatgagctgcggaatgaccatcagaaaatggagggcttccatataaagtccccgaaaaaaaccaagaatatcaaaatcctgacggatactcaatccagcaagccttcaccaacccagcatccggtctccatgcctgtcggcggaacctacgacttatcgggcgattttcagaaacaaaccctgttaaaacaggaaacaaagtacagcaataaagacattaagaaaaagaacatcaatctacaacctatgtggcaacttctcccagtggaacaggatacatctaatgtaaccgaaatgaaggtgagcgagaagtcccataacaccttcaaagcaaccaacaagaagcgcgaaactgacgttcatctgaaaagccaggatttcttaatgaaaaccaacacaagcacggggctaaaaatggcgatggagaggtcactgaaccctattaattttaaccccgagaataacgtaaaagaaagcgagtgcccgctccctcctccctcaccccctccccctccccctagcaatgcttctagcgaaatcgaattcccgcttccccctccacctccactgatgatgttccctgaaaagaatggctttctacccagcctgtctacagagaagataaaggcggagtttgaatccttcccaggcctgccactccctcctcccccagtagacgagaagagtgaacgggaatctagttcaatgtttctaccccctccgcctccacctactccatcccagaagccggctcaccttctcagcagttccgcacctgaaaagcactcaggtgactttatgcaacagtacagccagaaggaggcttcaaatagtcaaaacagccaagcaaagatcattaccggaaaaacaggcgtgctgcctcctcctacgctcccaaaaccaaaactgcctaagcacatcaaagataataagaatgatttcagtcctaaagtggaactcgctacttccctgtccgacatggagtgcaagatcacaactagtaaggaccagaagaaggttatggttatgacctctagcgagcacacagagacaaagcagaatgttatcagcaaaagtctggatgaacgcaaacaattaagcatagactccgctaactgcctgagtcacacagtgcctggcacgagcgccccaagaaagaaacaaatcgcacctcttattaagagccacagttttcctgagagctcaggacaacagaatcccaagccctacatgcgcaagttcaaaacccctttgatgattgcagaagaaaagtatcgccagcagaaggaagagatagaaaagcaaaagcaggaaagcagttattacaacattgttaagactcaatcccagaaccaacatataacagaagtcgagaaagagatgccattgcagaagactaatgaagaagtgagcctatctggcatagactccgagtgcaccgtggtgcaaccatctcccggttctcagtcaaacgcccgaatccttggggtatgttcagacaaccagctgagtaccacatcccccgagacagtcgccgcaaagcggttgcaccatgtcctagcagcctccgaggacaaggacaagatgaagaaggaggtgttgcaatcttcacgggacatcatgcaatcaaagagcgcctgcgagataaagcagagccatcaggagtgctccacccaacaaacacaacagaagaagtacctcgaacagctgcacttgccgcagagtaagcccatcagtccaaactttaaggtcaaaaccattaaactgccgactcttgatcatacactgaacgagaccgatcattcgtacgaaagccacaagcagcagagtgaaatcgatgtccaaactttcacaaagaaacagtatctgaagacgaaaaagacagaagcaagtactgaatgttctcacaagcagagtctggccgaaagacactatcagctgcctaagaaggagaaacgcgtaacagtgcagctcccgaccgagagcatccaaaagaaccaggaagataagttgaagatggtgccacggaagcaaagggagttcagcggaagcgaccgaggaaagctacccggaagcgaggagaaaaaccagggtcccagcatgatcggtcgaaaggaggagcgcctcataaccgagcgtaaacacgagcatctcaagaacaaatcagctcctaaagtggtcaaacagaaagtcatcgacgcccacctggatagccagactcagaacttccaacagacacaaatccagacagcagagagtaaagctgaacataaaaagctgcctcagccctataattcgctgcaggaagagaaatgtctggaggtgaaaggaatccaggagaagcaggtttttagtaatacaaaagactccaaacaggagattacgcagaataagagcttcttcagctctgtgaaagagtcacagcgcgacgatggtaaaggcgctcttaatatcgtggaatttctgcgcaaacgagaagaattgcaacagatcctgtctcgagttaaacagttcgaggccgaaccgaacaaatcggggctgaagacctttcagacacttctaaatacgatccctgggtggctcatctcagaggataaaagagagtacgccgtgcatattgctatggaaaacaatcttgagaaagtgaaagaggaaatcactcatatcaaaactcaggcagaggacatgctggtgagctacgagaatatcatccaaaccgccatgatgtcctctaagacaggaaagccagggaacaagcccacaagcctcgacgagacctcgagcaaagtgagtaacgtgcacgtgagcaacaacaagaacagtgagcagaaggagaacaagattgcgaaagagaaaacagtgcagcatcaggtggccgctcaccacgaagccactgtcagatcgcacgtcaagacccatcaggaaattaagttggacgacagcaatatccccccaccttcactcaagaccaggccaccctctccaacgttcattacaattgaatctactgccagaagaaccgagaaccccaccaagaatgagctgtcccagtccccgaaaaaggactcctatgtggagccaccccctcgaagaccaatgtcgcagaaatccgagatccatcgggctaatactagtccaagccctcctcgatcccgatccgagcagcttgttcggctgaaggacacgacggcaaagctgagcaagggagctataccatgtcccgcagcaacacctgtgccaatcgtagaaaagcgttcggaaatcataatgagccctgctacattgcgcaggcaaatcaaaatagaaacgaggggtcgtgattcacctccaactatcacaatccctgtcaatatcaaccatgcggctagcggttcttttcgtgaaagtgttgacgcacaggaggagattcgtaaggtggaaaagagagcaacatatgtgcacaaggatggccttaatagcacggaccacatggtgcctgataccgagagctacgatgcagttgagatcatccgtaaagttgcggtgcctccccgactgagcgagcacacgcaacgatatgaagccgctaatcggacagtccaaatggctgaaaacttcgtgaacgatccagagaatgaaatcaacaggtggttcagagagtttgaacatggcccagtgtcagaggcgaagtccaatcggcgagtgtacgccaaaggagaaaccaaccataatattcagcaggaatcaaggacgttctgcaaggaagagttcgggctgacaagtttaggtaacacaagcttcaccgattttagctgcaagcaccctagggaattacgcgaaaaaattccagtcaagcagccaaggatctgtagcgagacccggtctctgagcgagcattttagtggcatggatgccttcgaaagccagatcgtggagtccaaaatgaaaactagtagctcacacagcagcgaggcgggaaagtcaggttgtgatttcaaacatgcacctcccacgtatgaggacgttattgcgggacatatcctggacatctccgatagcccaaaagaggtgaggaaaaactttcagaagacatggcaggaaagcggaagggtgttcaagggactggggtacgcaacggcagatgcaagcgccaccgaaatgcgaaccaccttccaagaagagtccgcttttatttctgaggccgcagccccaaggcagggaaacatgtacactttatccaaagattccctctcaaatggcgtgccttccggtcggcaagcagagttctcttaa

SEQ ID NO: 247008 - DNA, 9984 bp, synthetic construct
  misc_feature 1..9984: note = Description of Artificial Sequence: Synthetic coding sequence
  source 1..9984: mol_type = other DNA
atggcacggtaccaggccgctgtctctcggggagattgcaggtccttcagcgcaaacatgatggaagagtccgagatgtgcgccgtgcccggaggtttagccaaggtgaagaagcaattcgaagatgagatcacatcctctcggaatacctttgctcaatatcaatatcagcatcagaaccgatctgaacaagaggccattcattcttcacaagtgggaacctcaagaagttcccaggagatggccaggaatgaacaggaagggtccaaagtgcagaaaattgatgtccatggcacagaaatggtgagccaccttgagaaacacacagaggaagtgaaccaggcgtcccaatttcaccagtacgtccaagagaccgttatcgatacccccgaggatgaggagatacctaaggtgagcaccaaactgctgaaggaacaatttgagaaaagtgcccaggagaaaatcctctacagcgacaaagagatgactactcccgcaaagcagattaagactgagagcgagtatgaagagacgttcaagcctagttctgtggtctcaacctcttctacgtcctgtgtgtcaacatcacaacgtaaggagacatccaccacacggtacagtgaccattcagtgacttcgagcacacttgcccaaatcaacgcgacatctagcggaatgaccgaggagttcccaccaccccctcccgacgtgctccagacatctgtagacgtgacagccttttcacagagcccagaactcccatcaccccctagacgtcttccagtacccaaagatgtatacagcaagcagaggaacctgtatgagttaaacaggctttacaagcacatccaccctgagttgaggaagaatctcgagaaagattatatttctgaggtgagcgagatcgtgagcagccagatgaatagcggatcttctgtttccgccgacgttcaacaggctcgatatgtttttgagaacaccaacgactcctcacaaaaggatctaaactcagagcgggaataccttgaatgggacgaaatccttaagggcgaggttcaatcgataagatggatatttgaaaatcagcccctggatagtataaacaatggcagcccagacgaaggagacatttcaagaggcatcgccgatcaggagattatagctggaggggatgtcaaatacacgacgtggatgtttgagacccagcccatcgacacgcttggtgcctattcgagtgatacagtcgaaaatgcagagaaaattcccgagctggccaggggggatgtttgcactgctcggtggatgtttgaaacgcgacccttagactcaatgaataagatgcatcagagtcaggaagaatcagccgttaccatcagtaaggacattaccggtggcgatgttaaaacagtccggtacatgttcgaaactcagcacctcgaccagcttggccagctgcatagcgtggacgaagtgcatctgctgcaactgagatcagaactcaaagagatcaaaggcaacgtgaaaaggagtattaagtgcttcgagacacagcccctgtacgtgatacgggacggatcaggacagatgctagagatcaagaccgtgcaccgggaagacgttgagaagggagatgtcagaacagcacgctggatgttcgaaacccagcccctagacacaatcaacaaggatatcacggaaatcaaggtggtgcggggaattagcatggaagagaatgtgaaggggggagtgtcgaaagccaaatggctctttgagactcagcctctggagaagatcaaggagtctgaagaagtgattattgagaaggagaagatcattgggactgacgtctctcgcaagtgctggatgtttgaaacacagcccttggacattcttaaggaagttcctgacgccgactcccttcagcgtgaggagattatcgggggagatgtccaaacgacaaaacatctttttgaaactctgcctatcgaagcgctaaaggattcaccggacatcggaaaacttcagaaaatcacagcctctgaggaggagaaaggggacgtccggcaccagaaatggatatttgagacccagcccctcgaagacattcgtaaagataaaaaggaatatacccggaccgtcaaactcgaagaggtagatcgcggagacgtcaagaactacacacacattttcgagtctaataatctgatcaagttcgatgccagccataagatcgaggtggaaggcgtgaccaggggagcggtggaactgaacaaaagtcttttcgagactacgcctctgtatgctatccaagatcctctggggaagtatcaccaggttaagacggtccagcaggaagaaattgtccgaggggacgtgcgatcttgtagatggttgttcgagacgcggcctatcgaccagttcgatgagtctattcataaattccagatcataaggggcatcagcgcacaggaaattcaaaccggcaacgtgaaatctgcaaagtggctgttcgagacacagccacttgattcaattaagtatttttctgacgtcgaggaaaccgagagtaaaacagaacagacacgcgacattgtaaagggtgacgtgaaaacttgtaagtggctttttgaaacacagccaatggaatctctctatgagaaagtgagccttatgaccagcagcgaagagatacataaaggagacgtaaaaacttgcacttggctattcgagactcaacctctggacacgattaaagacgactctgaaactgcagtcaaactccaaacagtgaagcaagaggaaatccagggaggagacgtgcggaccgcctgctttctgttcgaaaccgaaaatttggacagcattcagggggaggaagtgaaggaaatcaagcccgtagaaatggatatccaggcaggggacgtgagttccatgcggtataaattcgagaaccagtccctcgacagtataagcagtagttcagaagaagtactgaaaaaaatcaagaccctgaaaaccgaagatatccagaaaggcaatgtgctcaactgtcgatggctgttcgagaatcagccgatcgacaaaatcaaggaatcccaagaaggtgacgagtgcgtgaagacagtgaccgacattcaaggaggcgacgtccgtaaaggatgcttcatctttgagaccttctctttggacgaaattaaagaggagtctgactatatctcaacaaagaagacaatcacagaggaagtgatccaaggagacgttaagtcttaccgcatgcttttcgaaacccagcccctgtacgcaattcaggatagggaggggagctatcatgaagttaccactgtgaagaaggaggaagttatccatggtgacgtgcgcggaactcgttggttgttcgagacaaagcctctggattctatcaacaaatcggagaccgtatacgttattaaatcagtaactcaggaagatattcagaagggtgacgtgagcagcgtgcggtaccgtttcgagacacagcccctggatcaaatcagtgaagaatcccataatatcatgccctcgatagatcacattcaggggggaaatgtaaagacctctcggcagttctttgagtcagagaacttcgataaaaacaattatataagaacagtgagtgtgaacgagattcagaaaggcaacgtgaagacttcgacctggctcttcgagactcacacaatggacgaattgcgaggcgaggggcttgagtatgagaacattaagactgtgacccaagaagatgttcagaagggggatgtgaagcaagcagtgtggctctttgaaaaccgaacctttgactcaataatggaagcccacaaggggatcaccaagatgacaaaggaagagattccaccctctgacgtaaagactacgacatggctctttgaaactacacctcttcacgaattcaatgagaccagggtggagaaaatcgagatcatcggtaaaagtattaaggagacactggaggacctgtattcccaaaaggtcatccaagcccctggaattatcatcgaagccgacgaaataggggatgtaagaatggctaaatacaaactgatgaatcaggcctcacccgaaatacagaaagaggaaattatccgtgcggacctgcgcaacattatggtgaacttgctctccaaacgggattgtacagaaagggagatactcatttccgaggaagagaaggggaacgtgaatcttaccaagactcagctgttgaaccgctctactgaattccacgcggagaaggaggagatagtgaaaggagacgtgcagcaggccatcaagaacctgttcagtgaggagaggagtgtgaaaaagggtattctgatccaagaggacgagaagggcgacattaacatgactatttactgcctcttgcacgaaaacgatggggatacaatagagagggaggaagttatagggggagacgtgaagcggactattcataacctgctctcctcaacctccaataacaagatatctgagcgagccaaaattgacgctagtgagcgagggaacgtgcagtttttcaccacttgtattgaagccggtgccctggactaccttaagcagctgcacaccgagagtaacgaaaccctgactgcaaagaagcaggagggcgagaaggaaattatcgggggtgatgtcgaaggcacaaagctgttgctgaagaaacggcaatctttggtagaaaggacagtctctgagacagatataattcctggagatgtgcataacactgtaaaagtcttcatgacagaaccacagtccacctttggcaagatcccaaaggaagaaattatcaagggggacctgacaagcaccttaaactcactgagtcaggccgtgaaccagaaaacggtaactaaaactgaggaaataataaaaggaaatatgctggcaacactgaaaagcctgaaagagtcctcacatagatggaaagagtcaaagcaaccggatgctattccaggtgatattgaaaaggccatcgagtgcctggagaaggctactaataccaaaaccgagatcctaaaaaaagaactcctgaaggacgacttagagacctccctgcgcagtctgaaggaagctcaacggagctttaaggaggtgcataaggagggagtgataaaaaaagatgcgaaggccgtgatggcaggatctagtggggaacagaagaccgatattcaccaggtggcagtacagcggaataagaacagtctcttgcagcccaagcccggaccatttgagccagcagcaaagtggcaggggggtgctgataccttgagtcaaactatgggaaaaagctgtcacggcaaccttgtagaagaaagaacggaggtgaacctgcccaaagccccaaagggaacagtcaagatcgtgattgatcgcgagcagaacaatgacgccctggaaaagagtctgcggagactgtctaattctcaccataagtctaacgtcctggaaagtggagacaaaactggtgtatggactgacacaaccggggaacagcacctccgcgacgagtacatgtccaggcagctgactagcactgtctcagtgaagaacaacctcacaaccaaggagtccgaccgggcagttcgggagttaaaaaaggatgatgtttttaacagtattcaatctgctggcaagactgtggggaaacagcagacctatgagctgagaaacgaccaccagaaaatggagggattccacatcaagtcccccaagaaaactaaaaatataaaaatcttaactgacacgcagtctagtaaaccaagtcctacacagcaccccgtatccatgcctgttggcggtacatatgacttgagcggggacttccagaagcagacactgcttaaacaggagactaaatacagtaacaaagatatcaagaaaaaaaatattaacctacaaccaatgtggcagcttctcccagttgagcaagataccagtaatgttacagagatgaaagtgtccgagaaaagtcataatacctttaaggctactaataagaagcgagagacagacgtgcacctaaagtctcaggactttttaatgaagaccaatacaagcacaggtctgaaaatggccatggagagatccctcaatccgattaactttaacccagaaaacaatgttaaagagtcggaatgcccgctgccccctccttccccaccacctcccccaccctctaatgcatcaagtgaaatcgagtttccgcttcccccaccacctcctcttatgatgttcccggagaagaatgggtttctgcccagtctgtcaaccgaaaaaatcaaagctgagttcgaaagcttcccaggcctgccactgcctcctcctcctgtggacgagaaatctgagagagaaagcagtagtatgtttttgccacctccccctccgcctactccttcccagaaaccagcacaccttcttagctcatctgcacccgagaagcacagcggcgactttatgcagcagtactctcagaaagaggcgagcaactcccaaaactcccaagccaaaattatcaccggcaagacaggggtgcttccccctccaacattgccaaagcccaagctgccgaagcacattaaagacaataaaaacgacttcagcccaaaagtagaactggccacctcattgtcagacatggagtgtaaaattaccacctcaaaggaccaaaagaaagtgatggtcatgactagctctgaacataccgagacaaaacagaacgtcattagcaagtctctggatgaacggaaacagctatccatcgacagtgccaactgcttgagccacaccgtccccggaacgagcgcaccccgtaagaaacagattgcccctctgattaagtcccactcctttcccgagagctcggggcaacagaatcccaagccttacatgcgtaagttcaagactcctctaatgatagcagaagaaaagtatcgccagcagaaggaggagattgagaaacagaaacaggaatctagctattacaacatcgtcaagacacagtctcaaaatcagcacatcaccgaggtagaaaaggagatgccccttcagaaaacgaacgaggaggtgtctctctccggtatcgactcggaatgtactgtggtacagccatctccgggtagtcaatccaacgccagaatccttggggtttgttccgataatcagctctccactacttctcctgagacggtcgccgctaaacgcctccaccatgtgttagctgctagcgaggacaaagataagatgaaaaaggaggttttgcagagcagtcgagacattatgcagagcaagtctgcgtgcgaaatcaaacagtctcatcaagagtgcagcacgcaacagacacaacagaagaaatatcttgaacaactgcatctaccacagtctaaacccatttctcccaatttcaaagtgaagacaattaagttaccaactctcgaccatacccttaatgaaactgaccatagctatgaaagccataaacaacaatctgagatcgacgttcagaccttcacgaaaaaacagtatctgaaaacaaaaaaaactgaggctagcactgaatgctcacacaagcagagcttggccgagaggcattatcaattgcctaaaaaggagaagagggtgaccgtgcagctccccaccgagagtatacaaaaaaatcaggaggacaagctgaaaatggtcccgcgaaagcaacgggaatttagcggtagcgatcggggaaaactccccggatctgaggagaagaatcagggccctagcatgatagggaggaaggaagagcgactgatcaccgaaaggaagcatgagcatctgaagaataaatcagctcccaaggttgtgaagcagaaggtgatagacgcccatcttgactcccagacccagaatttccagcaaacccaaatccagaccgccgaaagcaaagctgagcataagaagcttccacaaccttacaactcgctccaggaggaaaagtgtctggaagttaaaggtattcaggagaagcaggtgtttagtaacaccaaggacagcaagcaagaaatcacccagaacaaatcgttcttcagtagtgtaaaggagtcacagagggacgatgggaaaggagctctgaatatcgttgagttcctgcggaaaagagaggagttgcaacaaatactgtccagagtaaaacagttcgaggccgaaccgaacaagtccggacttaaaacttttcaaaccctacttaacaccattcccggatggctcattagtgaagacaaaagggaatacgcagtgcacatcgctatggagaataacctggaaaaggtaaaggaagagatcactcatataaagacacaggctgaggatatgctggtgtcatacgaaaacattattcagacagcgatgatgagttccaagacaggaaaacccggaaataagcctacctctctggatgaaacttcttcaaaggtgagtaatgtgcacgtgtcaaacaacaaaaactccgagcagaaggaaaacaaaattgctaaggagaagacagttcagcatcaggtagcagcacaccacgaggccacagttagatcccatgtcaagacacaccaagagatcaagctggacgactctaacataccgccaccttctctcaagacaagaccgccatccccaacgttcattactatcgagagcaccgcgagacgcaccgaaaatcctaccaagaacgaactatcacaatcccctaaaaaggattcatacgtcgaaccccctccacggagaccaatgagtcagaagtccgagatacaccgggctaacacatcgccgtcaccccctcgctcccgcagcgaacagctggtacgcctgaaggatacaaccgcgaagctgtccaagggcgcaataccctgtccagccgcaacccctgtcccaatcgtggagaagcggagtgaaattattatgtcgcctgctaccctccgccgtcagatcaagatagaaactaggggtcgcgactcccctcctacaatcactattcctgtgaatatcaatcacgctgcgagtggctctttcagagagtcggtggatgcccaagaggagattagaaaggtggagaaacgagctacctatgtacacaaagatggcctgaatagcaccgaccacatggtgcccgatacagaatcatacgacgcagtggagattattcggaaggtggcagtgccacccaggttatcagaacatacccagaggtacgaggccgcaaaccgtacggtacagatggctgaaaattttgtcaatgaccccgagaatgagatcaacagatggtttcgagagttcgaacacggcccagtgagcgaggcgaagtccaacaggcgtgtgtacgctaagggcgagactaatcacaacatccagcaggaatcgcggacattctgtaaagaggagttcggattaacctccctcggtaacacaagcttcaccgatttcagctgtaagcaccctcgagagttgcgcgaaaaaattccggtgaagcaaccgagaatttgtagcgaaacccgctcgcttagcgaacatttctccgggatggatgcgttcgaatcacagattgtggagtcaaagatgaaaacctcatccagccattcttccgaggcgggtaaatccgggtgtgacttcaagcatgctccaccaacctacgaagacgttattgctggacacattcttgatatatcagattctccaaaagaggttcgcaaaaactttcagaaaacctggcaggaaagcgggcgagtgtttaagggactcggatacgctacggctgatgcatccgctacagaaatgcgtacgacatttcaggaagagtctgcttttataagcgaagcggctgctcctcgacaggggaatatgtacaccctttcaaaagatagcctcagtaatggcgttccttctgggagacaggctgaattctcttac

SEQ ID NO: 247009 - DNA, 2151 bp, synthetic construct
  misc_feature 1..2151: note = Description of Artificial Sequence: Synthetic coding sequence
  source 1..2151: mol_type = other DNA
atggcgcgataccaggcggcagtctcacgaggtgactgcaggtcattttccgcaaacatgatggaagaatccgagatgtgtgctgtgccaggcggtctcgctaaggtaaagaagcagttcgaagacgaaatcaccagcagcagaaacacgttcgcacagtaccaataccagcatcaaaacagaagtgaacaggaagcaattcactcttcacaagtggggacatcccgttcctctcaggaaatggctcggaatgagcaggaaggctcaaaagttcagaagatagatgttcatgggacagagatggtctcccacctcgagaagcatacggaagaggtgaatcaggcctctcaatttcaccagtatgttcaagaaactgtgattgacacacccgaggatgaagaaatccctaaggtctctacgaagcttcttaaagagcaattcgagaagagcgcacaggagaagatcttgtactccgataaggagatgaccactccagccaaacaaataaagaaactcctgctgcaagataaggagatctgtatcttatgccagaaaactgtatacccaatggagtgtctggtcgcagacaagcagaacttccacaagagttgttttagatgccaccactgtaacagcaagctgtctctcgggaactacgcctctctgcacggtcagatctactgtaagccccacttcaagcaactctttaaatctaaaggaaactatgatgaggggtttggtcataagcagcacaaggaccgctggaactgcaagaatcagtctcgatctgtcgactttatcccaaatgaggagcctaatatgtgtaaaaacatagccgaaaacaccctcgttcccggtgaccggaacgagcacctggacgcagggaattccgaaggccagaggaacgatttacgcaaactcggtgagcgaggaaagctgaaggtgatttggcctccgtctaaggaaatcccaaagaagacgttgcctttcgaagaagagttgaaaatgtcaaagcctaagtggccccctgaaatgacgacgctgctgtcacctgaattcaagtccgaaagcttactagaggatgtcaggactcccgagaataagggccagcgccaggatcactttccctttctgcagccatacttgcagtccacacacgtctgtcaaaaagaagatgttatcgggatcaaggaaatgaagatgcctgaaggacgtaaagatgagaagaaggaaggtcgcaaaaatgtccaggatcgccctagcgaggccgaggacaccaagtctaatcgaaagagcgccatggatttgaacgacaacaataacgtcatcgtccaaagcgcagagaaagaaaagaacgaaaagacaaaccagacgaatggcgcagaggttctgcaggtgacgaataccgatgacgaaatgatgccggaaaatcacaaagagaatctcaataagaacaacaataataactatgtggctgtcagttacctcaacaactgccgccagaaaacctccatcctggagttcctcgacctactgcccctctcttcagaggccaatgatacagccaacgaatatgagattgagaagctggagaatacttctaggatttctgaactgctcggaatctttgagtctgaaaagacctatagcaggaacgtcttggccatggccctgaaaaagcaaactgatcgcgctgccgctggatcgccagtccaacctgcccctaaaccgtctctctctagggggttaatggttaaaggaggtagctccataatcagccccgatactaacctgctcaacattaaaggctcacactcaaaaagcaaaaatttacatttctttttttctaacacagttaaaattactgcgttttctaaaaagaatgagaacatcttcaactgcgacctgattgactctgtggatcagatcaagaacatgccctgtctggaccttcgcgaatttggcaaggacgtaaagccttggcatgtggagactacagaagcagctagaaataacgagaataccggctttgacgcgcttagccatgagtgtacagcaaagcccttattccctcgcgttgaggtccagtccgaacagctgacagtggaggagcagataaagcggaacaggtgctactccgatactgaatag

SEQ ID NO: 247010 - DNA, 2817 bp, synthetic construct
  misc_feature 1..2817: note = Description of Artificial Sequence: Synthetic coding sequence
  source 1..2817: mol_type = other DNA
atgtttcctatgcagaaggggagccttaatcttctgaggcagaaatgggagagctgcgactaccagagaagtgaatgtcaccctagggactcacactgcacaattttccagccgcaggagagtaaattgctggccccagagggtgaagtggtgtccgcgccacaatcactggatcccacctctctgccctacagtacaggagaagaaatgtggtccagtaagcccgaggagaaggattctgtcgataaatcaaacaatacaagagaatatgggaggccggaggtgttaaaagaagacagcttatccagcaggcgtaggatcgagcgattttcaattgccctggatgagttacgcagtgtgtttgaagcccctaaatcgggaaacaagcccgctgagtacggaggcaaagaggttgagattgagaggtccctgtgctctccagcttttaagtcccaccctggttcacagcttgaggactccgtgaaagacagcgataaaaaagggaaggagacctcattcgacaaaatgagtccagaatccggtcatagccggatcttcgaagctacagctggtcccaacaaacctgaatcaggtttcgcagaagacagtgcagccagaggtgaaggcgtctctgatctccacgaagttgtcagcctcaaagagagaatggccagataccaggctgcagtgtcccgcggtgactgtcggagctttagcgcgaacatgatggaggagagtgagatgtgcgcagtaccagggggactggccaaggttaagaagcaattcgaggatgaaattaccagctcacgaaacacatttgctcagtaccagtatcagcatcagaatagatcggagcaagaggctatccacagttcccaggtgggcactagtagatcctctcaagaaatggccaggaacgaacaggaaggatccaaagttcagaagattgacgtgcacggtacagagatggtgagccacttagagaaacacaccgaggaggttaaccaggcttcacagtttcatcagtacgtgcaagagactgtcatcgacacgccagaggacgaagagatccccaaggtttcaaccaagctcctcaaggagcaatttgagaagtctgcccaagagaaaatactatattccgacaaagagatgaccaccccggcaaagcagattaagaaactgctgctgcaggataaggagatttgtattctttgccagaaaaccgtttaccccatggagtgcttagtcgcggacaagcaaaattttcataaatcttgttttcggtgtcatcactgcaatagtaaactttcactagggaactacgcctccctgcacggccagatttactgtaaacctcactttaagcagctcttcaaaagcaagggcaattatgacgaaggttttggacataaacagcacaaagaccggtggaactgtaaaaatcagagccggagcgttgactttattcccaatgaggagcctaacatgtgtaagaacatcgctgagaatactctcgttccaggggaccgaaatgaacacctcgacgcagggaacagtgaggggcagcgcaacgacctgcggaaactgggcgagcggggtaaattaaaggttatatggcccccttctaaggagattccaaaaaagaccctcccttttgaggaagagttgaaaatgagcaagcctaagtggccccctgaaatgacaacactgctctctcccgaattcaagtccgaatctctccttgaagacgtgcggacgcctgaaaacaaagggcaaaggcaggaccatttccccttccttcaaccctaccttcagtctacacacgtgtgtcagaaagaggacgtcattggcattaaggagatgaagatgccggagggacgcaaagatgaaaagaaggaaggcaggaagaatgtgcaggacagaccttccgaggcagaggatacgaaaagcaatcgcaaatccgcaatggacctgaacgataacaacaacgtcattgttcagtccgctgagaaagagaaaaacgaaaaaactaaccagacgaatggcgcagaggtgctccaagttacgaacacagatgatgagatgatgcctgagaatcacaaggagaatctcaacaaaaacaacaataataattacgtggcagtttcttatctgaataactgcagacagaagacatccatactggagttcctggacttactgccattaagctcagaggccaatgacacagctaacgaatacgaaatcgagaagctggagaatacaagccgaatttctgaattactcggcatttttgagagcgagaaaacgtattcccgcaacgtgttagcaatggcactgaaaaagcagaccgatcgggcagcagccggatctcccgtgcagcccgcaccgaagccaagcctatctcggggtctgatggtcaagggcggttcctccatcattagccccgacactaacctgctcaacatcaaggggagccactctaagtccaaaaacctgcactttttcttcagtaacactgttaagatcaccgccttcagtaagaagaacgaaaatatcttcaactgcgaccttattgattctgtggaccagatcaagaacatgccgtgcttggatctccgtgaattcgggaaggatgtaaaaccatggcatgtcgagactacagaggccgctaggaataatgaaaacaccgggttcgacgcgctgagtcacgagtgcacagccaagcctctttttccaagggtggaggtgcagagcgagcagctgaccgtggaagagcaaattaaaaggaataggtgttactccgatacagagtag

SEQ ID NO: 247011 - DNA, 2892 bp, synthetic construct
  misc_feature 1..2892: note = Description of Artificial Sequence: Synthetic coding sequence
  source 1..2892: mol_type = other DNA
atgcctcttcagaaaacaaacgaggaggtctccctcagtgggatagacagcgagtgcaccgtagtccagccaagcccaggaagtcagtccaatgccaggatcctcggagtgtgctcagacaaccaactcagcactactagcccggagactgttgcagcaaagcgccttcatcacgtgctcgctgcgtcagaggacaaggacaagatgaaaaaggaggtgctccaaagctctcgggacatcatgcagtcgaagtctgcatgcgagataaaacagtcgcatcaagaatgcagtacacaacagacacagcagaagaagtatttggagcaactccacctgccgcagtctaagcctatctcacccaacttcaaagttaaaaccattaagcttccaacactggatcacactctaaacgaaacagatcacagctacgagagtcacaaacagcagagtgagatcgatgtgcagacttttactaaaaagcaatacttgaaaactaagaagaccgaggcttccaccgaatgctcacacaaacagtctttggccgagcggcattaccaattacccaagaaggaaaagcgagtaacagtccagttaccgacagagtcgatccaaaagaaccaagaggataagttaaagatggtcccccgtaaacagcgtgagttcagcggtagtgatcgaggcaagctccccggatccgaggaaaagaaccaggggccaagcatgattggcaggaaggaggaacggttgatcaccgagcgtaagcacgaacacctgaagaataagtctgcaccaaaggtggttaagcagaaggtcatcgatgcccacttagattcccagacccaaaatttccagcagactcagatccagactgcagagtctaaagccgaacataagaagttacctcagccttacaatagtctgcaggaagaaaagtgtcttgaggtaaagggtattcaggagaaacaggtcttctcaaatactaaggattcgaagcaggagattactcagaacaagagtttcttttcttccgtgaaagaaagccaaagggacgatggaaagggagctctgaacatcgttgaattcctcagaaagcgcgaggagttacaacagatcctgtctcgcgtgaaacagttcgaggctgaaccaaacaaaagcgggttgaagacattccagactctgctgaataccattcccggatggctcatctctgaagacaaaagggaatacgcagtccatatcgccatggagaacaatctggaaaaggttaaagaagagataactcatataaaaacgcaagcggaagacatgcttgtgagttatgaaaatattattcagactgccatgatgtcatctaagaccgggaagccaggcaataaacctacgtctctagatgagacaagttcaaaagtgtctaacgtacacgtttcaaacaacaaaaattcagaacagaaagagaataagatcgcaaaggaaaagactgttcagcaccaggtggccgcacaccatgaggcgaccgtgcgctctcacgtcaagacacatcaggagattaagttagacgactctaatatcccaccccctagccttaaaacccgccctccatccccaacctttatcactatagagtccacagccagaaggacggagaatcctactaaaaatgaactctcacagtcacccaaaaaggactcttatgttgaaccccctccgcgacggcctatgagccagaagagtgagatccaccgcgcaaacacaagtccctccccacccagaagccgtagcgaacagctcgtgcgcctgaaagatactaccgcaaagttgtcaaagggcgctataccttgtcccgcagccacaccagtgccgattgtggagaagcggagcgagatcattatgtctcccgctacattacggaggcaaatcaaaattgagactagaggcagggattccccgccaaccatcactatcccagtgaatatcaatcacgcagcatctggttctttccgggaatcagtggatgcccaagaggaaatcagaaaagttgaaaaaagggcaacctacgtgcacaaggacggactgaatagtactgaccacatggtgccagacactgaatcatatgatgcagttgagattatacgcaaagtggccgtgccaccccgtctttctgaacacactcagcggtacgaagcggctaatcggaccgtgcaaatggccgagaacttcgtgaatgaccctgagaacgaaatcaataggtggttccgagagttcgagcacgggcctgtgagtgaagcaaaatctaatagaagagtctatgctaagggcgagacgaaccacaatattcagcaggaatcccggaccttctgtaaggaggaatttgggttgactagcctggggaacacctccttcacagatttttcctgcaaacatcctcgggaactcagagagaaaattcctgttaaacagcccagaatctgcagcgaaaccagatccctgagcgagcactttagcggaatggatgctttcgagtcccagatcgttgaatctaagatgaagaccagcagctcacattcgtctgaagcgggaaagtcagggtgcgactttaagcacgcacctccaacctacgaggatgtaatagcgggtcacatcttggatatttcagacagccccaaggaagtgcggaaaaactttcagaagacctggcaggagagcggacgcgtgttcaagggtctgggctatgcaacagccgatgcttccgcaaccgaaatgagaacaacttttcaggaagaaagtgctttcattagtgaggcagctgcccctcgtcagggtaacatgtatacactctctaaggactcattgtcaaacggggttccaagcggcaggcaggcggaattcagttag

SEQ ID NO: 247012 - DNA, 2916 bp, synthetic construct
  misc_feature 1..2916: note = Description of Artificial Sequence: Synthetic coding sequence
  source 1..2916: mol_type = other DNA
atgtttcccatgcaaaagggcagcttgaatctgctgaggcagaagtgggaaagttgtgactaccagaggtctgagtgtcacccccgagattcacattgtacaatttttcagccacaggaaagcaagctgttggctccagaaggtgaagtcgttagcgcgcctcagtccctggaccccacatctctgccatatagtaccggcgaggagatgtggtcaagcaagcccgaagagaaggattctgtggataagtcaaataacactagggagtacggacgacctgaggtgctgaaggaagactccctgagcagtagacgcaggatcgaacgttttagtattgccctggacgagctcaggtctgtcttcgaggctcccaagtctgggaataagccggctgaatacggaggaaaggaggtggagatagagagatccctctgctctcctgccttcaaatctcaccccggttcccagcttgaagatagcgtaaaagattctgacaaaaagggtaaggagaccagcttcgataagatgtcccccgaatccggacactcgcgcatttttgaggccgtgttcagcaccgaccaggcacagatccttaggcttcatttgcaccccaagctgacgaagacaccgaagaactcacttaagagcagcacatatatcagcaccgccggtcctaacaaacccgagtccgggttcgctgaggactctgcagcccgaggcgagggcgtttccgacttgcacgaagtggtttcgctcaaggaaaggatggctcgctatcaggccgctgtatcaagaggcgactgcaggagcttctctgccaatatgatggaggaatcggaaatgtgtgcggttcctggtgggctggcaaaggtgaagaagcagttcgaagatgagattacttcgtcaaggaatacctttgcacagtaccagtatcagcaccaaaatcgttccgagcaggaagccatacattcaagccaagtcggtaccagcagatcttcccaggaaatggccaggaacgagcaggagggcagcaaagtacagaaaatagatgtccatggcaccgaaatggtgagtcatctcgagaaacacaccgaagaagtgaaccaagctagccaattccatcagtacgttcaagaaaccgtgatagacacaccagaggatgaagaaatccctaaggtttccaccaaactcctgaaggagcagttcgagaagagtgcgcaggaaaagattttatacagcgataaggaaatgactacacctgcaaaacagattaaaaagctgttactccaagataaagagatctgcatcctgtgtcagaaaaccgtttatcccatggagtgcctggtcgctgataagcagaacttccacaaatcctgctttcggtgtcaccactgtaacagtaagctcagcctgggcaactatgcctctttgcacgggcagatttactgcaagcctcattttaaacaactctttaagtccaagggcaattatgacgaaggattcggccataaacagcataaagacaggtggaactgcaagaaccaatcccggtcagtcgactttatcccaaacgaggagccaaacatgtgcaaaaatatcgcggagaataccctggttcccggagaccgcaacgagcatctcgacgctggaaactctgaggggcagagaaacgacctgcgaaagctgggagagagaggcaagctgaaggtcatttggccccctagtaaagaaattcctaagaaaacccttcctttcgaagaggagctgaaaatgagtaagcccaagtggcccccagaaatgactaccctgctgagccccgagtttaaatcagaaagcctactggaggatgttaggactcctgaaaacaagggacaacgacaggaccactttccatttttgcagccgtacctccagtcgacccacgtatgtcagaaggaggacgtcatcggcatcaaagagatgaagatgcccgaagggagaaaggacgagaaaaaagagggtaggaaaaacgtgcaggatcggccatctgaggctgaagataccaagagcaacaggaagtctgccatggatctcaatgacaacaataatgttatcgtgcaatctgcagagaaggagaagaatgagaaaaccaatcaaaccaatggggcagaggtgctgcaagttaccaacaccgatgatgagatgatgcccgagaatcataaggagaacttgaacaagaacaacaataataactatgtggctgtgtcctacctgaacaattgccgtcagaagactagtattcttgagtttctggatcttctcccactgagctccgaggcaaatgacacagcaaatgagtatgaaatcgagaagcttgaaaatacttcgcggatctctgaactattaggtattttcgagagtgaaaaaacatactctaggaacgtgctggccatggccctcaaaaaacagacagatcgagcggcagctgggtcccctgtgcagcccgcaccaaagccctccctctccaggggcctgatggtaaagggaggatcttcgattatatctccagataccaacttacttaatattaagggttctcacagcaagagtaaaaatttgcatttcttcttctctaacactgtcaagattactgcctttagcaaaaagaacgaaaacatctttaattgtgatctcatagattcagtcgatcagatcaaaaacatgccttgtctagatttgagggaatttggaaaggatgtgaaaccgtggcacgtggagaccacagaagctgcaagaaacaacgagaatacaggatttgatgctctttcgcatgagtgcacggcaaagccacttttccctcgtgtggaagtgcagtctgaacagctcactgtggaggagcagatcaagagaaaccggtgctacagtgatacagaatag

SEQ ID NO: 247013 - DNA, 2916 bp, synthetic construct
  misc_feature 1..2916: note = Description of Artificial Sequence: Synthetic coding sequence
  source 1..2916: mol_type = other DNA
atgttcccgatgcagaagggaagcctaaatcttcttcgccagaagtgggagtcatgtgactaccagcgcagcgaatgccacccgcgtgatagccattgcactattttccaaccacaagagtccaaactccttgcacccgagggggaggtcgtgtcagctccacagagcctcgatcccactagtcttccctactcgacaggcgaagaaatgtggtctagcaagccggaagagaaggattctgtagacaaatctaacaatacgagggagtacgggcgaccagaggttctgaaagaggactccctctccagcaggcgcagaatcgagcgtttctcgattgctctggatgaactgcgatcagtatttgaggcgccaaagagtgggaataaacctgcggagtacggcggtaaagaggtggagatcgagagatctctctgctcacccgctttcaagtcacatccaggatcacagctcgaagactcagtgaaggattctgataagaaaggtaaagaaaccagctttgacaagatgtctccggagagtggtcactccaggatcttcgaggctgtgttctcaactgaccaggctcagatcttgcgcctgcatctgcaccctaagctgacaaagactcccaaaaattcactgaagtcttccacatatatttctaccgctggccctaacaagcccgaatccggcttcgccgaggactccgctgctcggggagagggtgtgtcagacctgcacgaggttgtctcgctgaaagagaggatggctcggtaccaagccgctgtatcgaggggagactgtaggtcattttccgccaatatgatggaggagtctgaaatgtgcgcggtgcctggaggattggcaaaggtgaaaaaacagttcgaagatgagattactagctccaggaatacgtttgctcaataccagtatcagcaccagaacagatccgagcaggaggctattcattctagccaggtgggtaccagtagatcttcacaggaaatggccagaaacgagcaggaagggtcgaaagtgcagaagatcgatgtgcacggcacagaaatggtgtctcatctggagaagcatactgaggaggttaaccaggcttctcagttccaccagtatgttcaggaaactgttatcgatacccctgaggacgaggaaattccaaaggttagtactaagctgctgaaagagcagtttgagaagtcggcacaggagaaaatactttattccgacaaagagatgacgacccccgctaagcagataaagaagcttctcctgcaagataaggaaatctgcatactttgccagaagacggtctacccgatggaatgtctcgtggccgacaaacaaaactttcataagtcatgctttagatgccatcactgcaatagtaaattatccctagggaattacgcatcgctccatggccagatctattgcaaaccacatttcaaacagctgtttaagtccaaagggaattacgatgagggcttcggccacaagcaacacaaagatagatggaattgcaagaaccagtccagaagcgtggacttcattcccaacgaggagccaaacatgtgcaaaaatatcgccgagaataccctggtgccaggcgaccgcaacgagcatcttgacgctggcaacagtgagggacaaagaaatgatttgcgtaagcttggcgagcgcggaaagctcaaggttatttggcctccgtctaaggagataccaaagaaaaccctacctttcgaggaggagttaaaaatgtctaagccaaaatggccacctgagatgacgactctgctgtccccggagtttaaatctgagtcactgctggaggatgtgcgaactccagagaataaaggtcagagacaggaccacttcccatttttgcagccctacctacaaagcacgcacgtgtgtcagaaagaagatgtgattggtatcaaggagatgaagatgcccgagggcaggaaagatgagaagaaagagggtcgcaaaaacgtgcaggataggccatccgaggcggaggacaccaaaagtaacaggaagtcagccatggatctcaacgacaacaacaacgtcatcgtacaatcagcagagaaggaaaagaacgaaaaaacgaatcagacgaacggagccgaggtcctgcaggtaactaacacagacgatgagatgatgcccgagaaccacaaggaaaatcttaataagaacaataacaacaactacgttgcagttagctatctcaacaattgtcggcagaagacgagcattctggaatttctcgatctcctgccactgtcctctgaagcaaacgatacagccaatgagtacgagatcgagaagctcgagaatactagtagaatttccgaattgctgggaatattcgagagtgaaaagacctattcaaggaatgttctggccatggctctgaaaaaacagaccgatcgcgcagccgctggttcgcctgtacaaccagctccaaagccttccctttcccgcggactcatggtgaagggcggatcctccatcattagccccgatacaaaccttctgaacataaagggctcccactcaaaaagcaaaaacctccatttctttttctccaacaccgtgaaaataaccgctttttccaaaaaaaacgagaacatattcaactgtgatttaatagactccgtggaccaaatcaaaaatatgccttgcctcgatctccgcgaattcggcaaggatgttaagccttggcacgttgagacaacggaagcagctcggaataacgagaataccggattcgatgccctcagccatgagtgcactgctaagccgctgtttccaagggtcgaggtccagtccgagcagctaacagtcgaagagcagataaaacggaaccgctgctacagcgataccgaatag

SEQ ID NO: 247014 - DNA, 1380 bp, synthetic construct
  misc_feature 1..1380: note = Description of Artificial Sequence: Synthetic coding sequence
  source 1..1380: mol_type = other DNA
atggaaactgttttcgaggagatggatgaagaatcaaccggcggtgtgagcagctccaaggaggaaatcgtgcttggtcaaagactgcacctgagctttcctttttccattattttttctaccgttctttattgcggggaggtggcgtttggtctctacatgttcgagatataccgcaaagctaatgacactttttggatgagctttacaatctcgttcattatcgtgggagctattctggaccagattatccttatgtttttcaacaaagacctccggaggaataaggccgcattgctgttctggcacattctgctccttgggcctatcgtgaggtgtctgcacacaatcaggaactaccataaatggctcaaaaatttgaagcaagagaaagaagagactcaggtatctattacaaaacgcaatacgatgctggagagggagatcgcatttagtattcgagataacttcatgcagcaaaaggccttcaaatacatgtctgtgatccaagcgttcctaggaagcgttccacagctaatcctgcaaatgtacatctccttaaccattagggaatggccactgaacagagcactcttgatgactttctcgctgctgtccgtgacatatggtgctattagatgcaacatcctcgcaatacaaatcagcaatgacgatacaactattaaattacctcccattgaattcttttgcgtggtgatgtggagatttctggaggttatctcccgtgtagttacccttgctttttttattgcgtcattgaagctgaaaagcctcccagtgctcctgattatctactttgtgtccttgctcgcgccttggttggagttctggaaatccggagcccaccttcccggaaacaaggagaacaattccaatatggtagggaccgtgctgatgctgtttttgatcacactgctgtacgctgcaatcaacttctcgtgctggtctgctgtgaaacttcagctcagcgatgataagatcatcgacggccgtcagcgctggggacatcgaatcttacactatagtttccagtttctcgaaaatgtgatcatgatcttggtgtttcggttctttgggggaaaaaccctcctgaactgctgcgacagcctgatcgcagtccagctgataatttcttacctgctagccactggcttcatgctgcttttttaccaatacctgtatccatggcagagcgggaaagtactgcccggtcgcactgaaaatcagcctgaagcaccctactattacgtcaatattgaaaagacagagaaaaataaaaacaagcaactcagaaactactgccactcatgtaacagggtaggatacttcagcattaggaaaagcatgacctgtagctag

SEQ ID NO: 247015 - DNA, 1389 bp, synthetic construct
  misc_feature 1..1389: note = Description of Artificial Sequence: Synthetic coding sequence
  source 1..1389: mol_type = other DNA
atgaacactcggccacaacacagcgagcggacatccacgatggaccgcgtgtatgagatacccgaggagcccaacgtagatccagttagctcactggaggaggacgtcatccggggagctaacccacgtttcacgttccccttcagcatcctcttctccacctttttgtactgtggcgaggcggcttcagctctgtatatggtgcgtatctatagaaagaatagcgagacctattggatgacatatacttttagtttcttcatgttcagcagcatcatggttcagttgacattgatcttcgtgcatagagacctcgccaaggacaagccattatctctgtttatgcacttaatcctactcggtcctgtaataaggtgcctggaagcaatgatcaaatacctgactctgtggaagaaagaagagcaggaagagccgtacgtaagcctcacacgcaagaagatgctcatcgacggggaagaggtgctgattgaatgggaggttggccacagcattaggaccctggccatgcaccggaatgcctacaagcggatgtcccagatccaggctttcctcggttcagtaccccaactcacatatcagttatacgtgtcgcttatctccgcagaagtgcccctgggaagagtcgtgctgatggtctttagcctcgtgtcagtcacctatggagcaacactttgtaatatgcttgcaattcaaattaagtacgacgactacaaaatccggttgggccctctggaggtcctttgcatcaccatctggcgcaccctggagataacctctaggctgttgatactggtcctgtttagcgcgactctcaaacttaaggctgttcccttcttagttctgaatttcctcatcatcctatttgagccctggataaagttctggaggtctggggctcagatgcctaataacatcgagaagaacttttcgcgtgtggggaccctggtggtgctgattagtgtgactatcctgtacgctggaataaatttttcttgctggtctgcattgcagctcaggttggccgatcgggacctagtcgataaagggcagaactggggtcatatgggtttgcattattctgttaggttagtggaaaacgtcataatggtgctagtgtttaaattctttggtgtaaaagtattgctcaactactgccacagcctcatagccctgcaattgatcatcgcttacctgatttccatcgggttcatgctcttgtttttccagtatcttcacccgcttaggagcctgtttacccacaacgtggtagattacctgcactgcgtgtgctgtcaccagcacccgcgtactcgtgtggagaactccgaaccccctttcgagacggaggccagacagtccgtcgtttag

SEQ ID NO: 247016 - DNA, 1350 bp, synthetic construct
  misc_feature 1..1350: note = Description of Artificial Sequence: Synthetic coding sequence
  source 1..1350: mol_type = other DNA
atggatcgagtgtatgagatacccgaagagcccaatgttgatcctgtgtctagtctcgaagaggatgtgattaggggcgcaaacccaaggttcacatttccattttccatattgttctcaacctttctgtactgcggcgaggccgcttctgcactctatatggtccgaatctatcgtaagaactccgagacctactggatgacctataccttctccttcttcatgttctcttccattatggtgcagctcacgctgatctttgtgcaccgggatttggcgaaggataagccgctcagtctgttcatgcatctgatattactgggacccgtcatcagatgcttggaggcaatgataaaatatttaaccctgtggaaaaaggaggaacaagaggaaccctatgtctctttaacacgcaagaagatgctgatcgacggagaagaggttctcatcgagtgggaagtcggccacagtatccgaacactcgcaatgcaccggaacgcctataaaaggatgagccagattcaagcgtttctgggaagcgttcctcagttgacttaccagctgtatgtgagcctcatctctgctgaggtgcccctgggtagggtcgtcttaatggtattcagtttggtctctgttacttatggggctaccctgtgtaacatgctagccatccaaattaagtacgatgactacaagattcgacttggcccactggaggtgctctgtataaccatctggcgcaccctggaaattaccagccgactcttaattctggtcttgtttagcgcaaccctgaagctgaaggcggtgccttttctggtgttaaatttcttgatcatactctttgaaccctggatcaaattttggcgctcgggcgcacaaatgcctaataacattgaaaagaatttctctcgtgttgggactctagtcgtcctcatctcagtgaccattttatacgccggtatcaatttttcgtgctggtccgctctgcagctgagattagcagaccgggatctggtggataaaggccaaaattggggtcacatgggcctgcattattctgtgagattggtagagaatgtgattatggtgctggtgttcaagttcttcggagtgaaggtgctcctgaattactgtcattccctgattgcgcttcaactgattatagcataccttatttccatcggcttcatgttactgttcttccagtacctgcaccctctgcggtcactgttcacgcacaatgtggtggattacctccactgcgtgtgctgtcaccagcatccaagaaccagagtcgaaaatagcgaaccaccttttgagacagaggctcgacagtcggttgtctag

SEQ ID NO: 247017 - DNA, 1335 bp, synthetic construct
  misc_feature 1..1335: note = Description of Artificial Sequence: Synthetic coding sequence
  source 1..1335: mol_type = other DNA
atgaagtttcctgcttcagttctggctagtgtcttcttgttcgttgctgaaacgacagccgctctctccctgagctcgacttatcgtagtggtggagatcgtatgtggcaggctctgacactactgttctctctgttgccttgcgccctcgtgcaactgactctgcttttcgtgcatagagatctatcccgcgatcgacccttagtactcctgctgcaccttctgcaactgggacctctgttcaggtgcttcgaagtgttttgtatatactttcagtctggcaataacgaagaaccatatgtgtccatcacgaagaaacgccagatgccaaagaatgggctgagcgaggagatcgagaaagaggttggacaggcggaagggaaattgatcacccaccgctcagccttctcccgtgcttccgtgatccaggcctttctcgggagcgctccccagttaacactgcagctctacatctcagtgatgcagcaggacgtcaccgtgggcagaagccttctgatgacgataagcctcctgagcatcgtgtatggcgcacttcgctgcaatatcctagccattaagatcaagtacgatgaatacgaagtgaaggtgaaacccctcgcttatgtgtgtattttcctgtggcggtcgttcgaaattgcaactcgcgtcgtggtgctggtgctttttacgtccgtgctgaagacctgggttgtggtcattatactgatcaattttttctcttttttcctgtatccctggattctgttttggtgcagtggaagcccatttcccgagaacatcgaaaaggctctttctagggtggggaccaccatagtactctgcttcctgactctgttgtacactggcataaacatgttctgctggtccgcggtccagctgaaaattgattcaccagatctgatctcaaagagccataattggtaccaactattggtgtattacatgattcggtttattgagaatgccattctactcttactttggtacttgtttaaaactgatatttacatgtatgtgtgcgcacctctgttagtcctccagctcctgatagggtattgtactgctatcctgttcatgttagtcttttaccaattttttcatccatgcaaaaaactgttcagctcttcagtgagcgaagggttccaacgctggttaaggtgcttctgctgggcctgtcgtcagcagaagccctgcgaacccataggaaaagaggacctgcagtctagccgcgaccgggatgagacaccatcatcttcgaaaacctcccctgaacctgggcagttcttgaatgccgaggacctgtgttctgcctag

SEQ ID NO: 247018 - DNA, 1929 bp, synthetic construct
  misc_feature 1..1929: note = Description of Artificial Sequence: Synthetic coding sequence
  source 1..1929: mol_type = other DNA
atggccgcaagccgcaagccaccacgggtacgggtcaaccaccaggacttccagttacgcaacctgagaatcatcgagccgaacgaggtgactcactccggagacactggtgtagaaacagatggaagaatgcctccaaaagtaactagtgagcttctacgtcagctgagacaggctatgagaaacagcgaatatgttaccgagcccatacaggcctatatcattccatccggagacgctcaccagtcggagtatattgccccatgtgactgtcgacgtgccttcgtgagcggctttgacggttcagctggcacagccattattacagaggaacatgcggctatgtggacagatggacgctatttcctgcaggctgccaagcaaatggattccaactggaccctcatgaagatgggactcaaggataccccgacacaggaggattggctggtgtctgtactgccagaaggtagcagagtgggggtggatccccttatcattccaaccgattattggaaaaaaatggccaaagttcttcgttctgcaggtcaccacctcataccggtaaaggagaatctggtagacaaaatctggaccgacagacctgaaaggccctgtaaaccgttgcttactctgggcctcgattataccggaatttcttggaaagacaaggtggcagatttaagactcaagatggccgagcgaaatgtgatgtggtttgtggtcaccgccctggatgagatcgcttggctctttaatctccgcggatctgacgtggagcacaaccccgtgtttttcagctacgcaatcatagggctcgagacaattatgcttttcatcgatggcgacaggatcgatgctccttctgtgaaggaacacttgctgctggacctcgggctggaggcagagtaccggatacaagtacatccctacaagagtatcttgtctgaactcaaggcactgtgcgccgatttgagccctcgggagaaagtttgggttagcgataaagcctcctacgcagtgtccgagacgatccctaaagaccaccggtgctgcatgccctacaccccaatttgcatcgctaaagccgttaagaactccgccgagtcagaagggatgagacgggctcacattaaggatgccgtggccctttgcgaacttttcaactggcttgaaaaggaagtgcccaaagggggagtcacagagatctcagccgcagataaagccgaagagtttcggaggcaacaggctgatttcgtagatctatccttccctaccatttcttccacaggccctaacggagctatcattcattatgctgatgggacgacggatgtgacccgcacaatgcattttggaacacccaccgcttatgagaaggagtgctttacctatgtgctgaaggggcacatcgccgtctcagctgcagtgttccccacgggaaccaagggacatctgctagatagcttcgccagatcagctctctgggatagcggtcttgattatctccacgggactggacatggggttggttctttcctcaacgtgcatgagggcccttgcggaattagctacaagacgttctctgacgagccgctggaagctggaatgatcgtgaccgacgagcccggatactacgaggacggggcttttggcattagaattgaaaatgttgtcctggtagtgcctgtgaagactaaatacaacttcaataacagaggatccctgacctttgaacccctcacacttgtgcctatccagacaaaaatgatagacgtagactctcttacagataaggaatgcgattggcttaataactatcacctgacctgccgggatgttatcggcaaagaattacagaaacagggtaggcaggaagcgttagagtggctaatacgcgaaacccagcctatatccaaacagcattag

SEQ ID NO: 247019 - DNA, 1872 bp, synthetic construct
  misc_feature 1..1872: note = Description of Artificial Sequence: Synthetic coding sequence
  source 1..1872: mol_type = other DNA
atgcccccaaaggtgacttccgagcttctgaggcagctgcgccaggcaatgcggaactcagagtatgtaactgaaccaatccaggcttatatcataccctcaggcgatgctcaccagagcgagtacattgctccctgtgactgtcgtagagcttttgtttcaggtttcgatggcagcgcgggtactgccatcatcacagaggagcatgctgcaatgtggactgacggtagatacttcctgcaggctgctaagcagatggatagcaattggaccctaatgaagatgggactcaaggacacccctacccaggaggactggcttgtgagtgttttacccgaaggatcaagggtgggcgtcgatccactcatcataccgacggattattggaagaagatggccaaagtcctgcggagtgccggacaccacctgatccccgtgaaggaaaacctggtcgataagatttggactgaccggcctgaacgcccttgcaagccactgctcacactcggcctggactataccgggatatcatggaaagataaggttgccgaccttcggctgaaaatggcagagaggaacgtgatgtggttcgttgtcactgcactggatgagattgcctggctgttcaatctgcggggatctgacgtcgagcacaaccctgtgttcttttcttacgccattattggcctcgagacaatcatgctatttatcgacggcgataggatcgatgcacctagcgtcaaagaacatctcttgctggatctgggattagaggccgaatacaggattcaggtgcatccgtataagtctatcctttctgagttgaaggccctctgtgcggacctatccccacgtgaaaaggtgtgggtaagtgacaaagcgagttacgcggtaagcgaaacaattcccaaagatcataggtgctgcatgccatatacacccatctgtatcgcaaaagccgtgaagaactctgctgaatctgaagggatgcggcgagctcacattaaggacgctgtggccctgtgtgagttgttcaactggctggagaaggaggtacctaagggaggggtgacagaaatatccgcggcagacaaggctgaagagtttcgccgacaacaagcagacttcgtggacctgagctttcccacaatcagtagcacaggaccaaacggcgctataattcactacgccccagtgcctgagacaaaccgcacactgagtttggacgaagtctatctgattgactctggcgcacagtacaaggacgggacgacagacgtcacacggacgatgcacttcggtacgcccacggcctatgagaaggaatgcttcacctatgtgctgaaaggccatatcgccgtctcggccgctgtgtttccaacagggacgaagggtcatctgctagacagttttgcaaggtctgccctctgggattccggactcgattatctccatgggacagggcatggtgttggaagctttctgaatgtgcacgagggaccgtgtggtattagctacaaaaccttctctgacgagcctttggaggctggtatgatcgtgactgatgaaccgggatattacgaggatggagcatttgggattcggatagagaacgtggtgctggtcgtacctgtgaaaactaagtataattttaacaacagaggctctttaactttcgagccgttgaccttagtgccgatccagactaagatgatcgatgtagactctcttacggacaaagaatgtgactggctcaataactatcacttaacatgccgggatgtaatcggcaaggagctacaaaagcaagggcgtcaagaagctttggagtggctgatccgggaaacgcaaccaatctccaagcagcactag

SEQ ID NO: 247020 - DNA, 1659 bp, synthetic construct
  misc_feature 1..1659: note = Description of Artificial Sequence: Synthetic coding sequence
  source 1..1659: mol_type = other DNA
atgtggaccgacggtcgctattttttgcaggctgcaaagcaaatggattcaaattggacactgatgaagatgggactgaaggacacccccacacaggaggactggctggtttcagttctcccggagggcagtagggtaggagtcgatccactcatcattccgacagactactggaaaaagatggccaaggtgctacgcagcgccggacatcacctgattccagtgaaggagaatctggtggataagatctggacagacagacctgaacgcccatgtaagcccctgttaaccctgggactcgattatactgggatcagctggaaagataaagtggcagacctgaggctgaagatggctgagagaaacgttatgtggtttgtggtgacggcactagacgaaattgcgtggctgtttaatctaaggggtagtgatgtcgagcataacccagtattcttcagctacgccattatcggcctggaaactattatgctgttcatagacggtgataggatcgatgctccatccgttaaggagcacctattgttggatctcggcctggaggccgaatatcggattcaagtccatccttataagtcaattctttcggagttgaaggccctgtgtgccgatttatcccctagggagaaggtatgggtaagtgacaaagcctcgtatgcagtctccgaaactattccgaaagaccacagatgctgtatgccttacacccctatttgcattgctaaggccgtgaagaattccgctgaaagcgagggaatgaggcgcgcacatataaaagacgctgtcgccctgtgtgaactatttaactggctggagaaagaagtgcctaaagggggagtgacagaaatctcagctgcggataaagcggaagagttcagaaggcagcaggctgactttgtggacctctccttccccacaatcagctccaccgggcctaacggggctatcatccactacgcgccagttcctgaaaccaataggactcttagtctggatgaagtatatcttatagacagcggtgcccagtataaggatgggactacggatgttacgcggacaatgcacttcggcacgcccaccgcctacgagaaggagtgcttcacttatgtgcttaaaggacatatcgctgtctctgccgctgtgtttcctaccgggacgaaagggcatttactggattcttttgcccgatccgccttgtgggacagtgggctggattacttgcacggcactggtcacggcgtgggctcttttcttaacgtgcacgagggtccatgcggaatttcttacaagacattttctgacgaacccctggaagcagggatgattgtgacagatgaacccggttactacgaagatggagcattcggcattcggattgaaaatgtagtcttggtggtccctgtcaaaacaaagtacaacttcaataatcgaggcagtttgacgttcgaacccctgacactggtgccaatccaaactaagatgatcgatgttgatagcctgaccgacaaagagtgcgattggcttaacaactatcacctgacctgtcgggacgtaatcggtaaggagctgcagaaacaagggcgtcaggaggccctcgagtggctaatccgtgagacccagccaatcagtaagcagcactag

SEQ ID NO: 247021 - DNA, 912 bp, synthetic construct
  misc_feature 1..912: note = Description of Artificial Sequence: Synthetic coding sequence
  source 1..912: mol_type = other DNA
atgccccctaaagtcacatctgaactgctgaggcagctgaggcaggccatgaggaactcagagtatgtcaccgagccaatccaggcttacatcatcccctccggcgacgcccatcagtcagagtatatcgcaccatgtgattgccgcagggctttcgtgagcggctttgatgggagcgccggaacagctattatcactgaggaacatgccgctatgtggactgatggcaggtattttctacaagcagctaaacagatggatagcaattggactcttatgaagatggggttaaaagacactccgactcaggaggactggttagtatcagtgcttccagaaggatctagagtgggcgtcgatccactgatcattcccacggactattggaagaagatggccaaggtcctgcggagcgcagggcaccatctaataccggtgaaggagaacctggtggacaaaatctggaccgacagacctgaacgaccctgtaaacctcttttgaccctggggcttgactacaccggaatctcctggaaagataaagtggctgacctccgactaaagatggctgagcgcaatgtgatgtggttcgtagtcacggctctcgatgagattgcatggctattcaatctaaggggaagtgacgtcgaacacaacccggtctttttttcatacgcaataatcggactggagacaatcatgctcttcattgatggcgatcgcatcgacgctcccagcgtcaaagaacacctgctgttagacttgggactggaggccgagtatcggattcaagtccacccatacaagtctattctcagcgagctgaaagcactgtgcgccgatctttcaccacgcgagaaagtttgggtgtcggataaggcgtcctacgcggtgtccgaaactatcccttag

SEQ ID NO: 247022 - DNA, 2001 bp, synthetic construct
  misc_feature 1..2001: note = Description of Artificial Sequence: Synthetic coding sequence
  source 1..2001: mol_type = other DNA
atggcagctagccggaagccacctagagtccgggtcaaccatcaggattttcagctaagaaatctgcggataatagaacctaacgaggtcacccacagtggcgatactggcgtggagaccgatgggagaatgcctcccaaagtgactagcgagttactgagacagcttcgccaggcaatgcggaattctgagtacgtgaccgaacccatccaggcctatatcatcccttccggtgatgcacaccaatctgaatacatcgccccttgtgactgtagacgcgcttttgtcagcgggtttgacggatcggcagggacagccattattactgaggaacacgccgcaatgtggacagatggcagatacttcctgcaggctgccaagcagatggatagtaactggacactcatgaagatgggtctcaaagatactcccacccaggaggactggctggttagtgtactgcccgaggggagccgcgtgggggtggaccctctgatcatacccaccgactactggaaaaagatggctaaagtcctgcgaagcgctggccaccacctgatcccggtgaaggaaaatctggtggacaaaatctggaccgatcggccagagaggccttgtaaaccattattaactcttggactggactacaccggcatcagttggaaggacaaagtggctgacttgagactgaagatggctgagcgcaatgtgatgtggttcgtagtaacagccctggacgaaatagcgtggctgtttaacctgcgtgggtcagatgtggaacacaaccccgtgtttttttcctacgccatcattggactcgaaacaataatgcttttcatagatggcgacaggatcgatgccccatccgtgaaggagcacttgctgttagacttgggtttggaggccgagtatagaatacaggtgcatccatataaatccatcctatctgagttgaaagcactgtgtgcggacctgtccccacgggagaaggtgtgggtgtctgacaaggcttcttacgcagtcagcgaaactattccgaaggaccacaggtgctgcatgccgtacactcccatttgcattgcaaaggccgtgaagaactctgccgagtctgaggggatgcgccgtgcacatataaaagacgctgtggccttatgtgagctgttcaactggcttgagaaagaagtgcccaaagggggtgtaactgagatttcagctgccgacaaggccgaggagttccggagacagcaggctgacttcgttgatctgtcatttcccaccatcagttccaccggaccgaacggcgctattatccactacgcacctgtgccagagactaacaggactctgagtctggacgaagtataccttattgattctggcgcacagtacaaggacggcacaaccgatgtgacaagaacaatgcattttggcacccccaccgcctacgagaaggaatgttttacctacgtgctgaaagggcacatagcagtgtcagccgcagtctttcctaccggaaccaaaggacacctcctggattctttcgcaagatcggccctgtgggatagtggcctggattatctccacggaaccgggcacggggtgggctcctttttgaacgttcacgagggcccttgcggtatctcatataaaacgttttccgacgagcctctggaagccggaatgattgttaccgacgagcctggctattatgaagatggtgctttcggaattcggattgaaaacgtagtcttagtggtgccagtgaagaccaagtacaatttcaacaatagaggatccctcacctttgaaccacttactttagtgccgatccaaaccaaaatgattgacgtggacagcctgaccgacaaagagtgtgattggctcaacaattaccatctgacctgccgggatgtgattggcaaagaactgcaaaagcagggacgccaggaagcgctcgagtggctcattagagaaacccaacctatatcaaagcagcattag

SEQ ID NO: 247023 - DNA, 552 bp, synthetic construct
  misc_feature 1..552: note = Description of Artificial Sequence: Synthetic coding sequence
  source 1..552: mol_type = other DNA
atggcacgtgcacattggggctgctgtccttggcttgttctcttgtgtgcctgcgcctggggtcacacgaaaccggtcgacctaggtggccaggatgtcagaaattgctctaccaacccaccttatctgccagttacagtcgtgaacacaaccatgtctctgactgcgctgagacagcaaatgcagacccaaaatctctcagcttatattattcccggtactgatgctcacatgaatgaatatattggtcagcatgatgagcgcagggcgtggattacagggttcactggaagtgccggaaccgctgtggttacaatgaagaaggccgctgtgtggaccgattccaggtactggactcaagctgagagacagatggactgcaactgggagctgcacaaggaggtaggaaccaccccaatcgttacctggctgcttactgagatccctgctggcggtagggttgggttcgatcctttcttattaagtatcggaatgttatttctacagagtttgaacctttctatgctaacaagggtgacccagctaccctag

SEQ ID NO: 247024 - DNA, 2025 bp, synthetic construct
  misc_feature 1..2025: note = Description of Artificial Sequence: Synthetic coding sequence
  source 1..2025: mol_type = other DNA
atggccagggcccactgggggtgttgtccctggctggtgcttctgtgcgcttgtgcctggggccacaccaagccagtagacctcggtgggcaggacgtgcgaaactgctctaccaatcccccttacctgccggtaactgtggtgaataccacaatgtccctgacggccctgcgccagcagatgcagacacaaaatctcagcgcctatattatccctggcacagacgcacacatgaatgaatatataggtcagcacgacgaaagacgagcctggatcaccggtttcacagggtccgctggcacagcagttgtgaccatgaaaaaggctgcagtgtggaccgacagtcgctactggactcaggctgagcgccagatggactgtaactgggagcttcataaggaagtgggcaccactcctattgtcacctggttattgacagagattccggcaggcggacgggtaggattcgaccctttcctactctctatcgacacctgggaatcttatgatttagccttgcaggggtcaaatcgccaactggtgagcatcacaaccaacctggtggatctcgtttggggtagtgaacggcctccagtgcccaaccagccaatttacgctttgcaggaggcttttacgggctccacatggcaggaaaaggtctccggggttcgctcacagatgcagaaacaccagaaagtgcctaccgccgtcttactctcagccctggaggaaactgcttggctgtttaacttgcgggcaagcgacatcccctataacccctttttttacagctataccctcctgaccgacagttccatccgcctattcgcgaataaatcacgcttcagctccgagaccctttcataccttaatagctcttgtacagggccaatgtgcgtgcagatcgaggactacagccaggtccgcgattccatccaggcatactccctcggcgacgttaggatatggatcggcacatcctataccatgtatggcatctatgagatgatccccaaggagaagttagttacagatacttatagccccgtgatgatgactaaggctgttaaaaattcaaaggagcaggccctcctgaaagcaagtcacgttagggatgcggttgccgtgattcggtacctagtctggctcgaaaagaacgtgcccaagggaaccgtggatgaattctccggtgctgagattgtggataaattccggggtgaggagcagttcagtagcggtccctccttcgaaaccataagcgctagcgggttgaacgccgcactggcccactattccccgaccaaggagctgaataggaaactgtcttctgatgaaatgtatcttctggattccggcggtcaatattgggacggtaccacagacattacccgtaccgtgcattggggcacgccatcagctttccagaaggaggcctatacaagagtactgattggcaacatagacctctcccggctgatttttccggcagctacctctggcaggatggtggaagcttttgcgaggcgcgcattgtgggacgccggtcttaattacggccacggaacaggtcacggaatcgggaacttcttgtgcgtgcacgagtggcccgtcgggtttcagagcaataatatcgcaatggccaaggggatgttcacctccattgagcctggatattacaaggatggcgaattcggaattcggctggaggatgttgctctggtggtggaagccaaaaccaaatatccgggaagctacctgaccttcgaagtcgttagctttgtcccatacgataggaacttgatcgatgtctctctgttaagtcctgaacacttacaatatctgaatagatactatcagacgataagagagaaggtcggtcctgaattacagcgtcgacagctgctggaagagttcgaatggttgcagcagcacacagaacctctggctgcgcgtgccccagacactgccagttgggcctcggtcctggtggtgtcaacactggccatcctgggttggtccgtatag

SEQ ID NO: 247025 - DNA, 1524 bp, synthetic construct
  misc_feature 1..1524: note = Description of Artificial Sequence: Synthetic coding sequence
  source 1..1524: mol_type = other DNA
atgccctggcttctgtccgccccaaaactcgtgcccgcagtcgctaatgtgcggggactgtcgggttgcatgctttgctctcagcgcagatattcactccagcctgtccccgaacggaggatccctaataggtacctcggccagcccagtcccttcacccatccccatctgctgagaccgggagaggtgactcccggactgagtcaggtggagtacgctctacggcgtcataaactgatgtccctcatccaaaaagaagctcaggggcagagcgggacggatcaaactgtagttgtgctcagcaaccctacatactatatgtcaaatgacattccctacacctttcatcaggacaataatttcctttacctgtgcgggttccaggagcccgatagcattttggtacttcagtcattaccaggtaagcagctcccaagccataaggcaatcctcttcgtcccaaggcgagacccttccagagaactgtgggacggcccacgctccgggaccgatggagcaattgctctcactggtgtagatgaagcatacacactggaggaatttcagcacttactccctaagatgaaagccgaaacgaatatggtttggtatgactggatgcggcctagccatgcacagcttcactccgactatatgcagccgctgaccgaggccaaggctaaaagtaagaataaggtacggggtgttcagcagctcatccagcgcctccgcctgatcaaaagtcctgcagagatcgagagaatgcagattgcaggcaagctgaccagccaggcttttatagagacaatgtttacctctaaagccccagtagaggaggcttttctgtacgctaaatttgagtttgagtgcagagcacgcggagcagatatcctggcctatccgcctgttgtagccggaggcaacagaagcaacaccctgcactacgtgaagaacaatcagctgattaaggatggagagatggtgctgctggatggcggatgcgagagctcttgctatgtttccgatattacccggacgtggcccgtaaatgggagattcactgcccctcaggcagagttgtatgaagccgtactggaaatacaaagggattgcctagccctgtgcttcccaggcaccagcctcgagaatatctactccatgatgctgacactgattggccagaaactcaaggatctgggtattatgaaaaatatcaaagaaaacaatgcattcaaagcagcccgaaagtattgccctcaccacgtgggacactatttaggcatggacgttcacgatacaccagacatgcctagaagcttgcccctccagcctggaatggttatcacaattgagccaggcatttacattcccgaagatgacaaagatgctcccgaaaaattcagaggcctaggggtgagaatagaggacgatgtggtggtcacccaggactcccctctgatattgagcgctgattgtcctaaggagatgaacgacattgaacagatttgctcccaagcttcttag

SEQ ID NO: 247026 - DNA, 837 bp, synthetic construct
  misc_feature 1..837: note = Description of Artificial Sequence: Synthetic coding sequence
  source 1..837: mol_type = other DNA
atgccctggttgttgtccgcccctaagctggtgcctgcagtggccaatgtgcgcggactgtccggatgtatgctctgctcccagagacgatattccctccaacccgtgccagagaggcggatacccaaccgttatttagggcagccctcacctttcacccatccccacctgctgaggcccggagaggtgacacctggcctatcacaggtggagtacgctctgaggagacacaaactgatgtccctgattcagaaggaggcccagggacaatctgggacagatcagactgtggtggtactctccaatcctacatattatatgtcgaacgacattccatataccttccaccaggacaataactttctgtacctctgcggctttcaggagcccgattccatactggtgctgcagtctctccccggaaaacagctgccctcccataaggccatcttgttcgtgccaagacgggacccctcgcgtgaactgtgggacgggcctagatccggcacggacggtgctatcgctttgactggagtggatgaagcgtatacccttgaggagtttcaacatttgctgccaaaaatgaaagccgagaccaacatggtctggtatgactggatgcgcccaagccacgcacaacttcattccgattacatgcagccactgaccgaggctaaggccaagagcaagaacaaggtgcggggagtgcaacagttgattcaacggctgagacttatcaaaagtccagcagagattgagaggatgcagattgccggaaagctgaccagtcaacgccagggctttagcgtgctttcacggctggtttccaactcctag

SEQ ID NO: 247027 - DNA, 867 bp, synthetic construct
  misc_feature 1..867: note = Description of Artificial Sequence: Synthetic coding sequence
  source 1..867: mol_type = other DNA
atgccatggctgctcagtgctccaaaactggtgcctgctgttgcaaacgtgagagggttgagcggatgtatgctgtgttctcaacggcgttattccctgcaaccagtcccagagagaagaatccccaaccgttaccttggccagccaagccccttcacccacccacatttgctgaggccaggtgaagtgacaccaggcttaagccaggtcgagtatgcactgaggaggcataaactgatgtcgctgatccaaaaagaagcgcaggggcaaagtggtacagatcagactgttgtcgtgctctctaacccaacttattatatgtctaacgatatcccatacacatttcatcaggataacaatttcctgtacctatgtggtttccaggagccagattctatacttgtgcttcagtcactccccggaaagcagctgcccagccacaaggctatcctattcgtgcccaggcgggacccatctcgcgaattatgggatggcccaaggagcggaaccgatggcgctattgctctgaccggagtggatgaggcctacaccctggaggaattccagcatcttctaccaaagatgaaggccgagactaatatggtgtggtacgattggatgaggccaagccatgcacagcttcatagtgactacatgcaacctctgaccgaggccaaggctaagagcaagaacaaggttagaggtgtgcaacaattaatccagcgacttcgcctcatcaagtcacccgcagagatcgaacggatgcagatcgccggtaagctcacgagccagaagtccgttctgttagccagacacgggggttcacgcctctattcgcaccactttgggagacccaggctgagttag

SEQ ID NO: 247028 - DNA, 1455 bp, synthetic construct
  misc_feature 1..1455: note = Description of Artificial Sequence: Synthetic coding sequence
  source 1..1455: mol_type = other DNA
atgctttgctctcagcgcaggtactccctccagccagtgccagagaggcgaattccaaatcggtacttagggcagccgagcccttttactcaccctcacctgctgcggcctggggaagtcacacctgggcttagccaagtggaatatgcactgcggagacataaactgatgtccctgatccagaaagaggcccaaggacaatctggcacagatcagaccgtcgtggtgctgtcgaatccgacatactacatgagcaacgacatcccatatactttccaccaggataataacttcttgtacctgtgtggcttccaggagcccgacagcatcttggtgctgcagagcctgcccggaaaacagctgccatctcacaaagctatcctcttcgtgcctcgccgagacccttccagggaactgtgggatggcccaaggagtggaaccgatggcgctatcgctctcactggggttgacgaggcttatacgctggaagagttccagcacctgcttcccaaaatgaaagctgaaaccaacatggtttggtacgactggatgcgacctagtcatgcccagctccacagcgattatatgcagcccctcaccgaggcaaaagcgaaaagtaagaacaaggttcgcggtgttcagcagctcatacagcgcctgagattgattaaaagtccagcagaaatcgagcggatgcaaattgcaggcaaactcacctcccaggctttcattgagactatgtttacctctaaggcgcctgtcgaagaggctttcctgtacgctaaatttgagtttgagtgcagagctagaggagccgacattcttgcctacccccctgtcgttgccggtggaaaccggtccaatacattgcattacgtcaaaaataatcaactaatcaaggacggagagatggtgctcctggatgggggttgcgaatctagttgctacgtaagcgacatcacacgaacgtggccagtgaacggccgttttactgccccacaggccgagctctacgaggccgtcctcgagattcaacgggattgtcttgccttgtgctttccaggcacttcccttgaaaacatttactccatgatgctgacccttattggtcagaagctgaaggatctgggaataatgaagaacatcaaggaaaacaacgcattcaaagccgcaagaaaatattgtccgcaccatgttggccattacctgggcatggatgtgcacgataccccagatatgcccagatccctgcctctgcagcctgggatggtcatcaccatagaacctggaatctatatcccggaagacgacaaagacgcgcctgaaaaatttcgtggacttggagtcaggatcgaggacgatgtggtagtcacccaagatagccccctcatcctgtctgcagattgcccaaaagagatgaatgacatcgaacagatctgcagccaagcgtcatag

SEQ ID NO: 247029 - DNA, 2379 bp, synthetic construct
  misc_feature 1..2379: note = Description of Artificial Sequence: Synthetic coding sequence
  source 1..2379: mol_type = other DNA
atggcctttagcggaatttataaactagacgacggtaagccatacctgaacaactgttttccagctcgtaacctcctgagggtccctgaagagggccaagggcactggcttgtagtccagaaggggaacctgaagaagaaacccaagggcctagtgggagctcaggccgagaggcgggagtcactgaaagccaccagctttgaattcaaaggcaagaaagagtcccgacgggaaaaccaagttgacctgcccggacacatactcgatcaggcctttctactgaagcatcactgtgtgagaaaaccaagcgatctctgcactatcaatgccaaggagaatgatttcaagcatttccactccgttatctacatcaacgcatccgagaacctccttccactggaggcattccatacttttccagctctaaaggaactggacctcgcctttaacgggatcaaaacaatatacgtgaaatacggtgactttaagctattggaatttttagatctgtcattcaacagcctgaccgttgaggcaatctgcgatctggggatcctgccccacctgagggtcctgctgctgacggggaatggcctgacttcattgcctcccaatctggcagtagccgagcaggaagcatccgtgacctcactcactagcaaacgatacatcctgcggttccctgcacttgagacattgatgctggatgacaatcgactctctaacccttcttgctttgctagcctggcaggcctgcggaggctgaagaagctgagtctggacgagaatcgcatcatcaggatcccgtacctgcaacaggtccagctgtacgatgaatctgttgattggaacggcggtcggggttctcctcacaaagagccccagttcatgcttcagtccaaacccagaatgctcgaggactctgacgagcagcttgattatactgtgttgccgatgaagaaggatgttgacaggacagaggtggtcttttcctcgtaccccggtttcagcaccagcgaaaccaccaagatatgcagcctgcctccaatatttgaaattttaccagtcaaaagcctgaaggcacgcaatcaaacgctggccccacctttcccagagctgcgttatctgagcctcgcgtacaacaagatcgcaaaggaggacgccgtgttgcccgtggctctgtttccttccctttgcgaatttgtattccacaataacccactcgtggcccacacacgcggagtccctccactgctgaagtcattcttgcaggaacggctcggcatccatctgattcggaggaagatagtgaagccgaagcaccatgtgttaatgagtcggaaggagagctggaaagtgaagtctgagatccctaaagttccaaagcagcccctagtgctgcatcatccgagaatgactaccacaaagtcgccctctaaagatatgttggaacccgaagcagaacttgccgaggatcttcccactaccaaatccaccagtgtggagagtgaaatgcccaccgaaaatttggagggccactctcctagttgtcgaacattcgtgccactgcctcccatatgctccaattcaaccgttcacagcgaggaaactctttcacatctgtctgataccacagtgaggctgtcccctgaacggcctagcgatgaagatagtaaaagcacggaaagcatttttctgactcaggtatctgagcttccctcatccgttatccacaaagatgatcttgagctaaaagaaaaagaccaaaaaaagccacctaccgctcccagggaggtgaagggaacacgacggaagctgcccactgcatttctgccatcaaaatatcatggctacgaagaactgctcacagccaagccggatcccgcatttatcgaacctaaagggattcagaagaacgcacaggctctgcagcaaatgcttaagcacccgctcttatgtcatagctctaaacccaaacttgacacactccagaaaccctatgtccacaaagaaaaacgggctcaacgcataccaatcccacctccaaaaaagacacgtgctcagttgttggatgacatatttatccgcctcagggaccccagaaatattaccgaggcccctttgggagctgtgctgcaccagtggaccgagagaaggcttgtaaatcacaagcagtatcttgaggcaaaaaggttgctcaaggagtttcaggcgcgataccggcagctggttagcggtagccttcggactgtcttcggcaccactcccttacccatggcttgtcccgctctttccgagtcgcagcctaaattcggccatttcctggaattcatggatgagttctgccaggaacctaccgcctccgatagccagggctag

SEQ ID NO: 247030 - DNA, 2337 bp, synthetic construct
  misc_feature 1..2337: note = Description of Artificial Sequence: Synthetic coding sequence
  source 1..2337: mol_type = other DNA
atggccttttccggaatctacaaactcgacgacggcaagccataccttaataactgcttcccagcaaggaatttgctcagggtcccagaggaggggcaaggtcactggctcgtggtacagaaaggtaacttgaaaaagaaaccaaagggcctggtgggcgcacaggcggaaaggcgcgaatcactaaaggctactagtttcgagttcaaaggcaaaaaggaaagcagacgagagaaccaagtggacctccccggacacattttggaccaggctttcctcctcaagcaccactgcgttcggaaaccgtcagacctttgtaccattaatgccaaggagaacgattttaaacacttccactctgtaatctacatcaacgctagcgagaaccttctgcctctggaagcattccatactttccctgcattaaaggagctcgatctcgcctttaacggaatcaagaccatctacgttaaatatggggatttcaagctcctggaatttcttgatcttagttttaactcgctgacagttgaggcaatctgcgacctgggaatcctgcctcatctccgagtgctattgttaacagggaatggactgacatcgctccccccaaatttggcggttgcagaacaggaagcatctgtgacctccctgacctccaagcgctacatcctgaggttcccagctctggaaaccctcatgctcgatgacaacagactatctaaccctagttgtttcgcgtcattagccggtctccgtagactgaaaaaactgtccctggatgagaacagaataattcgaattccttaccttcagcaggttcagctgtacgatgagtccgtcgattggaatggcggaaggggaagcccacacaaggagccacagttcatgctgcagtcaaagccgcgtatgctggaggacagcgacgaacagctggactacacagtcttgcccatgaaaaaggatgtagatcgcaccaccactaaaatctgctcactgccgccaatcttcgagattcttccagtgaagagcctgaaggccagaaatcagacattagcccctccatttcccgagctgaggtacctgtcattggcatacaataaaatcgccaaagaagatgccgtccttcccgtggctttgttcccctcattgtgcgagttcgttttccacaacaaccccctggtggcccatacccgcggtgtgccaccactgctgaaatcattcctgcaggaacggcttggcatccacctaatccgaagaaagatagtgaaacctaaacatcatgtgctgatgtctcggaaagaatcatggaaagtgaagagtgaaatccctaaggtgcctaagcagccactggtacttcatcaccctcgaatgacgactacaaaatccccgagtaaagatatgcttgagcctgaggcagagttggcagaggacctgcctaccactaaatctaccagcgtcgaatccgaaatgcccactgaaaatctggaaggacactctccaagctgccgcacgtttgtgcctttaccacctatctgcagtaacagtacagtgcactcagaggaaaccctgtcacacctgtccgacacaacagtgagactgagccccgaacgccctagtgacgaggattctaaaagcacagagagcattttcctaacgcaggtcagtgaactgccaagcagcgttatccataaggacgatctcgagctgaaggagaaagaccagaagaaaccccctacagcacctagagaggtaaaggggacccggaggaaacttccaactgctttcctgccatccaaataccacggttacgaggagctgttgaccgcaaagccagatccagcttttattgagccgaagggtatccagaagaatgctcaagcactccaacaaatgctcaagcaccctcttctatgtcacagcagcaagccaaagctcgacaccctccagaaaccatatgtccacaaagaaaaaagggcccagaggatacctattcctccaccaaagaaaactcgagcgcagttgttggatgatatctttattcgccttagagaccctagaaatataactgaggctcctcttggcgctgttctgcaccagtggacggagcgcagactggtgaaccataagcagtatctagaggctaagcgcctgctaaaggaattccaagcacgatataggcagctggtcagtggctcactccggaccgttttcggaaccacgccactgccgatggcctgtcctgccctgtcagaatctcagcctaagttcgggcactttttggaattcatggatgagttttgtcaggagcctacggcctccgattcccaaggttag

SEQ ID NO: 247031 - DNA, 2211 bp, synthetic construct
  misc_feature 1..2211: note = Description of Artificial Sequence: Synthetic coding sequence
  source 1..2211: mol_type = other DNA
atggcctttagcggaatctataagttggatgatggcaaaccctatcttaataactgctttcctgcgcgtaatctgttgcgggtgcctgaagaagggcagggtcactggctggtggtgcagaagggcaatttgaaaaagaaacccaaaggcctggtgggcgcacaagccgaacgtcgggagagtctgaaagctacttcgtttgagttcaagggcaagaaagaatcgcgacgggagaaccaagttgatcttccaggccatatattagaccaagctttcttgctgaagcaccattgtgttagaaagccatccgatctgtgcacaattaatgccaaagaaaacgatttcaagcacttccattcagtgatctatataaacgcatccgaaaatcttctgccactagaggccttccacacattcccagccttgaaagagttagaccttgccttcaacggcatcaagactatctatgtgaaatacggggacttcaagctgctagaatttctcgacttgtcttttaacagcttgactgtggaagcgatctgcgatctgggaattttaccccacttaagagtgctcctgttgacggggaatggtcttacctctctaccacctaatcttgccgtcgctgagcaggaagcatctgtcacaagcttaacatcaaaacggtatatccttcgatttcccgcactggaaacattaatgctagatgataaccgtctctccaacccttcttgctttgcttcgctggctggtctcaggcggcttaagaagctttcgctggatgagaatcggataattcgcatcccctatctccaacaggtgcagctctatgatgagtcagtcgattggaacggcggtagggggagtccccacaaggaacctcagttcatgcttcagagcaaaccgagaatgcttgaagacagtgacgaacagctggactatactgtgctcccgatgaagaaggacgtcgatcgaactatcgcaaaagaggacgcggtattgccagttgccctcttccccagcttatgtgagttcgtctttcataataatcccctcgtagctcacaccagaggggttccgcctttgctcaaatcattcctgcaggagaggctggggattcatctgattagacgcaaaatcgtgaaacctaagcaccacgtgctgatgtcccgcaaggaaagttggaaggtgaagtccgagatccccaaggtgcctaaacagcccctcgtgctgcaccaccctaggatgactaccactaaaagccccagcaaggacatgctggagcctgaggcggaacttgccgaggatttacctaccaccaaatccaccagcgtcgaaagcgaaatgccaaccgaaaacctggaaggacacagcccatcatgtcggacattcgttccacttccaccaatttgtagcaacagcacggtgcatagcgaggagacgctgagtcacctgagcgataccactgtccggctgtcaccagaacgccctagcgatgaggacagcaagagtactgaatctatttttctcacccaggtctctgaacttccatcttctgtgatacacaaggatgatctggagctgaaggagaaagaccagaaaaagcccccaaccgcaccgagggaggtcaaggggacacgcagaaagctgccaacagcgtttctgccatcgaaataccacggctatgaggaactcttaacggctaaacctgaccccgcttttatagaacccaaaggcattcagaagaacgctcaggccttacagcagatgctcaagcacccacttctgtgccacagcagcaaaccaaagttggacaccctgcagaaaccgtacgtgcacaaagaaaagagagcacaaaggatccctattcctccccctaaaaagacccgagcgcagttgctcgacgatatctttattcggctgcgcgacccacggaacatcactgaggctccgttgggagcagtgctccaccagtggacggagcggagactcgtcaatcataaacagtatctggaagccaaacggcttcttaaagagttccaggctaggtataggcagcttgtctcagggagtctccgtaccgttttcggaacaaccccattgcctatggcatgccctgcattgtccgaatctcagccgaaatttggccattttctggagtttatggatgagttctgtcaggagcctacagcctctgattcacagggttag

SEQ ID NO: 247032 - DNA, 891 bp, synthetic construct
  misc_feature 1..891: note = Description of Artificial Sequence: Synthetic coding sequence
  source 1..891: mol_type = other DNA
atggcgttttcaggaatctacaaactggatgacggcaagccatatttaaataattgttttcccgctcgaaatctcttgcgtgtgcctgaggagggccagggccactggctggtagtgcaaaaaggaaacctgaagaaaaagcctaagggcctggtaggagcccaggcagagcgacgggaaagcctcaaggcgaccagctttgagttcaaggggaagaaggaatcacggagagagaaccaggtggacctgcctggacatattctcgatcaggcatttctccttaaacaccattgcgtccgaaagccatctgatctctgtaccatcaatgtgtctggccttaaattcagcaaggctaaggaaaacgacttcaagcattttcactcagtgatctatattaatgcatccgagaatttgttaccgctggaggcattccatacttttcctgccctcaaagaacttgatctggcattcaatggaattaagaccatatacgttaagtacggtgactttaagctgctcgagttccttgacctttcctttaacagcctgacggttgaagctatttgcgatttgggtattctccctcatctcagggtcctgctgctgactggaaatggcctgacaagtctcccgccaaaccttgctgttgccgaacaggaagcttcagtcacgtccctgacttccaaaagatacatcttgcggtttcccgctctggagacattaatgctcgacgacaatagactttcaaacccgagttgcttcgcctccctcgccggtttgcgaaggttgaagaaactttctctcgacgagaaccgaatcataagaatcccctacttacagcaggtgcagttatatgatgaatctgtagactggaacggaggtagaggctag

SEQ ID NO: 247033 - DNA, 1797 bp, synthetic construct
  misc_feature 1..1797: note = Description of Artificial Sequence: Synthetic coding sequence
  source 1..1797: mol_type = other DNA
atggcattttcaggtatctacaaactcgacgacggcaagccttatctgaataactgctttcctgccagaaatctgctgcgtgtgcccgaggaaggacaaggccactggctggttgtgcagaaagggaacttgaaaaagaaacctaaaggcttggtcggagcccaggcagagcgccgagaatcactgaaagccacgtcttttgagttcaaaggcaagaaagagagcaggagggaaaatcaggtggatctgcctggtcatattcttgaccaagcgttcttgttaaagcatcattgcgtgagaaaaccttccgatctgtgtacaatcaacgccaaagagaatgatttcaagcacttccactcagtcatttatataaacgcctccgagaacctgcttcctcttgaagcatttcatacttttcctgccctgaaggaactggatctggcttttaacggcatcaagaccatatacgtgaaatacggggacttcaagctgctcgagttcctcgatctctcgttcaattcccttaccgtggaggccatctgcgatcttggcatactccctcatctacgggtactgctgttgaccggtaacgggctgacaagtctcccccctaatctggctgtcgccgagcaagaagcaagcgtgacctccttgactagcaagaggtacatccttagatttcctgctttagaaacgttgatgctcgatgacaatcgcctgagcaaccccagttgttttgcgtctcttgccggtttgcgaaggctgaagaagctttccctagatgaaaatagaattatccgtatcccttatctgcagcaagtccaactgtatgacgaaagcgtcgactggaacggcggaaggggttcccctcataaagagcctcagttcatgctacaaagcaagccgagaatgctggaggactcggatgagcagctggactacactgtgctgcctatgaagaaggacgttgaccggaccggagtcccaccactcctaaaaagctttctccaagaaaggctgggtatccacctgattagaagaaagatagtgaagcccaagcatcatgttcttatgtcgcgcaaagagtcatggaaagtgaaatctgagatccccaaagtgcctaagcagcccctagtattacatcacccgaggatgacaactaccaagtcaccaagcaaagatatgcttgagcccgaggcggaactggctgaggacctgcctacaacgaagtcaaccagtgttgagtccgaaatgcctacagagaatcttgaggggcattccccgtcctgtcgtacgtttgttccactgccgcctatttgttccaacagtaccgtccacagcgaagaaacgctcagtcatctttccgatactacggtgagactgtctcctgagcgcccaagtgacgaggacagcaaaagcactgagtctatatttctgacacaagtctccgagttaccaagttccgtaattcacaaggacgacctcgaactgaaggagaaagaccaaaaaaaacctccaaccgccccaagggaagtgaaagggaccaggagaaagctgcccactgcattcctgccgtccaaataccacgggtatgaggagcttcttacagcaaagccggatcccgcatttatcgagccaaaggggattcagaaaaatgcacaggctctgcagcagatgttgaagcatcccctcttatgtcactcttcaaagcctaagttggacactttgcaaaaaccttatgtgcataaagaaaagagggtcctgagctgcacttctggacagaacggtggatggtag

SEQ ID NO: 247034 - DNA, 1554 bp, synthetic construct
  misc_feature 1..1554: note = Description of Artificial Sequence: Synthetic coding sequence
  source 1..1554: mol_type = other DNA
atgctcgatgacaaccgtctttctaaccctagctgctttgcatcgttggcagggcttagacgcttgaagaagctctcattagatgaaaatcgcataatcaggatcccctatctgcagcaagtgcagctgtatgacgaatcagtggactggaatgggggtcgcggtagcccgcataaggagccccagttcatgttacagtctaagccacgcatgttggaggactccgacgaacagctggactatacagtgctccccatgaaaaaggatgtagaccggacagaggtagtattttcgtcataccctgggttctctacgtccgaaatcgctaaggaggatgccgttctgcccgtagcactgttcccctccctgtgcgaatttgttttccacaacaatcccctagtggcccacacaaggggggtccccccactgctgaaaagttttctacaagagcgcctggggattcacctgatccgaagaaagatcgttaagcccaagcaccacgtgctcatgtcccggaaggagtcctggaaggtgaaatcagagatcccaaaggtgccgaaacaacccctggtcctgcatcacccaaggatgactaccactaaatctcctagcaaggacatgcttgaacctgaggctgagctcgcagaagaccttccaacaaccaaatcaacatctgtagagtcggagatgcctaccgagaaccttgagggacacagcccatcttgcaggacattcgtgcccctgcctccaatatgctctaattctaccgtccattcagaggagactctgtcgcatttgtcggatactaccgtgagattaagccccgagcgcccttcagatgaggatagtaaaagcactgagagcatctttctcacacaggtctccgaactgccgagcagcgtgattcataaggacgacttagagctcaaggagaaggaccagaagaagccacccacggcgccaagagaagtgaaggggaccaggcgtaaactgccgacggcgtttttacctagtaaataccacggatatgaggaacttctgaccgcgaaaccggaccccgcttttatcgagccaaagggtatccagaagaacgctcaggcactacagcagatgcttaagcaccctctcctgtgtcatagctcaaagcctaaacttgacacactccagaagccgtatgttcataaggagaaaagggcacaacggattcctatccccccacctaagaaaacacgcgcacagctgctggacgacatcttcattcgactgagagacccgagaaatattaccgaggctccgttgggtgctgtgctgcatcagtggacagagcgccgtctcgtgaatcataagcagtatttagaagctaaaagattacttaaggagttccaggctcgttaccggcagctggtgagcggcagtttgcgtaccgtgttcggcacgactccactacctatggcctgccccgcactgtccgagagccaacctaagttcgggcattttctagaattcatggatgaattttgtcaggagcctactgcatctgattctcagggctag

SEQ ID NO: 247035 - DNA, 984 bp, synthetic construct
  misc_feature 1..984: note = Description of Artificial Sequence: Synthetic coding sequence
  source 1..984: mol_type = other DNA
atgttcccttcacgacgaaaggccgcacagctgccttgggaagatggccgaagcgggctcctctccggtggacttccaagaaaatgcagtgtgtttcatttgttcgtggcctgtctgtctctcgggtttttttccttgctctggctgcagctgagctgtagtggagatgtcgcaagagcagttagaggtcagggacaagaaacatctggcccacccagggcctgtccgccagagccaccgccagagcactgggaagaggatgcctcctgggggcctcatagactcgcggtcttagtcccgtttcgcgagcgtttcgaagagctcctcgtgttcgtgccacatatgcgtcgtttcctgtcacgaaaaaagatcagacatcatatctatgtgttaaatcaagtggaccattttaggtttaatcgcgcagccctgattaacgtgggatttttggagtcttccaattccacggattacatcgcgatgcacgacgttgacctgctgcctctcaacgaggaactagactacggcttccctgaagccggaccctttcatgtcgcctcgcccgagctgcatccactataccactacaagacatacgtgggaggtatcctgttgttgagtaagcagcattacagactctgtaacggaatgtccaaccggttctgggggtgggggcgtgaggacgatgagttttataggagaattaaaggggctgggttacagctgtttagacccagcgggatcaccactggctacaaaacatttcgtcacttacatgatccggcttggaggaaacgtgatcagaaacgaatcgcggctcagaagcaagaacagttcaaggtggacagagaaggaggactcaatacagtgaagtatcacgtggcatccagaactgccctgtcagtggggggagcgccttgcaccgtgcttaatattatgctggactgcgataagactgccacgccatggtgcaccttctcttag

SEQ ID NO: 247036 - DNA, 642 bp, synthetic construct
  misc_feature 1..642: note = Description of Artificial Sequence: Synthetic coding sequence
  source 1..642: mol_type = other DNA
atgcgcagattccttagccggaagaagatacggcatcatatctatgtcctcaaccaggtcgaccacttccggtttaacagggcggctctcataaatgtgggcttcttagagtcgtcaaatagtaccgattatatagctatgcacgacgtggacctgctgcctcttaacgaagagctggactatggctttcccgaggccggtccctttcacgtcgcctctcctgaactgcatcccttgtaccactataaaacgtacgtggggggaattctgctgctgagcaagcagcactaccgcctgtgcaacggaatgtccaaccgtttctggggatggggcagggaggacgacgaattctaccggcgaataaaaggggctggactgcagttgtttagaccgagtggtattacaacgggctataagacctttagacacctgcatgatccagcttggcgcaagcgagatcagaagagaatagcggcacagaagcaggagcaattcaaggtggatagagagggtggtttaaacactgtgaaatatcatgtcgcatcccggacagccctgtctgtgggcggagctccatgtacagtgctgaacatcatgctggactgtgacaaaactgccaccccatggtgtactttctcatag

SEQ ID NO: 247037 - DNA, 2880 bp, synthetic construct
  misc_feature 1..2880: note = Description of Artificial Sequence: Synthetic coding sequence
  source 1..2880: mol_type = other DNA
atggtcgcagccccttgtgccagacgactggcgcgacgctcacactctgccttactagcggcactcacggtgctcctcctgcagactctagtcgtctggaacttctcatctctcgacagcggcgctggggaaagacgaggcggagcagctgtgggagggggagagcaaccaccgccagccccagcacctcgacgggaaaggcgggacctacctgcagagccggctgccgctcgtggagggggaggaggaggcggaggtggtggaggaggacgcggaccccaggcccgtgctcggggaggaggccctggagaaccaagaggccagcaacctgcctcccggggtgctttgcccgctcgcgctctggatcctcacccgtcaccgctgatcacgctcgaaacccaggacggctatttttcacaccgcccaaaggaaaaagttcgaaccgactccaataatgagaactccgtccctaaggactttgagaacgtcgacaattcaaattttgctccccgtacacagaagcaaaaacaccagcctgaactggctaaaaaaccaccctctcggcagaaagagttactcaagcgtaagctggaacaacaggagaaaggaaaaggccatacattccctggtaaagggccaggtgaggtgctgcccccaggcgacagggctgctgcaaactccagtcacgggaaggacgtctccaggccccctcatgctcgcaagacaggtggaagttctccggagaccaagtacgaccagccgccaaaatgtgacattagcggcaaagaagccatctctgctctgtcaagagctaagagtaagcactgtcggcaggagatcggagagacctattgtaggcacaaactgggactgcttatgcctgaaaaggtcactcgcttttgccctctggagggtaaagctaacaagaatgtccagtgggatgaggactcagttgagtatatgcctgctaatcctgtgcgtatagccttcgttctcgtggtccacggcagggcatcacgccagcttcaaagaatgtttaaagcaatctatcacaaagatcacttttactatatccacgtcgataagcgtagtaattatctgcaccggcaagtgctgcaggtctccaggcagtactccaacgtgcgcgtcaccccttggagaatggcaaccatctggggcggtgcctctctcctctcgacataccttcaatctatgagggacctcttagaaatgaccgactggccctgggacttcttcattaatctcagtgccgcagattaccctatccgcacaaatgatcagctcgttgcctttttgagccggtaccgggacatgaatttccttaagagccacggtcgagacaacgccagattcatcagaaaacaagggctggacagattgtttctggaatgcgacgcccatatgtggcggctgggagaccgcaggattccggaaggaatagcagtggacggcggttctgactggtttctcctcaatagacgctttgtggagtacgtcactttctccaccgacgatctagttaccaaaatgaaacagttttactcctataccctgcttcctgctgagagcttctttcatacagtgctggagaactcacctcattgcgacaccatggtggacaacaatttgcggattaccaattggaaccggaagctgggttgcaagtgccagtataaacacatagttgactggtgtgggtgctccccaaatgacttcaaaccacaggattttcacagatttcagcagacagccagacccacttttttcgcgagaaagttcgaagcggtggtaaaccaagagattattggacaactggattattacctgtacggcaattatccagctggcactccagggctaagatcttattgggagaacgtatatgatgaacctgacggtatccactccctgtccgacgtgaccctaacactgtatcattcttttgccagactcggattgaggagggccgagacatctctccacactgatggggagaacagctgccggtattatccaatggggcacccagccagcgtacatctgtattttctggctgaccgatttcagggctttttgataaaacaccatgccacgaacctggcggtatctaaactcgagacactggaaacatgggttatgccgaaaaaagtgttcaaaatcgcgtctcccccatcagacttcggacgtttgcagtttagcgaagttggaactgattgggacgctaaggaacgattatttcggaattttggtggtctactaggtcccatggatgagcccgtcggaatgcagaaatggggtaaggggcctaacgtgacagttaccgtgatttgggtcgatcctgtaaacgtgattgctgcaacttacgatattctcattgagagcactgctgaattcacccactataagccccctctaaatctccccctgcgaccaggagtatggactgtcaagatcttgcatcactgggtcccagtagccgagaccaagtttctggtggctcctctgaccttttctaaccgccaaccaatcaagcccgaggaagcactgaagctgcacaacggcccacttaggaatgcgtacatggagcagtcgttccagtctttgaatccagtcctttccctgcccatcaaccctgcccaggttgagcaggctagacgtaatgccgcatctactggcactgcgcttgaaggatggctggactcactggttggcggtatgtggaccgctatggacatttgtgccacagggcctactgcctgtccggtaatgcaaacatgctcccagacagcatggagcagtttttctcccgatcccaaatccgaattgggcgcagttaaaccagatgggcgactgcgatag

SEQ ID NO: 247038 - DNA, 2598 bp, synthetic construct
  misc_feature 1..2598: note = Description of Artificial Sequence: Synthetic coding sequence
  source 1..2598: mol_type = other DNA
atggtggctagcgcaagagtccaaaagctggtgcgccgttacaaactggctatagccaccgcacttgccattctgctactgcagggcctggtcgtctggtccttctcaggcctggaggaggatgaagctggcgagaaagggagacagaggaagccccgaccccttgaccccggtgagggctccaaggatacggacagtagcgcgggacgaaggggtagcacaggccgtcgccacggccgatggagaggcagggccgaaagccctggcgtccctgttgcgaaggtagttcgcgcagtgacctccaggcaacgtgctagcagaagggtccccccagcacctcctcctgaagcccctggacgccagaacctctctggcgcagcagccggagaggcactcgtaggtgcagcgggattcccaccacacggcgacaccgggtctgtggagggcgctccccagcccacagataacgggtttactcccaagtgcgaaatcgttgggaaggatgctctctcagccctggcacgtgcatcaacaaagcagtgtcagcaggagatcgcaaacgttgtgtgtctccaccaagccggaagcttaatgcctaaagccgtgcctcgacactgtcagttgacgggaaagatgtctcctggcatccagtgggacgagtcccaggcacaacagcctatggacggccctcccgtacgaattgcctatatgctcgtggtacatggaagggcgatcagacagctgaaacggctgttgaaagcggtctaccatgagcaacatttcttctacatacacgtggacaagaggtctgactacttgcaccgagaagtggtggagttggctcaaggctacgacaacgtgcgggtgaccccttggagaatggtcaccatctggggaggggcaagcctactgcgcatgtatctccgtagcatgcgagatttacttgaggtgcccggatgggcttgggattttttcataaatctgtcagccaccgactatccgacacggacaaatgaagagctggtcgccttcctatcaaaaaaccgggacaaaaactttctgaagagtcacggacgggataactctcggttcatcaaaaagcagggcttggaccggttatttcacgagtgcgatagtcatatgtggcggctcggcgagagacaaattcctgccggaatcgtcgtggatgggggaagcgattggttcgtactgacccgctccttcgtggagtatgtagtctataccgacgatccattagtggcacagctaagacaattctatacgtatacacttcttccagcggaatctttctttcatactgtcctggaaaatagtctggcctgtgaaacactggttgataataacttgagagttactaattggaatcgaaagttgggctgcaaatgtcagtataagcatatcgtcgactggtgtggatgcagtcccaacgatttcaagccacaggactttcttcgtctgcaacaggtatctcgtcctacattcttcgctaggaaattcgaatctaccgtgaaccaggaggttcttgagatcctggactttcacttatacggtagttaccctcctggaacaccagccctaaaggcctactgggagaatacttatgacgcggctgacggacccagtgggttgtcagatgtgatgctgacagcttacaccgccttcgcgagactcagtctgcatcacgctgccacggccgcaccccctatggggacacccttgtgccggtttgaaccgcgtggactgccgagtagcgtgcatctctatttctacgacgaccacttccagggatacttggttactcaggctgtgcaaccctctgcccaaggacccgctgagactcttgagatgtggctgatgccccaaggcagccttaagcttctgggtcgcagtgatcaagccagccgactgcagtccctcgaggtcggcactgactgggaccccaaggaacgcttgtttcggaactttggagggcttttgggtcctctggacgagccagtggctgtgcaacgttgggccaggggacctaatcttactgccaccgtcgtgtggatagaccccacttacgtggtggccacctcctacgacatcactgtcgacaccgagacggaggtgacccaatataagcctccgctgagtaggccgctgcgccctggcccatggaccgtgagactgctgcagttctgggagcccctcggggagaccaggtttttggtgctacccctgacattcaaccggaaactgccgctgcggaaggacgacgcgagctggcttcacgcagggcctccccataacgaatacatggagcagtcgtttcagggactgtcaagtatactgaatctcccacaaccagaactagcggaggaggctgcacagaggcatactcagctgaccgggcctgccctggaggcctggacagatagagagttgtcttcgttctggtccgttgctggactctgcgccatcgggcctagcccctgtcctagcctcgagccttgtcggctcacaagctggagctcattaagcccagaccccaagtctgagttagggcctgttaaggctgatggcagattaagatag

SEQ ID NO: 247039 - DNA, 2031 bp, synthetic construct
  misc_feature 1..2031: note = Description of Artificial Sequence: Synthetic coding sequence
  source 1..2031: mol_type = other DNA
atggttgccagcgctagagtccagaaactggtcaggcgatataagttggcaatcgcaacagccctcgcaattttactactgcagggactcgtcgtttggtcgttcagtgggttggaagaggatgaggctggagaaaaggggaggcagcggaaacctaggcctctggatcctggagaaggcagcaaggatacagatagctcagcgggacggcgtgggagcactgggagacggcacggaagatggcggggtagagcagaaagtcccggagttcccgtcgccaaggtggtgagagccgtcaccagtaggcagagggcatcacgcagagttccgccagctccaccccctgaggcccctggtcggcaaaatctgtcaggcgcagccgctggggaagctctcgtgggcgctgcagggtttccccctcacggggataccgggtccgttgaaggggctccacagccaacagacaacggcttcacacccaaatgcgaaatcgtaggcaaagatgccctctccgcactcgcacgggcatcaactaagcagtgtcagcaagaaatcgccaatgtggtgtgcctgcatcaggcagggagccttatgcccaaagctgtccccaggcactgccagctgactggcaaaatgagccccggaatccagtgggacgaatcccaggctcagcagccgatggatggaccgcctgtgaggatcgcctatatgcttgtggtccacggacgtgctattcgtcaattgaagcgactgttaaaggccgtgtaccatgagcagcactttttttacatccatgttgataaacgcagtgactatcttcatagggaagtcgtggagttggcgcaggggtacgacaatgttcgggtcaccccttggaggatggttaccatctggggaggcgcttccttactgaggatgtatctgcgcagcatgagagacctgttagaggttccgggatgggcatgggatttttttatcaacttgagtgccacggactaccccactcgcaccaacgaagagttagtggccttcctttcaaagaacagagataagaactttctgaagtcccacggtagggacaactcgagatttatcaagaagcagggtctagaccgcctctttcacgagtgcgattctcacatgtggagattaggcgaacggcagatccctgccggaattgtagtggacggaggatccgactggttcgttctcaccaggtcatttgtcgagtacgtagtttacacggacgatcccctcgtcgcccaactgcgccagttctatacctacactttgctgccagccgaaagtttcttccacactgtgttggagaactccctggcgtgcgagacgttggtcgacaataacctccgggtgacaaattggaatcgtaagcttggttgtaaatgccagtacaagcacattgttgactggtgtggctgctccccgaacgatttcaagcctcaggactttctgcgactccagcaagtcagcaggcccacttttttcgctcgcaagtttgaaagtacagtcaaccaggaggtgttggagatacttgactttcatctttatggatcatacccgccaggtacccctgccctgaaggcttactgggagaatacctatgatgctgcagatggcccatccggcctcagtgatgtcatgctaaccgcttacactgcatttgctcgactgtctcttcaccacgctgccaccgcggctcctccaatggggacacccctttgtcgcttcgagccacggggtctgccgagtagcgtgcacctttatttctacgacgatcactttcaggggtaccttgtcactcaggccgtccaacccagcgcacagggcccagctgagactctggaaatgtggctcatgccacaaggaagtctaaagttgctaggcaggagcgatcaggcctcacgcttgcagagcctggagaaccgtgggctctcaatgctaccgaggctcgtctctaacagttggccacaggccgtcctcccgctccagcccccaaaggctctgggctag

SEQ ID NO: 247040 - DNA, 1503 bp, synthetic construct
  misc_feature 1..1503: note = Description of Artificial Sequence: Synthetic coding sequence
  source 1..1503: mol_type = other DNA
atgatcattagtcactttccaaagtgtgtggcggtgttcgcgctgctcgcactctcagttggggctctcgacacatttatcgctgccgtctatgagcatgccgtgatcctccctaataggactgaaacacccgtgtcgaaagaggaggcactgctacttatgaataagaatatcgatgtgctcgagaaagcagtaaagcttgcagctaagcagggcgcacatataattgttactcctgaggacgggatctatggctggatctttacgcgggagtccatatacccgtacctcgaggatatccctgatcccggagttaactggatcccttgccgggacccctggcggtttggcaacactcctgttcagcagcgattaagctgcctagcaaaggataacagtatctacgtggtcgcgaatataggcgacaagaagccctgcaatgcctccgattcacaatgccccccagacggtcggtatcaatacaacacggacgtggtgttcgacagtcaggggaagctccttgcgagataccacaaatacaacctgtttgccccagaaatccagttcgattttcccaaggactcggaactggtcacattcgacaccccttttgggaagtttgggatctttacttgcttcgatatattctcccatgatcctgcggtcgtggtagtggatgaatctatcgactctattctttatccaactgcatggtataataccctcccccttctttctgcggttccattccattcagcgtgggctaaggctatgggggtgaacctgctcgccgcaaatacgcataacacgtccatgcatatgacgggctcggggatctatgctcctgaggctgtcaaggtttaccattatgatatggaaacagagtcagggcagctgctcctctccgagcttaaatccagaccaaggagagagccgacgtaccctgcggctgtcgactggcacgcctatgcctcatccgtaaagcctttttcaagcgagcaatctgactttctggggatgatttattttgacgagttcacgtttaccaaactaaagcgtaacactgggaattatacagcatgtcagaaagacctctgctgccacctgacctataaaatgtcagagaaaagaacagacgagatctacgctcttggggcattcgatggcctgcacaccgtggaggggcagtactatctgcagatttgcgcgctactcaagtgtcagaccactgacttagaaacgtgcggagaacctgtggggagcgcctttaccaaattcgaagacttcagcctgtccggaaccttcggcacacgatacgtcttcccgcaaattattctgtctggttctcagttagcgcctgagagacactatgagatcagccgcgatggcagacttagaagtagatctggtgctccactccctgtcctcgtgatggccctatatggaagagtattcgagaaagatccacccagactcggacaggggagtgggaaattccagtag

SEQ ID NO: 247041 - DNA, 1200 bp, synthetic construct
  misc_feature 1..1200: note = Description of Artificial Sequence: Synthetic coding sequence
  source 1..1200: mol_type = other DNA
atggacagttcaactactgcacagtgcagacaactggaggctgccgtcggaggggctcaagctctctcttgtctgaccgggagtcgcgcttatgaacggttcacaggaaaccaaatcgccaagatttatcaacagaatccagaggcctacagtcacactgaacggatctctctggtgagtagttttgccgcatctttatttcttggctcttacagccctattgattatagcgacgggtccgggatgaacctgctgcagatccaggacaaggtctggtcccaagcctgcctgggagcctgcgccccacatctagaagaaaaactctcaccgcctgtccctagttgctccgtggtgggggcaatttctagctactacgtgcagagatatggctttccccctgggtgtaaagtggttgcattcaccggagacaatccagcgagtctggccggtatgaggttggaggaaggggatatcgctgtttctcttggtacctccgataccctgttcctgtggctgcaagagccgatgcccgcactggaaggacatattttttgcaatccagtggactcccaacattacatggcactgctatgcttcaagaatggcagcctcatgcgcgagaaaattaggaacgaaagcgttagtcgttcgtggagcgactttagcaaggccctgcagtcaacagagatggggaatggagggaatctaggcttctatttcgatgtgatggagattacaccagagattatcggccgtcacaggttcaacaccgaaaatcataaggtcgcagcctttcctggggatgtggaggtccgcgcactgatcgaggggcagtttatggctaaacgtattcacgcagaaggactgggataccgcgttatgtcaaagaccaagattttggccacaggcggagcttcccacaacagggagatcttgcaggtgctagcagatgtgttcgatgcaccagtgtacgtgattgatacggcgaattccgcttgtgtgggcagtgcatatcgcgcatttcatggactggccggaggaacagatgtgcccttctctgaggtcgtgaagctggcgcctaacccgcgattggccgcaacaccttcgccaggggcttctcaagtatatgaggcgcttctgcctcagtacgcgaagctcgagcagaggatattgagccaaactcggggacctccagaatag

SEQ ID NO: 247042 - DNA, 4269 bp, synthetic construct
  misc_feature 1..4269: note = Description of Artificial Sequence: Synthetic coding sequence
  source 1..4269: mol_type = other DNA
atgtcagggataaagaggaccattaaggagacagacccggactacgaggacgtctctgtggccctgcccaataagcgacataaggccatcgagaatagtgcacgagacgcggcagttcaaaaaatcgaaacaatcattaaggagcagtttgccctggagatgaagaataaggaacacgagattgaggtaatcgaccagagactgatagaagcacggcgaatgatggacaagctgcgagcttgtattgtggctaattattatgccagtgccggattgctgaaggtctctgagggaagcaagacttgtgatactatggtcttcaatcatccggctatcaagaaatttctagagagcccttcccggtcctcttcgccagctaaccagcgggcagagacgccctcggcaaaccacagtgaatcagatagcctaagtcagcacaatgacttcctgtcggacaaggataataactctaacatggatatcgaggaacgactctcaaataacatggaacaacggcctagccgaaacacagggcgtgatacatctcggattacgggatctcacaagacagagcagcgaaacgccgacctgacagacgagacctctcggctcttcgtgaagaaaactatcgtggtgggaaacgtgtctaagtacatccctccggacaagcgcgaagaaaacgaccagtcgacccataagtggatggtgtatgtgagagggtctcgacgcgagcccagcatcaatcatttcgtcaagaaagtttggttcttcctgcatccatcctacaagcctaacgacctggtcgaggtaagggaaccgcctttccacctgacccgcagagggtggggcgaattccccgtgagggtacaggtgcacttcaaggactctcagaacaagaggattgacattattcataacttaaaactcgacagaacctacacgggcttacagaccctcggggcagaaactgtagtggatgtggagctacatcgccactcacttggggaggattgcatttaccctcagtcatcagagtctgacattagtgatgctccaccctcactgcccttaaccatcccagctcctgtgaaggcatcttctcccattaagcagtctcacgaacctgtccctgacacctccgtggagaagggattccccgctagcaccgaggcggaacgccacaccccattttatgccctcccatcttctctggaacggacgccaacgaagatgacaacatctcaaaaagtgacgttttgcagccacggaaacagtgcattccagcccatcgcaagctcttgtaaaattgtgccccaaagccaggtgcccaatccagaatcccctggcaaaagttttcagccaatcaccatgtcctgtaaaatcgtttctggaagcccaatctctactccatctccgtctcctttgccacgaacaccaaccagtacacctgtccatgtcaagcagggtaccgcgggtagcgtgatcaacaacccgtacgtcattatggacaaacagcccggtcaagttatcggtgctacaacaccttcgaccggaagccccacgaataaaatctctaccgccagccaagtatcacaagggaccggatctcctgttcccaagattcatggctcaagcttcgtgacttctaccgtgaagcaggaagacagtctatttgcatctatgccaccgctctgtcccataggctcccacccaaaagtccaatctccaaaaccaatcacagggggactaggggcattcaccaaggtgatcattaaacaagagcctggagaggctccgcacgttcctgccacaggggctgcaagccagagcccactgcctcaatacgtgaccgttaaagggggacatatgatcgctgtctcgcctcagaaacaggtcattacaccaggggaagggattgcccagtctgcaaaagtgcagccttccaaggtcgtaggcgtgccagtgggatccgcccttccttccaccgtgaaacaggcggtggccatttcggggggacagatactggttgcaaaggcatcgtcaagtgtcagtaaggctgtgggccctaaacaggtggtcacacagggtgtggccaaagcgatagtgtctggcggaggaggcactattgttgctcagcctgtgcagacccttactaaggctcaagtgacagccgctggtccccagaagtctggctcacagggctcagtgatggctacacttcagctgcctgccacaaacctggcgaatctggcgaatctccctccaggtacaaaactgtacctaaccaccaattctaaaaatccaagtgggaagggaaaattgctgttaattcctcaaggagcaatattgcgagccacaaataatgcaaatctccagagtgggagcgccgcttccggcggtagcggggctggaggaggaggcggaggtggtggtggaggaggaagtggatctggtggcggagggtccactggcggtgggggaggtacagccggagggggaacgcagtcaaccgccggtccaggtggtatctcccagcatctcacatatacctcttacatccttaagcagacgccgcaggggacatttcttgtaggccaaccctccccccagaccagcggaaagcagctcaccacgggatccgtcgtacagggaaccctcggagtgagcactagcagcgctcaggggcagcagacccttaaggttatctccggccagaaaaccactctgttcacacaggctgcccacggcggacaggcttcgttaatgaagattagtgacagcacactaaagaccgttcccgctacatcccagctgtccaagcccggaactacaatgctgcgggttgccggtggtgtgattaccaccgctacaagcccagccgtggccctctctgcaaacgggcctgcccagcagtccgaaggaatggcaccagtgtcctcgtccaccgtgtcctccgtgaccaagacgtccggacagcagcaggtatgtgttagccaggccacagtgggtacttgcaaagccgctacccctaccgtggtcagtgccactagcctggtgcctacccctaatcccatttctggtaaggccaccgtttctgggctgctgaaaatccacagtagtcagtcctccccacaacaggccgttctgaccatcccatcccaactaaaacctctgtcagtgaataccagcgggggtgtgcagacaattctgatgcccgtgaataaagtcgtccagtctttcagtacatctaaacctcccgcaatcctgcctgtagcagcccctacaccagtagtgccgtcgagcgctcccgctgccgtagccaaggtcaaaaccgaacctgagacaccaggcccaagctgtcttagccaggagggacagacagccgttaaaaccgaagagtcaagcgaactcggtaattacgtgattaagatcgaccacttggagaccatccaacagttgctgacagcagttgtcaaaaaaattccccttatcaccgccaagtccgaggatgctagttgcttctctgctaagtccgtcgagcagtattacggttggaacatcggaaagcgtcgtgctgccgagtggcagcgcgctatgacgatgagaaaagttctgcaggagatcctcgaaaagaatcccaggtttcaccacctgacgccccttaaaacgaagcacatcgcacactggtgcagatgccacggctatacccccccagacccagagtccctgagaaatgacggagactctatcgaagacgtccttacacagatcgacagcgagcctgaatgccctagttcttttagcagtgccgacaatctttgccgtaagctagaagacctgcagcagtttcagaagagagagcccgaaaacgaagaggaagttgacatattgagcctcagcgaaccagtgaaaataaacattaagaaggaacaggaagaaaaacaggaggaagtgaagttttacctcccccctacccctggatccgagtttattggcgatgtcacgcagaaaatcggaatcactttgcagcctgtggccttacatcggaacgtctatgcatccgtcgttgaagatatgatcctcaaggcaaccgaacaactggtaaatgatatcctaagacaagccttggcagtgggataccagacagctagccataatcgcatccccaaggagatcaccgtctccaatatccatcaggccatctgcaacattcccttccttgactttctgaccaacaagcacatgggcatccttaacgaagatcagtag

SEQ ID NO: 247043 - DNA, 4269 bp, synthetic construct
  misc_feature 1..4269: note = Description of Artificial Sequence: Synthetic coding sequence
  source 1..4269: mol_type = other DNA
atgtccggtattaaacgcaccattaaggagacagatccggattacgaagatgtgagcgtggccctacctaataaacgccacaaggcgatcgagaactccgccagagacgcggctgtacaaaagatagagaccattataaaagagcaattcgccctcgaaatgaagaacaaggagcatgaaattgaggtcattgaccaacgattgattgaggcaagacgcatgatggacaaacttcgagcatgcatcgtagccaactattacgccagcgccggactgctgaaggtgtctgagggcagtaagacctgcgatacaatggtcttcaaccatcctgctattaagaaatttctggagtcaccaagtcgatcctcctcacccgctaaccagagggcagagactccttcggcaaatcatagcgaaagcgattccctgtcccagcacaacgatttccttagcgataaggacaataactcaaatatggatattgaggaaaggctctccaataatatggagcagaggccatcacgtaatacaggaagggacacaagccggatcactggcagccacaagaccgagcaacgaaacgccgacctgacagacgaaacctccagactgttcgtgaaaaaaacaatcgttgtggggaatgtgtcaaagtacattcccccagacaagcgagaagagaatgaccagtccacgcacaagtggatggtctatgtgcgcggaagcagacgggagccatctatcaatcactttgtgaagaaagtgtggttcttcttgcacccaagctataaaccaaacgatctcgtggaggtgcgggagcctccattccaccttacccggcgaggctggggtgagttccctgttcgcgtacaagtacatttcaaagacagtcagaacaaacggattgatattatccacaatctgaagttagataggacctatactggactccagactctcggagccgaaactgtggttgacgttgagttgcacagacattccctgggagaggattgcatttatccacagagctccgaatctgacatttcggacgctcctccctccttgccactgaccatcccagcccctgtaaaagcttccagtccaattaaacagagccacgaaccagtaccagacacttccgtggaaaagggctttccagcctcaaccgaggcagagaggcatactcctttctacgctctcccgtcatcattggaacggactcccacaaagatgaccacatcgcagaaggtcactttctgttcacacggaaacagcgcattccagcccatagccagttcctgtaagatagtccctcagtcgcaggtgcctaatcccgagagccctggcaagtcgtttcagccgatcacaatgagctgtaaaattgtttccggtagtccgatcagcaccccctcgccaagccctctccctagaactccaacgagcaccccagtgcatgtgaagcagggcaccgctggcagcgtgataaacaacccatatgtgatcatggacaaacagccaggtcaggtgattggagctacaaccccgtccacagggtccccaaccaataagatcagcacagctagccaggtgtcccagggcaccggatcacccgtgcccaagatccacggttcctccttcgtgacgagtactgtcaagcaagaggacagcctattcgcgagcatgccccctctttgtcccatcggcagccatcccaaagtgcagagtcccaaaccaatcacagggggattgggtgcgtttacgaaggttatcatcaaacaagaaccaggcgaagcccctcatgtgccagctactggagctgcatcacagtcgcctctcccacagtatgtaacagtcaaaggaggccacatgatagctgtctctccacagaaacaggtgattactccaggcgaggggatcgctcagagcgccaaggtgcagcccagtaaggtggtcggagtgccagtcggatcagcactgccctcaaccgtgaaacaagcagtggccatttcaggcggtcagattctcgtcgccaaggcgagttcttccgtatctaaagccgtgggccctaagcaggttgtaacgcagggcgttgccaaggcgatcgtctccggcggagggggtaccatagtcgcccagcctgttcaaacactcactaaggcccaggttacggctgcaggaccccagaaatccggatcccaaggatcagtgatggccaccttgcagctgccagcaaccaacctcgcgaacttagcgaacctgccccctgggactaaattatacttgactacaaatagtaaaaacccgtccggaaaggggaaactgcttttaattccacagggagctatattaagggcaaccaataacgctaacctgcaaagcgggtcagctgcttccggcggatctggagcaggcggagggggagggggtgggggtggcggtgggagtggctcaggtgggggaggctctaccggcggagggggaggaacggccggaggcggtacgcagtctacggccggtccgggtggcatttctcaacatctcacttacacctcatacattctgaaacagactccacaggggaccttcctggtcgggcagccctccccccagacttcaggcaagcagctgaccactggcagtgtggttcaaggaacactcggggtatctacatcttccgcccaggggcagcagactctcaaggtaatctcaggccagaagacaactctattcacacaggctgcacacggtggccaggctagtcttatgaagatttccgactccaccctgaagacagtccccgctaccagtcagctgagcaaacccggaactaccatgcttagggttgccggaggagtgatcacaactgccacttctccagcagttgccctgtctgcaaacggccctgcccagcagtctgaaggcatggcaccggtgtcatcaagcaccgtgtcatccgtaaccaagacttctggtcagcaacaggtatgcgtaagccaggcgactgtcggtacatgtaaggcagcgacacccacagtagtgtctgctacctctctagtacctacgccaaatcccattagcggcaaggccactgtcagcggcctcctgaagattcacagcagccaaagcagcccgcagcaggctgttcttactatccccagtcagctgaagcccttgtccgttaatacgagcgggggagtgcagacaatcctgatgcccgtcaataaagttgtccagtccttctcgactagtaagcccccagccatcctgccagttgctgcaccaacaccagtcgtgcctagctccgcccctgccgcagtggccaaagtgaagacggaaccagagactcctggcccttcttgtctttctcaagagggtcagaccgctgttaaaactgaagagagcagcgagttaggcaactacgtgattaagatcgaccatctggagaccatacagcagctgctgactgccgtggtgaagaaaatcccactgataactgccaaatctgaagacgcctcttgcttctccgcaaagtcagtcgagcagtactatggttggaacatcggtaaaaggagagcagccgaatggcagagggccatgacgatgcgtaaggttctccaggaaattctggaaaagaatccacgcttccaccacttaacacctctgaagacaaaacacattgcacactggtgcaggtgccacggctatacaccaccggatccagaatcactgcggaatgatggagatagtattgaggacgtgctgacacagatagacagcgagcccgaatgtccaagttcattttcgtccgctgacaacctttgtcgtaagctggaagacctgcagcagttccagaagagggagccagagaatgaagaggaggtggacattctctcgctttcggaacctgtgaagatcaacattaagaaggagcaggaagaaaagcaggaagaagtaaagttctacctacccccaaccccaggctctgagtttatcggcgatgttacacagaagatcggcatcacattgcagcccgtggctctgcacagaaatgtatacgcctctgtagtcgaggacatgattcttaaggcgacagaacagctggtaaacgatatattgcgacaggctctggcagtgggctatcagaccgccagtcacaacagaatcccgaaggaaattacagtgagcaacatccatcaggccatttgcaatatcccttttttggatttcctcaccaacaagcacatgggaatcctcaacgaggatcaatag

SEQ ID NO: 247044 - DNA, 684 bp, synthetic construct
  misc_feature 1..684: note = Description of Artificial Sequence: Synthetic coding sequence
  source 1..684: mol_type = other DNA
atgttcaagcgcatggcggaattcggacctgactctggtggcagggtcaaaggggtaactattgtgaagccaatcgtttacggaaacgttgctcgctatttcggcaagaaaagggaggaggacggccacacacatcagtggaccgtgtacgtaaaaccgtatcggaacgaggacatgtctgcttatgtaaaaaagatccaattcaagttacacgaatcctacggcaacccccttcgtgttgtcactaagcctccgtacgagattacggagaccggatggggagaatttgaaattatcatcaagattttctttatagaccccaatgagagacctgtcaccctataccatctgttgaagttgtttcaaagtgatacgaacgcgatgctgggaaagaagaccgtggtctctgaattttacgacgagatgatctttcaggatccaaccgccatgatgcagcagcttctcactacatcccggcaactgacccttggagcctacaagcacgagaccgaattcgctgaactcgaggtgaaaacacgcgaaaagttagaggcagccaaaaaaaaaacttcatttgaaattgccgagcttaaagaaaggttaaaggccagtagagagacaattaactgcctcaaaaatgaaattcggaaactggaagaggacgatcaagccaaggatatctag

SEQ ID NO: 247045 - DNA, 1053 bp, synthetic construct
  misc_feature 1..1053: note = Description of Artificial Sequence: Synthetic coding sequence
  source 1..1053: mol_type = other DNA
atggcgactactgcagccccagctggtggtgcccgaaacggtgctggcccagaatggggcggattcgaggagaacatccagggtgggggtagcgctgtcatcgacatggaaaacatggatgacacgtccggatcctcgtttgaggatatgggcgagctccatcagcgtcttcgggaagaggaagtagacgctgacgcagctgatgctgcagctgcagaagaagaagacggggagttcctgggtatgaagggattcaagggacaactgtctcgccaggtggccgatcagatgtggcaagctggaaagcgccaagccagcagagccttcagtctgtatgcaaatattgacattctgcgcccatacttcgacgtcgagcccgctcaagtaaggtcccgcctgcttgagtccatgataccaatcaagatggtgaacttcccacagaaaatcgcaggggagctttacgggcctctgatgcttgtgtttaccctcgtcgcgattcttctgcacggaatgaagacgagcgataccatcataagagagggaactttaatggggaccgccataggcacctgtttcggatattggctcggtgtaagctcttttatctactttctcgcctacctttgtaacgcccagatcaccatgctgcagatgctagcgctgctaggttacgggctctttggacactgcatcgtactgttcattacttacaacatacacctgcatgcattgttctatctgttctggcttctggttggtggactgagtacactgcgtatggttgcggtcttagtgagtcgtactgtaggccctactcagaggctgttgttgtgtggtactcttgcagcgctacatatgctcttcctgttgtatttgcacttcgcttatcataaagttgtggaaggaattctagacacgctggaggggccaaatatcccccctattcagcgagtgccccgagatatccccgctatgttgcccgcagccagattgccaacaaccgtactcaacgctaccgccaaggccgtggcggtaacactgcagtctcactag

SEQ ID NO: 247046 - DNA, 774 bp, synthetic construct
  misc_feature 1..774: note = Description of Artificial Sequence: Synthetic coding sequence
  source 1..774: mol_type = other DNA
atgagtggatttgaaaatttgaacaccgacttttatcagacctcttacagcatagatgatcaatcccagcagagctatgattacgggggatctggcggaccgtactctaagcagtacgcaggatacgattactcacagcagggcaggtttgtgccccctgacatgatgcagcctcagcaaccatatacaggccagatctaccagccaacacaagcctatacccctgcaagtccccagccattctacggtaataacttcgaggacgagcccccattgcttgaagagctaggtattaacttcgatcatatttggcagaaaacgctgaccgtactgcaccccctgaaggttgcggatggcagtataatgaacgagacagatctggcaggacccatggttttttgcctggcattcggggctaccctcctgttggccggaaagattcagttcggttatgtctacggtattagtgcgatcggctgcctggggatgttttgcctgctcaatctcatgagcatgaccggtgtctcctttggatgcgtcgccagcgtcctgggctactgtctgctaccaatgatcttactgagttcctttgccgtcattttctctctgcaagggatggtgggcattatccttaccgctggcattattgggtggtgtagtttctcagcctcaaagatattcattagcgctctggcgatggaagggcaacagcttctcgtagcttatccgtgcgctcttttgtacggcgtcttcgccttaatcagcgtgttttag

SEQ ID NO: 247047 - DNA, 798 bp, synthetic construct
  misc_feature 1..798: note = Description of Artificial Sequence: Synthetic coding sequence
  source 1..798: mol_type = other DNA
atgagcggctttgagaacctgaacaccgacttttatcagactagttactcgatcgatgatcagagtcagcagtcttacgattatggcggttccggcggaccttacagcaaacaatatgctggatacgactactcccagcagggcagatttgtcccccctgacatgatgcagccccagcagccatatacaggccagatctaccagccaacccaagcgtacacacccgcatcacctcaaccattctacggaaacaactttgaagacgagccacccctcctggaggagctgggcatcaacttcgaccacatttggcagaaaacattaactgttctgcatcccctcaaggttgccgacggatcaatcatgaacgagaccgatctcgccggtccaatggtgttctgtctggctttcggcgcaacattgctgctggcaggaaaaatacagttcgggtacgtgtacgggattagtgcaatcggctgccttggaatgttttgcctacttaaccttatgtctatgacaggagtgtcctttggttgtgtggcaagtgtgctgggttactgtctcctcccaatgatcttactctcttcttttgcagtgatcttcagtctacaaggcatggtgggcatcattttgaccgcgggaattataggttggtgtagttttagcgctagtaagatctttataagcgctctcgctatggagggccagcaactactggtggcattgcaaccaaatatcacttacgggagcaactatttcctgttttgctgtctcccctacccccagcagcatttctag

SEQ ID NO: 247048 - DNA, 774 bp, synthetic construct
  misc_feature 1..774: note = Description of Artificial Sequence: Synthetic coding sequence
  source 1..774: mol_type = other DNA
atgtcagggtttgaaaaccttaacacggatttctatcaaacttcatacagcatcgacgaccagtcacagcagagctacgactacggtggatcaggcggtccctatagcaagcagtacgccggatacgattacagccagcagggcagattcgtgcccccagacatgatgcaaccacaacagccctatacgggtcagatttatcagcctacccaggcctacacccccgcatcaccacagcctttttacggcaataacttcgaagacgagccccctctgcttgaggaactgggaataaacttcgatcacatctggcagaagacactcacagtcctccatccccttaaagtggccgacggcagcatcatgaatgaaaccgacttggccggacctatggtattttgcctcgcatttggtgccaccctgctcctggctggcaagattcaattcggatatgtctacgggattagtgccatcggatgtctgggcatgttctgcttgttaaacctcatgtcgatgacaggggtgagcttcggttgcgtggcaagcgtgcttggctactgtctgctgcccatgattctgctatcgtcatttgcggtcattttttctctgcagggcatggttggcataattttgacagcaggaattatcgggtggtgctctttcagtgccagtaagattttcatctctgccctggctatggagggacaacagttactggtggcgtacccctgcgccctcctgtatggcgtttttgctttaatctcagttttttag

SEQ ID NO: 247049 - DNA, 612 bp, synthetic construct
  misc_feature 1..612: note = Description of Artificial Sequence: Synthetic coding sequence
  source 1..612: mol_type = other DNA
atgatgcaaccccagcagccatacactggccagatctaccagccgacacaagcatacacccccgctagcccgcagcctttctacggaaataactttgaggatgagccacccttgctggaggagttaggaattaatttcgatcacatctggcagaaaacgttaaccgttctgcatccactgaaggtggccgacgggtcaatcatgaacgagaccgatctggcgggaccaatggttttttgcttggcttttggcgctacgctcctgctggccggaaagatccagtttggctacgtgtatggcatcagcgccatcggctgcctgggaatgttctgcctgttgaaccttatgtccatgaccggggtgtctttcggctgtgtggcttcagtactgggctattgtctgctacctatgatccttctgagtagctttgctgtaatatttagcctgcaggggatggtagggattatccttaccgcaggtattataggttggtgctcattctctgcttctaagattttcatcagtgcactggctatggaaggacagcaactccttgtggcttatccttgtgccctgctctacggggtcttcgctctcatctcagtcttctag

SEQ ID NO: 247050 - DNA, 534 bp, synthetic construct
  misc_feature 1..534: note = Description of Artificial Sequence: Synthetic coding sequence
  source 1..534: mol_type = other DNA
atgatgcagccccaacaaccctacaccggccagatttatcagcccacacaagcctacacaccggcatcaccacagccgttttacgggaacaatttcgaagacgagcccccactgctcgaagaacttggtatcaatttcgatcatatttggcagaagacactcaccgttctgcaccccttaaaggtggcagacggctccattatgaatgaaaccgacctagctggccctatggtgttctgcctggcattcggcgcaacactgctactcgcgggaaagatccagttcggctacgtttacgggattagtgccattggctgcctaggcatgttttgtttgctgaacctgatgtcaatgaccggtgtgtcttttggctgcgttgcctccgtgctcggatattgcctactgcctatgatcctgcttagcagcttcgcagttatcttttcgctacagggaatggttggaattatccttacagctgggataattggctggtgctccttcagcgccagtaagatcttcatatcagccctctag

SEQ ID NO: 247051 - DNA, 306 bp, synthetic construct
  misc_feature 1..306: note = Description of Artificial Sequence: Synthetic coding sequence
  source 1..306: mol_type = other DNA
atgatgcagcctcagcagccgtacacaggacagatttaccaacccacgcaggcgtatactcccgcatcgccccagcccttttacggcaacaacttcgaagatgaacctcccctgctggaggagcttgggattaacttcgatcatatttggcagaagactttaactgtgctgcatccgctgaaagtcgcagatggctcgatcatgaatgagacagaccttgcgggtcctatggtgttctgtttggctttcggggcaacgctcctgctagccggaaagattcagttcggctacgtctacggtatttag

SEQ ID NO: 247052 - DNA, 429 bp, synthetic construct
  misc_feature 1..429: note = Description of Artificial Sequence: Synthetic coding sequence
  source 1..429: mol_type = other DNA
atgagcggctttgagaatctcaatacagatttttaccagacgagctattctattgacgatcagagccagcagagttacgactacggtggaagtgggggaccatatagtaaacagtatgctggatatgattatagtcagcaggggcgtttcgtgcccccagatatgatgcagccccagcagccatacaccgggcagatttaccaaccaacccaggcctataccccagcatccccccagccgttttacggtaataacttcgaagacgaaccacctctgctggaggagttgggcatcaacttcgatcacatttggcagaaaaccctgaccgtgctccatcccctgaaggtggcggatggctccataatgaacgagaccgacttggcacagtggttctttgccttgctgctcgaaccccactgctattggtag

SEQ ID NO: 247053 - DNA, 882 bp, synthetic construct
  misc_feature 1..882: note = Description of Artificial Sequence: Synthetic coding sequence
  source 1..882: mol_type = other DNA
atggcgtaccatagcggatacggcgctcatggctctaagcaccgggctcgtgctgccccagacccccctcctttgtttgatgacacctccggtgggtattcctcacaacctggagggtaccccgcaacaggcgctgatgtggcgttctccgttaatcacctgctgggagaccccatggcaaatgtagctatggcctacggatcttccattgcatcccacggaaaagatatggtccataaagaactccatcggttcgtgtccgtttctaaacttaaatacttcttcgcagttgatacagcctatgtcgcgaagaagctgggactgcttgtttttccctacacacaccagaactgggaagtgcagtacagtcgagacgccccactgccaccgaggcaagatcttaacgccccagacctgtatattcctaccatggcatttattacctatgtgctactggcgggtatggcactgggcatacagaaaagattctctccagaagtcctggggctgtgcgcatctacagcgttagtctgggtggtgatggaggtgcttgctcttctcctcggcctttacctggcaacagtgagaagcgatctgagcacatttcacctcttggcctatagcgggtataagtacgttggcatgattctcagcgtacttaccggccttcttttcggaagcgatggttattacgtcgcacttgcgtggactagttcggctctgatgtatttcatcgtgagaagcctgagaaccgccgcactcggaccagattcaatggggggtcctgtacctaggcagcgcctgcagctctatctcacattgggggcagctgcttttcagccccttattatttactggctaacatttcatctggtcagatag

SEQ ID NO: 247054 - DNA, 360 bp, synthetic construct
  misc_feature 1..360: note = Description of Artificial Sequence: Synthetic coding sequence
  source 1..360: mol_type = other DNA
atggtgaaaatgaccaagtccaaaaccttccaggcatacctgcccaactgtcaccgtacctacagctgcatccattgccgtgcccacctggctaaccatgatgagctcatttcaaaatcctttcagggatcacagggacgtgcctatctcttcaactctgtcgtgaacgttgggtgtggacctgccgaggaaagagtgctcctgacaggtctgcacgcagttgccgatatctactgtgaaaattgcaagaccacacttggatggaagtatgagcatgccttcgagagtagccagaaatacaaggaagggaagtttataattgaacttgcacacatgatcaaggacaacgggtgggagtag

SEQ ID NO: 247055 - DNA, 360 bp, synthetic construct
  misc_feature 1..360: note = Description of Artificial Sequence: Synthetic coding sequence
  source 1..360: mol_type = other DNA
atggtaaagatgactcggtccaaaaccttccaggcatacctgccttcatgccatcgcacatattcatgcatccattgtcgagcccacctggctaaccacgatgaacttattagtaagtctttccagggtagtcaaggccgagcctatctcttcaactcagtggtcaacgtcggatgcgggcctgccgaagagcgtgtgttgttgactggtctacacgctgttgccgatatctactgcgaaaattgcaaaactaccctaggatggaaatatgaacatgcgttcgaaagttcacaaaagtacaaggaagggaaatatattatcgagctggcgcacatgatcaaggataacggctgggattag

SEQ ID NO: 247056 - DNA, 360 bp, synthetic construct
  misc_feature 1..360: note = Description of Artificial Sequence: Synthetic coding sequence
  source 1..360: mol_type = other DNA
atggtgcgcatcagcaaacccaagacatttcaggcctacctcgacgactgtcaccgccgatattcctgcgcccactgccgcgctcatcttgctaatcacgacgatctcattagcaagtccttccagggttctcagggtcgagcatacctcttcaattctgtggtcaacgtgggctgtggccctgctgaggaacgagtgttactgactggactgcacgccgttgcagatatccactgtgagaactgcaagacaacccttggatggaaatatgaacaggccttcgagagctcccagaagtataaggagggtaaatacattatcgaactgaaccatatgatcaaggataatgggtgggactag

SEQ ID NO: 247057 - DNA, 474 bp, synthetic construct
  misc_feature 1..474: note = Description of Artificial Sequence: Synthetic coding sequence
  source 1..474: mol_type = other DNA
atgtgcgtggcgcaggtcctcacggcccatttgttacctccacgtcaggccctggggtctctgtgctcgccgtgggccgcaccgcgagtgggacctctgccacccgctcctgccatggttagaataagcaaacctaaaacatttcaggcatacctggacgactgccatcgcaggtatagctgtgctcactgccgcgcacacctcgccaatcacgatgacctgatcagcaaatcattccagggaagccagggcagagcctacctcttcaacagtgtcgtgaacgtgggctgcgggccagccgaggagcgggtcctcctgactggactgcacgcggtcgccgacatccactgcgaaaattgcaagactactctgggttggaagtacgagcaggcatttgagtcctctcaaaagtataaagagggaaaatacatcattgaacttaatcacatgataaaggataatggatgggactag

SEQ ID NO: 247058 - DNA, 384 bp, synthetic construct
  misc_feature 1..384: note = Description of Artificial Sequence: Synthetic coding sequence
  source 1..384: mol_type = other DNA
atgccctcctgcgacccaggcccaggccctgcatgcctgcctaccaagacatttcggagttatctgccaagatgccaccggacctactcttgcgtgcactgtcgagcgcatctggccaaacatgatgaattgattagcaaaagtttccaaggcagtcatggcagggcatatctgtttaactcagtggtgaatgtgggctgcggacccgctgaacagcgactccttttgacaggcttgcactccgtggctgacattttctgcgagtcttgtaaaaccacactgggttggaagtatgagcaggcttttgagacttcccagaaatataaagaggggaaatatatcatcgaaatgtctcatatggtgaaggacaatggctgggactag

SEQ ID NO: 247059 - DNA, 384 bp, synthetic construct
  misc_feature 1..384: note = Description of Artificial Sequence: Synthetic coding sequence
  source 1..384: mol_type = other DNA
atgccaagctgcgaccccggacccggtccggcttgcttgcccaccaaaactttccgaagttacctgccgaggtgtcacagaacttacagctgcgtgcattgccgggctcacctggcaaaacacgacgaactcatctccaaaagtttccagggcagtcacggcagggcctatctcttcaattccgttgttaatgtggggtgcggtcctgctgagcaacgtctactgcttaccggactccacagcgttgccgatatcttctgtgaaagctgtaagacgactctcggctggaaatatgagcaggcctttgaaactagccagaagtacaaagagggaaaatacataatcgagatgtcccacatggtgaaagataatgggtgggactag

SEQ ID NO: 247060 - DNA, 384 bp, synthetic construct
  misc_feature 1..384: note = Description of Artificial Sequence: Synthetic coding sequence
  source 1..384: mol_type = other DNA
atgccctcctgcgatccaggccctggcccagcttgtctcccaaccaagacattccgttcttacttaccgagatgccatcgaacctactcatgtgtgcattgtcgagctcacctagccaagcatgacgagctcatcagtaagtcctttcagggtagtcacggaagggcttatctgttcaactctgtggtgaacgtcgggtgtggaccggctgagcaacgactgcttctaaccggtcttcacagcgttgctgatatattctgtgaatcttgtaaaaccactctcggctggaagtatgaacaggcgttcgaaactagccagaaatacaaagagggaaaatacatcattgagatgtcacacatggttaaggacaacggatgggactag

SEQ ID NO: 247061 - DNA, 243 bp, synthetic construct
  misc_feature 1..243: note = Description of Artificial Sequence: Synthetic coding sequence
  source 1..243: mol_type = other DNA
atgcctagctgtgacccgggtcccggacctgcctgcctgcctactaaaaccttcaggagctatctgccccgatgccatcggacatacagctgcgtgcattgccgcgctcacctagctaagcacgatgagttaatttcgaagtctttccagggttcacatggaagagcttacctctttaattcagtggtgaatgtgggctgcgggccagcagaacagcgattgctgctcaccggactgcattag

SEQ ID NO: 247062 - DNA, 384 bp, synthetic construct
  misc_feature 1..384: note = Description of Artificial Sequence: Synthetic coding sequence
  source 1..384: mol_type = other DNA
atgccttcatgtgaccccggtcccggaccggcatgcctgccaaccaagacctttcgctcttatttgccacggtgtcaccgaacatattcatgcgtgcattgccgggctcacctcgccaaacatgacgagctgataagcaagtctttccaggggagtcacggcagggcctatcttttcaatagcgtagttaacgtagggtgcggacctgctgagcagagattgttgctcacaggtctccactccgttgctgacatattttgtgagagctgcaaaactactctcggctggaaatatgaacaggcctttgagacatctcagaagtacaaagagggaaagtatatcatcgagatgtcccacatggttaaagataacggatgggactag

SEQ ID NO: 247063 - DNA, 366 bp, synthetic construct
  misc_feature 1..366: note = Description of Artificial Sequence: Synthetic coding sequence
  source 1..366: mol_type = other DNA
atgggccgtatcttcctggaccacatagggggtacacgtctcttttcgtgtgccaactgcgacactatcctgaccaatagatccgaacttatcagcacccgctttaccggggcaactgggagggccttcctgtttaacaaagtggttaacttgcagtatagtgaggttcaagacagggtgatgttgactggccgacatatggttcgggatgtgagttgtaaaaactgtaactcaaagctgggctggatctacgaattcgcaacagaggattcccagcggtacaaggagggcagagtgatcttagaaagagccctggtaagagagagtgaggggtttgaggaacacgttcctagcgataattcttag

SEQ ID NO: 247064 - DNA, 366 bp, synthetic construct
  misc_feature 1..366: note = Description of Artificial Sequence: Synthetic coding sequence
  source 1..366: mol_type = other DNA
atgggccgtatttttttggatcatatcggaggaacccgtctattcagctgtgccaactgcgacacgattctgactaatcggtctgaattgatcagcactaggtttacgggcgctaccggacgcgcatttctgtttaataaagtggtaaacctccaatactccgaggttcaagaccgtgtcatgctcacgggcagacacatggtacgtgacgtgtcatgcaaaaactgcaattccaagctgggatggatatacgaatttgcaaccgaagattctcagagatacaaggaaggcagggtcatcctggaacgcgcattggtcagggagagtgagggctttgaagaacacgttcccagcgataatagctag

SEQ ID NO: 247065 - DNA, 366 bp, synthetic construct
  misc_feature 1..366: note = Description of Artificial Sequence: Synthetic coding sequence
  source 1..366: mol_type = other DNA
atgggacggatttttctggatcatatcggcggtacccgactgttttcctgtgctaattgtgatacgatactgacgaaccggagcgagctaatatctactcgctttaccggcgctactggacgagcctttctgtttaataaagtcgtgaatcttcagtacagtgaggttcaggatagagtgatgctcaccgggaggcacatggtgcgcgacgtctcctgcaaaaactgtaactctaagctcgggtggatctatgagttcgccaccgaggacagccagcgttataaggagggacgtgttatcttagaaagggccttagtacgggaaagcgaggggtttgaggaacatgttcccagcgacaatagttag

SEQ ID NO: 247066 - DNA, 366 bp, synthetic construct
  misc_feature 1..366: note = Description of Artificial Sequence: Synthetic coding sequence
  source 1..366: mol_type = other DNA
atgggaaggatcttcctggatcatattggcggaactcggctgttcagctgtgcaaattgcgataccatattgactaatcgcagcgagctaatatccacccgtttcaccggggcaaccggcagggctttcctcttcaataaagtcgtgaacctccagtatagcgaagtgcaggacagggttatgcttacaggacgccacatggtgagggacgtaagctgtaaaaactgcaactcaaagttgggttggatctatgagtttgcaacagaggactcacagcgctacaaggagggtcgcgtcatcctggagcgagccctggtccgtgagtccgagggatttgaagaacacgtgcccagcgacaattcttag

SEQ ID NO: 247067 - DNA, 366 bp, synthetic construct
  misc_feature 1..366: note = Description of Artificial Sequence: Synthetic coding sequence
  source 1..366: mol_type = other DNA
atgggcagaatattccttgatcatatcgggggtacacgcctgttctcctgcgccaattgtgacacgattctgactaacagatcagaactgatctccacacgcttcactggcgctactggtcgggcattcctattcaacaaggttgtgaatttgcagtactctgaagtgcaggacagggtgatgctaacaggcaggcatatggtgcgggacgtgagttgtaagaattgcaacagtaagctcgggtggatttacgagtttgcaactgaggactctcagaggtacaaagagggacgggtgatcctagagagagctctggtgagagagtcagaagggttcgaggagcacgtgcccagtgacaatagctag

SEQ ID NO: 247068 - DNA, 2322 bp, synthetic construct
  misc_feature 1..2322: note = Description of Artificial Sequence: Synthetic coding sequence
  source 1..2322: mol_type = other DNA
atgttctcgctgtccagtaccgtgcagccccaggtgaccgtgcccttgtctcacttgattaacgccttccacacgcctaaaaacacctctgtctcactctcaggtgtcagcgtttctcagaaccaacacagggatgttgttccagagcacgaggcaccttcaagcgagtgcatgttctcggacttcctcacaaaactcaacatcgtatcaattggcaaagggaagatcttcgagggatacaggagcatgtttatggagcctgctaagcgtatgaaaaagtcactggataccactgataattggcacatcaggcctgaaccttttagcttaagcatcccaccaagcctcaatctgcgagatctgggactgtctgagttgaaaataggacagatcgaccagctggtggaaaatttactcccaggattttgtaaggggaagaatatcagttctcactggcacaccagccacgtgagcgcccagtcctttttcgaaaacaaatacggtaacctagacattttctctacactgagaagttcctgtctctatcggcatcattctagggcgctacagtcgatttgctccgacctgcaatactggcccgtttttatacaaagcaggggattcaagacgttgaaatctcggaccaggcgcctccagagcacatccgaaagactggccgaaacacagaatatcgcaccctcattcgttaaaggttttcttttacgtgatcggggatccgacgtagagtccctggataagcttatgaaaacgaaaaatatacctgaagcacatcaggacgctttcaaaacaggcttcgctgagggattccttaaagcccaggccttgacacagaagactaatgactcactgaggcgcacgaggctgatattgttcgttctcctgctcttcgggatttacggattgctaaagaacccctttttgtcggtgcggttcaggaccacaacgggtttggattctgcagttgacccggtacagatgaaaaatgtgacatttgaacacgtgaagggcgtcgaggaagccaaacaggaactgcaagaagtcgtcgagttccttaagaatccccagaagttcacaatcctgggcggaaagttgcctaaaggcattctgcttgtgggcccaccaggtactgggaaaactctactagcgcgagccgtagctggggaagcagatgtgccattctactatgcttcgggcagtgagttcgatgagatgttcgtgggcgtgggggctagcagaatcaggaacttgtttagagaagccaaagccaacgcgccttgtgtgatcttcatcgacgagctggattcggtgggaggaaaacgcatagaatctccgatgcacccctacagccggcagactattaatcagctcctggcagagatggatggattcaagccaaacgagggcgttattatcattggggctacgaattttcccgaagccctcgacaacgccctgatcagaccaggtaggtttgacatgcaagttactgttcccaggcccgacgttaagggccgaaccgagatcttaaagtggtatctaaataaaatcaagttcgaccaatccgtggatcccgagattatcgccagaggaactgtagggttttccggcgcagagctggagaacttggtgaaccaagctgctctcaaggccgctgtcgacggaaaagagatggtcactatgaaggagctggagttctcaaaagacaagatcttgatgggaccagagcgccgtagcgtcgaaattgacaataaaaacaagaccattacagcctaccacgagtccggtcacgccattatcgcctattatacaaaggatgccatgcctattaacaaagccaccattatgcctagaggccctaccctcggtcatgtgtctctcctcccagagaacgaccgttggaatgagactcgggctcagctgttagcccaaatggatgtgtcaatgggaggcagagtcgcagaggagctaatcttcggcacggaccatattactaccggggcttcttccgactttgacaacgctacaaaaatcgccaaacgaatggtaaccaaatttgggatgtcagaaaaacttggggtgatgacctattctgacactggcaagctctctccagagactcagagcgccatcgagcaggagatccgtatcctgttaagggacagttacgagcgcgctaaacatatcttgaagacacacgccaaagagcacaagaatcttgctgaagccctcttaacatacgagactctagatgctaaggaaattcagatcgtgctggagggcaaaaaactggaagttaggtag

SEQ ID NO: 247069 - DNA, 2223 bp, synthetic construct
  misc_feature 1..2223: note = Description of Artificial Sequence: Synthetic coding sequence
  source 1..2223: mol_type = other DNA
atgttttctctttcatccacagtgcagccgcaagtgacagtgcccctgagccatctgattaacgcgttccacacccccaaaaacacaagtgtcagcttaagtggggtgagcgtatcacagaaccaacaccgtgatgtggtcccggaacatgaagcaccctcatctgaatgcatgttttcagatttcctgaccaaacttaacatcgtatccatcggcaaggggaaaattttcgagggatataggtccatgtttatggaacctgcgaagagaatgaaaaaaagcctcgacacaactgataactggcatataaggccagagccttttagcttgagtattcctcccagccttaacctgagggatttggggctgagtgaattgaaaatagggcagatcgaccaactggttgagaacctgctccctggtttctgtaaagggaagaacatttcgtcgcattggcatactagtcacgtgtcagcacagagcttttttgaaaataaatatggcaacctggatatcttctccaccctgcgcagttcgtgcctgtataggcaccactcaagagccctgcagagtatttgttctgacctacaatactggcctgtgttcattcagtctcggggtttcaagactttaaagtccaggacgcgacgcctgcaatctacgagcgagcggctcgcagaaacccagaacatcgccccaagtttcgttaagggctttctgctgcgagatagggggagcgacgtcgaaagcctagacaaactgatgaaaactaaaaatattcctgaggctcaccaggatgcttttaagacaggtttcgccgagggcttcctgaaagctcaggcactcacgcagaagaccaacgacagtcttagaaggacaaggttgattctctttgtcctcttgctcttcggcatttatgggctactgaaaaaccctttcttgagcgttcgcttccgtactacaactggactcgactctgcagtcgacccagtgcaaatgaaaaacgttacctttgaacatgtcaagggagtggaggaagcaaaacaggaattacaggaagttgtcgagttccttaagaatccccagaaattcacaattttggggggaaagcttcccaagggcatacttctggtcggcccaccaggtaccggcaagaccctgctagctcgtgctgtcgccggtgaagccgatgtcccattttattacgcctcggggtcggagttcgacgaaatgtttgtgggggtcggagctagtcgtattaggaatttgttcagggaagcgaaagctaacgcgccttgcgttatctttatcgatgagctggatagtgttgggggaaagcggatcgaatctccgatgcatccttacagccgtcaaactatcaatcaactattagctgagatggacggattcaaacctaacgagggcgtgataattatcggggctacaaacttcccagaagctcttgacaatgctctgatccgacctggcagatttgatatgcaggtgaccgtccctcgccctgatgtgaagggaagaacagagattctgaagtggtacttaaataagatcaaatttgaccagtctgtagaccctgaaatcatcgcacgtggtactgtgggcttttcaggtgccgaactggaaaaccttgttaaccaagctgccctgaaggccgctgttgacggaaaagagatggttacgatgaaagagctggaattctctaaggacaagatcctcatgggacccgaaagaagaagtgtcgagatagataataagaataaaaccatcactgcgtaccacgagtccgggcatgctataattgcctactatacgaaggatgccatgccaatcaacaaagccacaattatgccaagagggcctacactcggccacgtatcgctccttcctgagaatgaccgctggaatgagacccgagctcagctgttagcacagatggatgtaagcatgggcggtcgggtggcggaggagcttatatttggtacagatcacatcactactggcgcatcttcagactttgacaacgctactaagatcgctaagcggatggtgacaaaatttggcatgagcgagaagcttggagtcatgacatactctgacactggaaaattaagccctgaaacacagagtgctatcgagcaagaaatccgaatacttctccgggacagctatgagagggcaaagcacatcttgaaaacccattcctag

SEQ ID NO: 247070 - DNA, 2052 bp, synthetic construct
  misc_feature 1..2052: note = Description of Artificial Sequence: Synthetic coding sequence
  source 1..2052: mol_type = other DNA
atgttttcactgtcaagcaccgtgcaacctcaggtaaccgtacctctatcacacctgatcaacgcttttcacacccctaagaacactagtgtttccctgtcgggggtttctgtgtcccagaaccagcatagggatgtagtcccggaacatgaagccccatcctctgagccctcccttaatctgcgcgatctggggctgtcagagttgaagatcggccagatcgaccagctcgtggagaatctgctgccgggtttctgcaaggggaagaacatctcatcacactggcacaccagccacgtgagcgcccagagcttttttgaaaataaatacgtgtttatacagtcccgtggatttaagacactcaagtcccggacacgcaggcttcaatccactagcgagaggctcgctgaaacccaaaatatcgctcctagctttgttaagggtttcctgctccgggatagaggaagcgacgtggagtcacttgataaactcatgaagacaaaaaatataccagaggcccatcaggatgccttcaaaacaggatttgctgagggattcctgaaggctcaagccctcactcagaagacaaatgacagtctgcgcagaaccagactgatcctgtttgtgctgctgctcttcggcatttacggtctgttgaagaacccctttttgtctgtccgtttccgaaccacaacaggcctggactcagctgtggatccagtacagatgaaaaacgtgactttcgaacatgtgaagggggtggaggaggcaaagcaggagctgcaggaggtggtggagtttctcaaaaacccacaaaagttcactatactggggggaaagttgcctaaaggcatcctgcttgtaggcccacctgggaccgggaagacccttcttgccagggctgtggcaggtgaagccgatgtgccattctactatgcttctggctccgagtttgatgagatgttcgtcggcgtgggcgcatcacggatacgcaatttgtttcgagaagccaaggcaaacgcaccttgcgtgattttcatagacgagctcgattccgtggggggaaaacggattgagagccccatgcacccctactcaagacaaacaatcaatcagctgctcgctgagatggacggattcaagccaaacgagggagtgataattatcggcgctacgaattttccagaagccctggataacgccctcattagacccggtagattcgacatgcaggttacagtgcctaggccggacgttaagggtcggactgagatactcaagtggtacctcaacaagatcaaattcgatcaatccgtcgaccctgagatcatagccaggggaactgtcggcttctcaggcgctgagctggaaaacctggtgaaccaagccgctctgaaggcagcggtggatgggaaggaaatggtgactatgaaggaactggaattctctaaggacaagatcctgatgggaccagaacgtcgctccgtggaaatagacaataaaaacaagactataacagcctaccacgagagtgggcacgccataattgcttattacaccaaggatgcaatgccaatcaataaggcaaccattatgccgagaggccctacattggggcacgtctcattactgccggagaatgatcggtggaatgaaacccgcgctcagcttctggcacagatggacgttagtatgggaggccgagtcgctgaagagctcatctttgggacagaccatatcacaacaggagcatcgtcagatttcgataatgctaccaagatcgccaagcggatggttactaagttcggaatgtccgaaaagctgggggtgatgacatactcagataccgggaaactctcaccagaaacccagtctgccatcgaacaggaaatccgaatccttctgcgcgactcctacgaacgtgccaagcatattctcaagacccacgccaaggaacacaagaacctcgccgaggcattgttaacatatgagacgctcgacgcaaaggagatacaaattgtgttggaggggaaaaagctcgaggtacgttag

SEQ ID NO: 247071 - DNA, 2151 bp, synthetic construct
  misc_feature 1..2151: note = Description of Artificial Sequence: Synthetic coding sequence
  source 1..2151: mol_type = other DNA
atgttctcgctgagcagtactgtacaaccgcaggtgacagtgcccttaagtcacttgatcaacgcgttccatacccccaaaaacacgagtgtgagtttgtctggcgtgtcagtaagtcaaaaccagcaccgtgatgtggtgccagaacacgaagccccaagttctgagcctagtctcaatttgcgcgatttagggctgagcgaacttaaaattggacagattgaccagttggtcgaaaaccttctccccggattctgcaaggggaagaatatctccagccattggcacacatcacacgtatctgcgcagagctttttcgaaaacaagtacggtaacctcgacattttctctactctgaggtcctcctgcctttatcggcatcatagtagggcgttacagagtatctgcagtgacctccagtactggccagttttcattcagagtagaggatttaaaactctgaagtcgagaacacggaggctgcagtccacctcagaacgtcttgcagaaacgcagaacattgctccgtcattcgtcaagggcttcctgctccgggatcgaggcagtgatgtagaatcccttgataagctcatgaaaactaagaacattcctgaggcacaccaggatgctttcaaaacaggttttgcggagggctttctaaaggctcaagctctgacccagaagactaatgacagcctccgacggacccgactgatcctcttcgtcctgctgcttttcggaatttacggtctgcttaagaaccctttcttaagtgtcagatttagaaccacaactggcctggacagcgcagtggaccccgtgcagatgaaaaacgtcacctttgaacacgtcaaaggggtagaggaggctaaacaggagctgcaggaggtggtggagttcctgaaaaatccacaaaaatttacaatcctgggaggcaagctgcctaaaggaattctattggtgggtcccccaggtactggcaagaccctgttagccagggccgtagcaggagaagccgatgtcccattctactacgcatccggctcggaatttgatgaaatgtttgtcggtgtgggagcgtcgagaatacgtaacctcttccgggaagccaaagctaacgctccctgcgttatcttcatcgacgaactggactcagtcggtggtaagaggattgagtctcctatgcatccgtatagcagacagaccatcaaccagctgcttgctgaaatggacgggtttaagccaaatgagggcgtcatcattattggagccactaactttccagaggcgctggacaacgcactcatacgccctggccgattcgacatgcaggttactgtgccaaggccagatgtgaagggacgcacagaaatcttaaaatggtacctcaacaaaattaaatttgaccaatctgtggacccagagatcatagccaggggcaccgtgggctttagcggtgccgaactggaaaacctagtgaaccaggcagccctaaaagctgctgtcgacgggaaggagatggtgaccatgaaagagctcgagttctcgaaggacaaaatcctaatgggccctgaaaggcggagtgtggaaatcgacaataagaacaaaaccataacagcgtatcatgaatctggtcatgcaattattgcatactataccaaagacgccatgcctatcaacaaggcaacaattatgcccagggggcctaccctggggcatgtatctcttctgcctgaaaatgatagatggaacgaaactagagctcaactgttagctcaaatggatgtgagcatgggtggcagagttgcagaggagcttatcttcgggaccgaccatataaccacaggcgcatcttcagactttgacaatgccaccaaaattgccaaaagaatggtgactaaattcggcatgtcagagaagctgggggttatgacctactccgacacaggtaagctgtcccccgagacacagtctgccattgaacaagaaatcagaatcctgcttcgggacagctacgagagggccaaacacatattgaagacccacgctaaggagcacaagaatctcgctgaggcactgctaacatatgaaactctcgacgcaaaagaaattcagattgtgctcgaaggaaagaaacttgaggtaaggtag

SEQ ID NO: 247072 - DNA, 747 bp, synthetic construct
  misc_feature 1..747: note = Description of Artificial Sequence: Synthetic coding sequence
  source 1..747: mol_type = other DNA
atgtaccaggtcacagtacccctgagccacctgattaatgcttttcacactcccaagaatacttcagttagtttatctggagtttccgtctcccagaatcagcatcgcgatgtcgtgcccgagcacgaggccccaagtagcgagccaagcctgaatctgagagacctggggttatccgagctaaagatcgggcaaatagatcaactagttgaaaacctgctgccaggcttctgcaagggtaagaacatttcttcccactggcacactagccatgtcagtgcccagagcttctttgagaataaatacggaaatttggatatcttttcgactcttcgcagtagttgtctgtacagacaccactcccgagctttgcagtccatttgctctgatctgcagtattggccagtgttcatccagagtaggggctttaagacgctaaaatcgcgcacccgcaggttacagtccactagtgagaggctggccgagacacagaatatcgctccttcatttgtcaagggcttcctcctgagggatagggggtccgatgtcgagtcactggacaaattaatgaagacgaaaaatatccccgaagcccatcaggatgcattcaagacagggttcgccgagggcttccttaaggcccaggcattgacacagaaaaccaatgattcactgagaaggacacggctaatcctgttcgtactgctcctgtttggaatatacgggctgctaaaaaatcctttttag

SEQ ID NO: 247073 - DNA, 762 bp, synthetic construct
  misc_feature 1..762: note = Description of Artificial Sequence: Synthetic coding sequence
  source 1..762: mol_type = other DNA
atgtttagcctttcgagcaccgtccagcctcaggtgaccgtgcccctgtcacacttaatcaacgccttccataccccgaaaaatacgtctgtgtcactttccggagtaagtgtatcacaaaatcaacatagagatgtagtgcccgaacacgaagcgccttcttctgaaccatcgttgaacctgagagatttgggactgtccgaattgaaaattgggcaaattgaccagctcgtcgaaaatctgctgccgggtttttgtaagggcaaaaatatttcctctcattggcatacatcacatgttagtgcccagtcgtttttcgaaaataaatacgtgttcattcagtctcggggattcaagacactaaaaagtcggactcggagacttcagtccacaagtgaacggctcgccgagacgcagaacatcgctccgtcatttgtgaaaggcttcctgcttagagatcggggatcagatgtagaaagcctggataaactgatgaaaacgaaaaacatccccgaagcgcaccaggacgcctttaaaactggattcgcagagggattcctgaaggcccaggccctgacacagaaaaccaacgacagcctccgtagaactagactgattctgttcgtgctgctcctgttcggcatctatggcctgctgaaaaatccatttctatctgtgagattcagaacgactaccgggttggattcggccgtagacccggtacaaatgaagaacgttacttttgagcacgtgaaggggtag

SEQ ID NO: 247074 - DNA, 1551 bp, synthetic construct
  misc_feature 1..1551: note = Description of Artificial Sequence: Synthetic coding sequence
  source 1..1551: mol_type = other DNA
atgaagaccaaaaatattccggaagcccaccaagatgcttttaagaccggcttcgctgagggattcttgaaggcccaggcgctcacacagaagaccaacgattcattgcgtcgtacaaggctgatcctctttgtcctgttgctattcgggatctatgggttgctgaagaacccgttcctctctgtccgcttcaggacaaccacggggcttgacagcgctgtggacccggtgcagatgaaaaacgttacattcgagcatgtgaaaggcgttgaggaagcaaaacaagaactgcaagaggtcgtcgaattcttgaagaatcctcagaaatttactattctgggtgggaagcttcctaaaggtattttgctggtggggcctcccggaactggcaagactctccttgccagagccgtggcaggagaggcagacgtgcctttttactatgcctccggctccgagttcgacgaaatgtttgttggtgtgggagctagccgcatccggaatctgtttcgggaagccaaggctaacgcaccctgtgtcatcttcatcgatgagctagacagcgtcggcggtaagaggatagaatctcccatgcatccgtactctcgccagaccatcaaccagcttctggctgaaatggacggatttaaaccaaatgagggcgttatcatcatcggagcaactaattttcccgaggctttagataatgcacttattcggccagggcgatttgatatgcaggtgacagtgcccaggcctgatgtgaaggggagaaccgagattcttaaatggtacctgaacaaaattaaatttgatcagagtgtagatcccgagatcatcgcgaggggaactgtggggttcagcggtgccgaactcgagaatctcgtaaatcaggccgctcttaaagctgccgtagatgggaaagagatggttaccatgaaggagttggagttctctaaggacaagatactcatgggaccggagaggaggtccgtcgagatcgacaataaaaacaagaccatcacagcatatcacgagtccgggcatgcgatcattgcttactatacaaaagatgctatgcccatcaacaaggccaccattatgcctagaggtccaactctgggccacgtttcactgctccccgagaatgaccgctggaacgaaactcgggctcaactgctcgcccagatggacgtgagcatgggcggaagggtagctgaggaactgatatttggaacggaccacattaccactggagctagctccgacttcgataatgccaccaagatcgctaagaggatggttaccaaattcggcatgagtgagaaattgggggtgatgacctactctgacacaggaaaactaagcccagagacacaatctgcaattgagcaagagatacgcatcctgctgcgcgattcctacgagcgcgcaaaacacattttgaagacgcatgccaaggagcataaaaatctggcggaggcactgctgacatacgagacgatgcccaagagatttaagctgtttttgcgtggcaagtcttggaagtag

SEQ ID NO: 247075 - DNA, 1047 bp, synthetic construct
  misc_feature 1..1047: note = Description of Artificial Sequence: Synthetic coding sequence
  source 1..1047: mol_type = other DNA
atgttcggccctgctaaaggtcggcatttcggcgtgcatccagccccagggtttccaggaggggtgtcacaacaggccgctggtactaaggccggacccgcaggcgcttggcccgtaggcagcaggacagacaccatgtggcgcctcagatgtaaggccaaggatgggactcatgtgttgcagggtctcagctcacgtacaagggtaagagaactccaaggtcagattgcagccatcactggcatcgcccctggaggacagcgaattctcgtgggctaccccccagaatgtctggatctgagtaacggtgacacaatcctcgaggacctgcccatacagtcaggcgacatgctgattattgaggaggatcagacccggccaaggtcatccccagctttcacaaaaaggggagcatcctcatacgtacgcgagaccctcccagtactcacaagaacagtggtgccagcggacaactcctgtctgtttacttccgtgtattacgtggtcgagggaggcgttctgaatccagcgtgtgcacccgagatgcgccgtctgattgcacagatcgtagccagtgaccccgacttctactctgaagccatcctgggaaagaccaaccaggagtattgcgactggatcaagcgcgacgatacatggggcggagccatcgaaatctctatactgtctaagttctaccagtgcgagatctgtgtggtggatacccagaccgtacggatcgatcggtttggggaggacgctggctataccaagcgagtgctgctgatttatgacggaatccactatgaccccctgcagaggaattttccagatcctgacactccccctctgacgattttctctagtaacgacgatatcgtattggtccaagctctggagctcgctgatgaagcccgaagacggaggcagtttaccgacgtaaacagattcaccctcaggtgtatggtatgtcagaaaggtctgacggggcaggccgaagcaagggagcatgctaaggagacaggccacaccaatttcggagaggtctag

SEQ ID NO: 247076 - DNA, 915 bp, synthetic construct
  misc_feature 1..915: note = Description of Artificial Sequence: Synthetic coding sequence
  source 1..915: mol_type = other DNA
atggagacgcttcatataatctactctgaagccaaaagttttaccgtcgagggcctgtcctcccgtacgagggtcagggaattacagggacagatcgccgctatcacagggatcgctccagggggacagagaattctggtgggctatcctccggagtgcctggacctcagtaacggcgacaccattctggaggacctaccaatacagtctggtgacatgttgattatcgaggaggatcaaacaaggcccaggtcaagtcctgcctttaccaagagaggcgcttcaagttacgtgagggagacattgcctgtgctgactcggaccgttgtcccagccgataatagctgtctcttcaccagcgtttattacgtggtggagggcggagtgctaaaccccgcttgcgccccagagatgcggcgtctcatagcccagatagtggcgtccgacccagacttttactcagaagccatattaggcaagacgaaccaagaatactgcgactggattaagcgcgatgatacatggggaggagccattgagatctcaatactgagtaaattctaccagtgtgaaatatgcgttgtggacactcaaaccgtccgaatagaccggtttggtgaggacgcaggttacactaagagggtattactcatatacgacggaattcattatgatcctctgcaacgcaactttcctgatcccgatactcccccactgaccattttttctagcaatgatgatattgtcttggtgcaggctctggaactggccgacgaggccagaaggaggaggcagttcactgatgtgaatagattcaccttgcgctgcatggtctgccagaaagggctcactggacaggcagaggccagggagcacgccaaagaaacagggcacacgaattttggagaggtctag

SEQ ID NO: 247077 - DNA, 915 bp, synthetic construct
  misc_feature 1..915: note = Description of Artificial Sequence: Synthetic coding sequence
  source 1..915: mol_type = other DNA
atggaaacactgcacattatttatagcgaagctaagagtttcaccgtggaagggctctccagtaggacccgtgtgcgagaactgcaggggcaaattgcagctatcacagggatcgctccgggtgggcagagaatactggttggctatccgcctgagtgtctcgacctgtccaacggcgacacaatactagaagatttgccgattcagtctggcgatatgctcatcatagaagaggatcagactaggcccagaagctctcctgctttcacgaaacgtggtgcatccagctatgtgagagaaacactacccgtcctgactcggacagtggtccccgctgacaatagttgcctgtttacgagcgtctactatgtagtggaggggggagtcttgaatccagcttgtgctccagagatgcgcagactaatcgcgcagatagtcgccagcgatccagacttctattcagaagctatcttgggaaaaactaaccaggagtactgtgactggatcaagcgagacgatacgtggggcggtgccatcgaaatttcaatcctgagcaagttttatcagtgtgagatttgcgtcgttgacacacaaactgttcgaatcgaccgattcggagaagatgctgggtacaccaagcgagtactgctgatctatgacggcatccactacgatccactgcaaagaaatttcccagatccagacaccccacccctgacaatcttttctagtaacgacgatattgtgttggtgcaggcccttgaactggcagacgaagcacggagacgacgccagtttacggatgttaataggttcacgctgcgatgtatggtgtgccaaaaaggactcaccggccaagccgaggctcgagagcatgccaaggaaacaggacataccaattttggagaagtgtag

SEQ ID NO: 247078 - DNA, 840 bp, synthetic construct
  misc_feature 1..840: note = Description of Artificial Sequence: Synthetic coding sequence
  source 1..840: mol_type = other DNA
atgagtcccgcacgccgatgtagaggtatgagagccgcagtcgcagcctctgtgggtctgtcagagggcccagcagggagcagatcagggcgtttgttccgcccaccgtctcctgcacccgctgccccaggcgcaaggctgttgcgtctgcccggatccggggcagttcaggccgcatcccctgaacgcgctggttggacagaagcgttacgcgcagcagttgcagaactgagagcaggcgcagtggtcgctgtgcccacagacaccctctacgggcttgcctgtgcagcctcttgctctgccgcacttagagccgtgtacaggctgaaggggaggtcggaggccaaacctctggccgtttgccttggccgtgtggccgacgtctatcgttattgcagagtaagagttccagaggggttactgaaagatctccttcccggacccgtgaccctggtcatggagaggagcgaagaattgaataaggatctgaacccctttacgccccttgtcgggatccggattccagaccatgcgttcatgcaggacctggcccagatgtttgaggggcctttagcattgacatctgcaaatttatcaagtcaagcctcctccttgaatgttgaggagtttcaggacctttggccacagttaagccttgttattgatggcggtcagattggtgatggacagagtcccgagtgtcgattggggagcaccgttgtggacctgagcgtcccaggcaagttcgggattattagaccaggatgcgctttggagagtacgaccgcgatcttacagcagaagtatggcctgctccctagccacgccagctacctgtag

SEQ ID NO: 247079 - DNA, 1740 bp, synthetic construct
  misc_feature 1..1740: note = Description of Artificial Sequence: Synthetic coding sequence
  source 1..1740: mol_type = other DNA
atgtctgcctctagtttgttagaacagagacctaaaggccaaggcaataaagttcagaacggctccgttcaccaaaaggacggtttgaacgatgatgatttcgagccttacctgtctccacaggcccgacccaataacgcctacaccgctatgtccgactcctatcttccttcttactatagccccagcatcggctttagctactctttaggcgaagccgcatggtccactggcggagatacagcaatgccctatctgacctcctacggacagctgtctaacggtgagccccatttcctgccagacgccatgttcggccagccaggcgctctgggaagcacaccgtttctcggccagcacggctttaacttttttccgtcagggatagactttagcgcctggggaaataattcttcgcagggacagtctacccagagctcaggctactcatcaaactatgcctacgccccaagcagccttggtggggcaatgattgacggccagtctgcttttgccaacgaaaccctgaacaaagcacccggtatgaataccattgaccaagggatggctgccttaaaactaggttccaccgaggttgcatccaacgtgcccaaagtggtgggaagcgcagtggggagcggtagtatcactagcaatatcgtggcctccaacagtctcccccctgccactattgctccaccaaagccagcgagctgggccgacattgcctctaaacccgctaagcagcagccaaaactcaagacgaagaacggaatagccggatcctcactgccccctcccccaatcaaacacaacatggacataggaacttgggacaacaaaggccctgttgcaaaggcccctagccaggctctggtacagaacattggccagccaacccagggctctccgcagcccgttggtcagcaggcaaacaactctcccccagttgcccaggcctccgtgggacaacagacccagccgctgccccctccccctccccagcccgcacaactgtccgtgcagcagcaggcagctcagcctacccgctgggtagcccctcgaaacagggggtccggctttggtcacaacggggtcgacggcaacggcgtgggtcagtcccaggcaggctctggcagcactccctcggagcctcacccagtgcttgagaaactgcggtccattaacaattacaatcctaaggatttcgactggaatctcaagcacggcagagtatttatcattaagtcatatagtgaggatgacatacaccggtcaataaagtacaacatctggtgttcaaccgagcatggcaacaagcgacttgatgccgcataccggtccatgaatggcaagggcccagtctacttgctgttctctgtcaacggatcaggacacttctgcggcgttgccgaaatgaagtccgctgttgattataacacatgcgcaggagtgtggtcccaggacaagtggaaaggacgattcgacgtccggtggattttcgtcaaggatgtgcccaactcacaattgcggcacatccggctggagaacaatgaaaacaagcccgtcactaactcaagggatacacaagaagtacccctagaaaaggcaaaacaagtgctcaagatcattgcttcttataagcatactacatccatcttcgacgatttctcacattatgaaaaacgacaggaggaagaggagagtgttaaaaaagaaaggcaaggtcgcggaaagtag

SEQ ID NO: 247080 - DNA, 1710 bp, synthetic construct
  misc_feature 1..1710: note = Description of Artificial Sequence: Synthetic coding sequence
  source 1..1710: mol_type = other DNA
atgtcggcctcctcacttctcgagcagaggccaaaaggtcagggcaacaaggtgcagaatggctcagtccaccagaaggacggcttgaacgatgatgactttgaaccgtacctgtcaccacaggctagaccaaacaacgcttataccgctatgagtgactcttacctgccatcttattattcaccttcaatcggtttctcctattcccttggggaggccgcttggagcaccggcggagacacagccatgccttatctaacgagctacggtcagctgagcaacggtgaaccccactttctgcccgatgccatgtttggccaacctggggctttgggcagcacgccctttctaggacaacacgggtttaatttctttccttcaggaattgatttttccgcctggggaaacaactcttcgcagggccagtccacgcagagctctggctatagctctaattacgcatacgcacctagcagcctcgggggtgccatgatcgacggtcagtccgccttcgctaacgaaacgctgaataaggcacccggtatgaacactatcgatcagggcatggcagccctgaagctcgggtcgacggaggtggcgtcaaacgttcctaaggttgtcggctcggccgtcggaagcggcagtatcacttcaaacatcgtcgctagcaattccctgccaccagccaccatagcaccaccgaagcccgcatcttgggccgacatagcgagtaaacctgcgaagcagcagcccaagcttaagactaagaatgggattgcaggcagcagcctccctcccccacctataaaacataacatggatatcggcacctgggacaacaagggccctgtggccaaggctcctagccaagctctggtacagaatataggacagccaactcagggaagtcctcagcctgtgggccagcaagcgaacaatagccctcccgttgcgcaggcgtctgtcggccagcaaactcagccacttcccccacccccaccacagcccgcacagctgtccgtacagcagcaggctgctcagccaactcgctgggtggcccctaggaaccgtgggtctggattcggacacaatggcgtagacggaaacggtgtcggtcagtctcaggctggctctggcagtactccttccgagcctcacccagtattagagaaactccggtcaataaacaattataaccccaaagattttgactggaacttgaaacacggtcgagtctttatcattaaaagctattcagaagatgatattcacagaagtatcaagtataatatatggtgcagtactgagcacgggaataagcgcttggacgcagcttaccgctcaatgaacggtaaaggacctgtgtacctgttgtttagtgtcaatgggagcgggcacttttgcggcgtggccgagatgaaatccgctgtggattataatacgtgcgctggagtgtggtcccaggataagtggaaaggccgatttgacgtgaggtggattttcgtaaaagacgtgcctaacagccagctgaggcatatcagactggagaacaacgaaaacaaacctgtaaccaattcccgtgatactcaagaagtaccattggagaaggccaaacaggttctgaaaataatcgcctcatacaagcacactacaagcatcttcgacgacttctcccactatgaaaagcggcaggggagacgcaagtgttag

SEQ ID NO: 247081 - DNA, 1590 bp, synthetic construct
  misc_feature 1..1590: note = Description of Artificial Sequence: Synthetic coding sequence
  source 1..1590: mol_type = other DNA
atgtctgatagctatctgccgtcgtactattctccgagcattgggttcagttattcccttggcgaagccgcttggtcgaccgggggtgatactgccatgccctatttgacttcttatgggcaattatctaacggggaacctcatttccttcctgacgctatgttcggacagcctggcgctctaggcagtacaccttttctcggccagcatggttttaacttcttcccctccggcatcgatttcagcgcttggggtaataactcttcacagggccagtccacccagtcaagcggatattccagcaactatgcgtacgctccttcttcccttggcggagccatgattgacgggcagagtgccttcgctaatgagacacttaataaggcaccgggtatgaacaccattgaccaaggcatggccgcacttaaactcggtagcaccgaagtcgcatcaaatgtgccaaaagtggtggggtctgcagtcggcagcggttccattacatcgaatatcgtggcctctaattcattaccacccgcaaccatagcccctccaaagcccgctagctgggccgacattgcctctaaaccagcgaagcagcaacccaaactgaaaacaaaaaacggcattgcgggtagttctttgcctccacctccaatcaaacacaatatggacattggcacctgggacaacaaggggcctgtagcaaaagccccaagtcaagcattggtacagaatatcggacagcccacacagggtagcccacagcctgtggggcaacaggctaataatagccccccagtggcacaggcttcagtggggcagcagacacaacctctcccaccacccccacctcagcctgcacagctttctgtccagcagcaggcggctcaaccaacacggtgggtggcgcctagaaatagaggctctggcttcggacacaatggcgtcgacggcaacggtgtgggtcagtcccaggcgggatctggttcaacacccagcgaaccacacccagtcctggagaagctgcggtcaattaacaactataaccccaaggacttcgactggaatctcaagcacggacgagtgttcatcatcaagtcctacagcgaagacgatatccataggtccatcaagtacaatatatggtgtagcacggagcatggtaacaaacggctggatgcagcctataggagcatgaatgggaaagggccagtctacctcctgtttagtgtcaacgggtccggtcacttttgtggggtggctgagatgaaaagcgccgtcgactacaatacttgcgctggggtctggagtcaggacaaatggaagggacggttcgacgtcagatggattttcgtcaaagacgtccccaactcccaattaaggcacatccggctggaaaacaatgagaacaagcccgttactaatagcagagacacccaggaagtgcccttggaaaaggctaagcaagtccttaaaattatagcttcttacaagcacacaacgtctatctttgatgacttttcgcattacgagaaaagacaggaggaggaagagtcggtaaagaaagagagacagggcagaggaaaatag

SEQ ID NO: 247082 - DNA, 1740 bp, synthetic construct
  misc_feature 1..1740: note = Description of Artificial Sequence: Synthetic coding sequence
  source 1..1740: mol_type = other DNA
atgtcagcaagcagcctgctggaacaacgcccaaaaggacagggcaataaagtgcagaacggctctgtgcatcagaaagatggtctgaacgatgatgacttcgaaccatatctctccccacaagccaggccaaataacgcgtacacagccatgagtgacagttacttgcctagttattattcccccagcatcggatttagctattctctcggagaggcagcctggtcaactggtggagatacggctatgccttacctgacaagctatgggcagctttctaatggtgaaccgcacttcctgccagacgccatgtttggacaacccggagctctcggcagcaccccctttcttgggcaacacgggtttaatttttttccttcaggcatcgacttctcagcctggggaaacaatagtagccaggggcaatcaacccagagtagcggttactcttctaactatgcctatgccccatcctccctcggcggagctatgatcgacggacaaagcgcctttgccaacgaaactctgaataaagccccaggcatgaatactatcgatcaaggtatggctgctcttaaacttggatctactgaggtggcctccaacgtgccaaaggtcgtgggctctgctgtcggcagcggttcaattacctccaatattgtggcttcaaactccttgccacctgccactattgcccctccgaagcccgcttcctgggccgatatcgccagtaaacctgctaagcaacagcctaagctgaagactaagaatggaattgccggtagctcactcccccctccaccgatcaagcataacatggacattggcacatgggataacaaagggcctgtggctaaagcaccctcacaggctttggtgcagaatatcggtcagccgacgcagggctcgccacagcccgtggggcagcaagccaataactctcccccagtcgcacaggcgtccgtaggccagcagactcagccgctgccccctcctccccctcaacccgctcaattgtctgtgcaacagcaggctgcccaacctacacggtgggtcgcgcctaggaaccgcggttcgggattcgggcacaatggagtagacgggaatggcgtcggacaaagtcaggcaggctccgggagtactcccagcgagccacatcccgtgttggagaaactgcggagcattaataactataatcccaaagactttgattggaatctgaagcatggcagagtgttcatcatcaagtcatattcagaagatgacatccataggtccattaagtacaacatctggtgctcgaccgagcacggcaacaaacgcttggacgctgcctacaggtccatgaacggtaaaggacccgtctatctccttttcagcgtcaatggatccggtcacttttgcggggtcgctgaaatgaagtcagccgtcgactacaacacatgtgctggcgtttggtctcaagataagtggaagggcaggtttgatgttagatggattttcgttaaggacgttcccaattctcagctgcggcatattaggctggaaaacaacgagaacaaacccgtgactaacagtagagatactcaggaggtgcctctggaaaaagcgaaacaggtcctaaagattatcgccagttacaagcatacaacctctattttcgacgacttctcccactacgagaagcgccaagaagaagaggaaagcgtcaagaaagagcgacagggacggggtaagtag

SEQ ID NO: 247083 - DNA, 1245 bp, synthetic construct
  misc_feature 1..1245: note = Description of Artificial Sequence: Synthetic coding sequence
  source 1..1245: mol_type = other DNA
atggcaagtggcgatacgttgtatattgcaaccgatggatcagagatgcctgcggaaatcgtcgagctacacgagatagaggtggagacaatccctgtggagaccatcgagacaacagtggtgggcgaggaagaggaagaagatgacgacgatgaggacggtggcggaggggatcacgggggtggaggtggacacgggcacgctggccatcaccatcaccatcatcaccatcaccatcacccccctatgatcgccctgcaacctctagtgacggatgatcccactcaagtgcaccaccatcaagaagtcatactggtgcaaacacgcgaagaggtagtcggtggggacgactcagatgggttacgggctgaagatgggtttgaggatcaaattctgatacctgttcctgcccctgccggtggggatgacgattacatcgagcagactctggtcactgtggctgccgctgggaaatctggcggtggcggaagctcaagctccggagggggacgagtaaagaaaggcggaggcaagaaaagtggcaagaagagctacttgtctggcggtgctggtgcggcagggggaggcggagctgatcccggtaacaagaagtgggagcagaaacaggtgcaaatcaagaccttggagggagagttctcagtgacgatgtggtcgtccgatgaaaaaaaagatattgatcatgaaaccgtggttgaggagcagatcatcggagagaattctcctcctgattatagcgagtatatgactggcaaaaagctgcctcctggcggaattcctggcatcgatctctcggatccaaaacagctggccgaatttgcacggatgaaacccaggaaaattaaagaggatgacgctcctagaacaatcgcatgcccacacaaaggttgcaccaagatgttccgggacaacagcgccatgcggaaacatctacacacccacggcccacgggtgcatgtctgcgcagagtgtggcaaggcattcgtagagtctagcaagcttaagcgccatcaattagttcatactggggagaagccctttcaatgtacctttgagggatgcggaaaaaggttttccctcgactttaacctaagaacccacgttcgtattcacaccggagacaggccctacgtatgtccttttgacggttgcaataaaaagttcgcacagtccacaaacctgaaaagtcatatcctgacccatgctaaagcaaaaaataatcagtag

SEQ ID NO: 247084 - DNA, 105 bp, synthetic construct
  misc_feature 1..105: note = Description of Artificial Sequence: Synthetic coding sequence
  source 1..105: mol_type = other DNA
atggctagcggcgataccctgtacatcgcaacagacgggtccgagatgcccgctgaaatcgtggagcttcacgagatagaggtggaaaccatccctgtggaatag

SEQ ID NO: 247085 - DNA, 1221 bp, synthetic construct
  misc_feature 1..1221: note = Description of Artificial Sequence: Synthetic coding sequence
  source 1..1221: mol_type = other DNA
atggctcaggcgccagccgacccagggagggaaggacacctcgagcagcggatccttcaggtgcttacagaagcaggaagccctgtgaagctcgctcagcttgtgaaggaatgccaagcccctaaacgggagctaaaccaagtcctgtatagaatgaagaaggagctcaaagtctctttgacctctcccgcaacatggtgtctcgggggaactgatcctgagggggaagggccagccgaactcgccctgagcagtcctgaagaggatatctacagattcctgaaggacaacggcccacaacgagctctcgtgatcgcacaggccctgggaatgagaaccgcgaaggacgtgaatagggacctttatcgcatgaagagtaggcacctgctcgacatggacgagcagtccaaggcttggacaatatacaggccagaggactcagggagaagggcgaagtctgcctcaatcatctatcaacataacccaattaatatgatctgtcaaaatggtcctaattcctggatcagcatcgccaatagtgaggccattcaaattggacacggcaatattatcactaggcagaccgtctctcgggaagacggatccgccggtcctagacatctaccctcgatggctccgggagatagctccacctggggcacccttgtggacccatggggaccccaggatatacatatggaacagtcaattctgagacgggttcagttgggacattctaacgaaatgaggcttcatggtgtcccctctgagggacccgcacacatcccccctggttctccaccggtatctgccaccgccgctgggccagaggcttctttcgaagctagaatcccgagcccaggcacccatcccgaaggtgaggccgctcaacgcatccatatgaaatcatgcttcctggaggatgcaacgattggaaattccaacaaaatgagtatcagtcccggagtcgctggacctggcggagtcgccggaagtggagagggagaaccaggtgaggacgctggcagaaggcctgccgatacccagagccgatcccatttccccagagacatcggccagcctatcacaccgagtcacagcaagctaacgcccaagctggagacaatgacgctcggcaataggagtcataaagctgcagagggctcccattacgtcgatgaggcatcgcacgaaggcagctggtggggcggaggtatttag

SEQ ID NO: 247086 - DNA, 1341 bp, synthetic construct
  misc_feature 1..1341: note = Description of Artificial Sequence: Synthetic coding sequence
  source 1..1341: mol_type = other DNA
atggctcaggctcccgctgaccccggtagagaaggccatttggagcagcggatactccaggttttgaccgaagccggttctcccgtgaagcttgcccagcttgtgaaagagtgccaggcacccaagagggaacttaaccaggtgctgtaccggatgaagaaagaacttaaggtgagcctaaccagtcccgctacctggtgtttgggcggaacagatccagagggcgaggggccagcagaactggccctaagctcgcctgcagagcggcctcaacagcatgccgctactattcccgagacaccaggacctcagttctctcagcagcgggaggaagacatttataggttcctcaaggacaacggcccacagagagcactggtgattgctcaagcactgggaatgagaactgccaaagatgtgaatagggacctgtacaggatgaaaagccgccacctgctggacatggatgagcaatccaaggcttggaccatctacaggcccgaagactccggcaggagggctaagtccgcttccattatttatcagcataacccgatcaacatgatctgccagaatggtcctaattcttggatttctattgctaactctgaggccatccagataggccatggcaatatcattactcgtcaaaccgtgagcagagaagatgggtctgctggacccagacaccttcctagtatggcgcctggcgactccagcacttgggggacgctggtagatccttggggccctcaggatatccatatggagcaaagcatcctccggagagtccagctgggacacagcaatgaaatgcgtctgcacggcgtcccatccgagggaccagcccacattcccccaggatcccctcctgtgtcagccactgccgcaggccctgaggctagttttgaggcccgtatcccgagtcctggtactcaccctgagggcgaggccgctcagcggattcacatgaaatcatgctttctcgaggacgccacaattggaaattctaataagatgtctatctcacccggagtggccggacctggcggagtcgctggaagcggagaaggagagccaggtgaggatgctgtggctgcctttaccgaagtcctgaaccctagcaagtccttcatgaagttcggtatcaatttctttcagacaccagtgaatgtggatagtttgaccagcagtcacgaatcacagatgtttcttacggcctgtcgccttgtgatcttcagcagacgtttttctacttactttgcgcagatccacctccgtaatcactctgtcctacacctgtgtcctcataagatttacctgctgaaaaacaagaagtag

SEQ ID NO: 247087 - DNA, 1143 bp, synthetic construct
  misc_feature 1..1143: note = Description of Artificial Sequence: Synthetic coding sequence
  source 1..1143: mol_type = other DNA
atggcccaggcaccagctgaccccggacgggaggggcatttggagcaaaggattctgcaagtactcactgaggcgggatccccagtcaaacttgcgcagctggtaaaggagtgtcaggccccaaagagagaattaaatcaggtgctttatcggatgaaaaaagagcttaaagtgagcttgacatcaccagccacttggtgcctgggcggaaccgaccctgaaggggagggtccagcagagctagccctcagcagccccgcagagcgccctcagcagcatgcagccactattccagaaacccctggccctcagttctcccaacagagagaggaggacatataccgctttttgaaggacaacgggccacagagggccctggtcatcgctcaggctctcgggatgcgcaccgctaaggatgtaaacagagatctgtataggatgaagtcacgtcatctgttggatatggacgagcagtccaaagcctggacaatttatcgacctgaagactctgggaggcgggctaaatctgcatccataatctaccagcataacccaataaacatgatctgccagaatggcccaaattcttggattagtattgcgaattctgaggccatccaaatagggcacggaaacataattacccgccaaacagttagtagagaagatggttccgcaggccctagacacctgccttcaatggctcctggcgactcaagcacttggggaaccctcgtcgacccgtggggcccacaggacatccacatggagcaatctattctgcgcagggtgcagctaggacactcaaacgaaatgagactgcatggggttcctagcgagggaccagctcatatcccccctggaagcccacccgtcagtgctacagcagcaggacccgaggccagcttcgaggcaaggatcccctcacctggtactcaccccgagggcgaagcagcccagcgtatccacatgaaaagctgctttttggaggacgccaccatcggcaactcgaataaaatgtccatctctcctggtgtcgcgggtccgggaggggtggccggatccggagagggagaaccgggtgaggacgcaggaaggagacccgcagacacgcaggccagatcttttgacgggcaggaatag

SEQ ID NO: 247088 - DNA, 1290 bp, synthetic construct
  misc_feature 1..1290: note = Description of Artificial Sequence: Synthetic coding sequence
  source 1..1290: mol_type = other DNA
atggcacaggctccggctgatcccggacgagagggccatctggaacagcgcatcctgcaggtgctgaccgaggcgggatcaccagtcaaattggctcaactagtgaaggagtgccaagctcccaagcgggaactcaaccaggtcctctataggatgaagaaagagttaaaagtgagtctgacctcgcccgctacgtggtgcctggggggtactgaccccgagggtgaaggacctgccgagctggccctcagctccccggctgagaggccacagcagcatgcggctactatccccgagacacctggaccacagttttcacaacagcgcgaggaggacatctaccggtttctgaaggacaacggaccccaacgggctctggtcattgctcaggctttgggcatgcggacagctaaggacgtcaatagggacctgtataggatgaagtcacgtcacctcttggacatggatgaacaaagcaaagcctggacgatctacaggcccgaagattctggccgacgagcaaaatccgcatctattatctaccagcacaacccaattaatatgatctgccaaaatgggcctaattcttggatcagtatagctaatagcgaagctatccagatagggcatggaaatatcatcacacgacagacagtgagcagagaggacggtagcgctggccctagacacctgcctagtatggccccaggggacagctctacgtggggtactctggtggacccgtggggtccccaggacattcacatggaacagagcatcttgcgcagagtgcagcttggccatagtaacgagatgcgccttcatggtgtgccgagcgagggacccgcacatattccccctggttctccccctgtcagcgccaccgccgcaggccctgaggcctcttttgaggccagaattccatccccaggaacccaccccgagggggaggctgctcagagaatccatatgaaaagctgtttcctggaggacgcaacaattgggaactccaataaaatgtctatttcaccaggcgtggccggaccgggaggcgtggccggttcaggcgagggagagccgggtgaagacgcaggccgaagacctgcggatacacagagccgctcccattttccacgggacattggccaacccatcacaccctctcactctaagttaacaccgaagctggagacgatgacacttggcaatcggtctcataaggccgctgaaggatcccattatgttgacgaagctagccatgagggatcatggtggggagggggtatatag

SEQ ID NO: 247089 - DNA, 747 bp, synthetic construct
  misc_feature 1..747: note = Description of Artificial Sequence: Synthetic coding sequence
  source 1..747: mol_type = other DNA
atggctcaagcacctgccgaccccggacgcgagggccatctggagcagaggatcctgcaggtactaacagaggccggaagccccgtcaagctggcccagctagtgaaagagtgtcaggcacccaaacgcgagctgaatcaggttctataccgcatgaagaaggaactgaaggtctccttgacaagcccggcaacttggtgtctgggcggaacagaccctgagggagagggacctgcagagctcgccctctcttcccccgcagaacgtccacagcagcatgcagctacaattcctgagactcccggtccccagttctcccagcagagggaagaggacatatatcgcttcctgaaagacaacggacctcagcgagccctggtcatcgctcaggctctgggtatgaggactgccaaggatgtgaacagggacctgtatcgcatgaagtcaaggcacttgctggacatggacgagcagtcgaaggcctggactatttatcggcctgaggacagcggcaggcgggctaagtcggcatctatcatctaccaacacaaccctataaacatgatttgtcagaatggcccaaactcttggatttcgatagccaactccgaagccattcaaatcggacacggtaacattattactcgtcaaacagtctcccgggaagatgggaagtctccgaaaagggctcagggtggtgacctcgggggagaacctcccgaccctctgggagggggaaaaggatag

SEQ ID NO: 247090 - DNA, 1065 bp, synthetic construct
  misc_feature 1..1065: note = Description of Artificial Sequence: Synthetic coding sequence
  source 1..1065: mol_type = other DNA
atggctcaggccccagccgatccgggtcgagaagccgagcggcctcagcaacacgccgcaacaatccccgaaacacccggtccacaattctcccagcagagagaggaagacatttaccgctttctcaaggacaatgggcctcagcgagcactggttatcgcccaagcccttggtatgcgcaccgccaaagatgtgaaccgcgacttgtaccgtatgaaatcacggcacctactagacatggatgagcagtcaaaagcttggacgatctaccggccagaggattcaggccgaagggcaaagtctgcctccatcatttaccagcacaaccccattaacatgatttgtcaaaatggcccaaactcctggatttccatcgcaaattccgaagccatacagattggacatggaaacataatcactaggcagacagtgtctcgagaggatggaagcgccggtccgagacacctgccttccatggctccgggagattcctctacgtgggggaccttagtggacccgtggggacctcaagacatccatatggaacagagtattctccgcagggtgcagctggggcatagtaacgaaatgagactgcacggagtgccgagcgagggccctgcacatatcccccctggctcacccccagtttccgctactgcagccggaccggaggccagcttcgaagctcggatcccaagtccaggcactcatccagagggggaagctgcccagaggatccacatgaaaagctgtttcctcgaggacgctacaatcggcaactccaacaagatgtctatctcgccgggagtggcaggccctggaggcgtggctggctctggagagggtgaaccaggggaggacgctggcaggcgccctgctgacacacagagccggtcccacttcccccgagacatcgggcaaccgatcacacctagtcatagcaagctcacgccaaagctcgagacaatgaccctcgggaatcggtcccacaaggcggctgaaggtagtcactacgtcgatgaagcaagccatgaggggagctggtgggggggtggaatctag

SEQ ID NO: 247091 - DNA, 1860 bp, synthetic construct
  misc_feature 1..1860: note = Description of Artificial Sequence: Synthetic coding sequence
  source 1..1860: mol_type = other DNA
atgccggatccagcggctcacttgccatttttttatgggtccatatcacgggctgaagccgaggaacacctgaagctggcgggaatggctgatggcttgttcctgctccggcaatgcctgaggagtctgggcggatacgtgttatcgttagtgcacgacgtgcggtttcaccacttccctatcgaacgccaactgaacgggacttatgcaatcgcaggtggaaaagcccactgcggccctgccgagttatgtgaattctactcaagagaccccgatggcctgccatgcaatctccgtaagccgtgcaataggccatcaggactggaacctcagcctggggtgttcgactgtcttcgcgacgcaatggtgagagactacgtgaggcagacatggaaattagagggcgaagctctcgagcaggctataattagtcaagctccccaagtggaaaaactgatcgctacgactgcccatgaaagaatgccatggtatcactcgtctttaacacgggaggaggcagaacgaaagctgtattctggagcacagacagatggaaagttcctcctgcgccctcgcaaagagcagggcacatatgcactgtccctgatttatgggaaaaccgtctatcactatctgatttctcaggataaggccggaaagtactgcatcccagagggcacgaagtttgacaccctttggcagctagttgaatatctcaaactgaaggcggacggactgatctactgtctaaaagaagcttgcccgaacagtagcgcctcaaacgcctctggtgcagctgccccaacgctgcccgcacaccccagcactctgacccacccgcagagaaggattgatactctgaattctgatgggtatacccccgaaccagcgaggatcactagtccagacaagccccgacccatgcccatggacacctcagtgtatgagtccccatacagtgatcctgaggaactgaaagacaaaaagctctttttaaaacgtgacaacctcctcattgctgacattgagttgggatgtgggaattttggatctgttagacagggagtctacagaatgcggaagaaacaaatcgacgtggccattaaagtgttgaagcagggcacagaaaaggcagatacagaagaaatgatgcgtgaagcccagataatgcaccagctagataatccatatatcgtgcggctcattggggtttgccaggctgaagctctgatgctagtgatggaaatggctggcggaggtcctctgcacaaatttctggttggtaagagggaggagattcccgtgtctaacgtggctgagctgctccatcaagtgtccatgggaatgaagtatcttgaagagaaaaacttcgtgcaccgggatttagccgctcgcaatgttttactcgtcaacagacactacgcaaaaatcagcgatttcgggctctcgaaagcacttggagctgacgacagttattacaccgctagaagtgccggaaagtggcctctgaaatggtatgcgccagagtgcatcaatttcagaaaattcagttcccgttctgacgtgtggtcttatggagtcacaatgtgggaggctctcagctacggtcagaaaccctacaaaaaaatgaagggaccagaggtgatggccttcattgagcaaggtaaacggatggagtgccctcccgaatgccccccagagctttatgcgctgatgagtgactgctggatatacaaatgggaagatcggccagacttcctgaccgtggaacagcggatgagggcttgctattactctcttgcatctaaggttgaaggaccacctggttccacccagaaagcagaggctgcctgcgcttag

SEQ ID NO: 247092 - DNA, 1482 bp, synthetic construct
  misc_feature 1..1482: note = Description of Artificial Sequence: Synthetic coding sequence
  source 1..1482: mol_type = other DNA
atgcggctcggccctcgctggaagggagaagctcttgagcaagctattatcagccaagctccccaggtggagaagctgatcgcaactaccgcccacgagcggatgccatggtatcatagttcactcacgagagaggaggctgaaagaaagctgtattccggagctcagaccgacggaaaattcctgttaaggcccagaaaggagcaagggacgtatgccctgtccctaatttatgggaagacggtataccattatctcatcagtcaggacaaggccggaaagtactgtatccctgaggggactaaatttgataccctgtggcagctggtcgagtaccttaaactaaaggctgatggactgatttattgcctcaaggaagcttgtcccaactcaagcgcaagtaacgccagtggagccgctgcgcctactttacccgctcatccaagtactcttacacaccctcaaagaagaatcgatactctcaacagtgacggctacactccagagccggctagaatcacctcgcccgacaagcccaggccaatgcccatggataccagtgtatatgaatccccatactccgaccctgaagagctcaaggataaaaaattgttcttgaaaagagataacctgctaatcgctgacattgagcttggctgcgggaatttcggttcggtgcgtcagggggtctatcgtatgcggaagaaacagatagacgtagcgatcaaggtgttaaaacagggaaccgaaaaagctgatacggaggaaatgatgcgagaagcccagattatgcaccagctggataatccttacattgtacgcctgatcggagtatgtcaagccgaggcgcttatgttagtgatggagatggcaggaggcggtccactgcataagttccttgtgggaaaacgggaggagatccctgtgtctaacgtggcagaacttctgcaccaggtctcgatgggaatgaagtaccttgaggaaaaaaacttcgttcacagagacttagctgctagaaatgtgctactcgtgaacaggcactatgccaaaatttctgatttcggtcttagcaaggcactcggagctgacgactcctattataccgccagaagcgctggaaaatggccacttaaatggtatgctcccgagtgtattaattttcgaaaattttcctcccggtccgacgtatggagctatggagtaacaatgtgggaagctcttagttatggacagaaaccatacaaaaaaatgaagggtcctgaggtcatggcatttatagagcaaggaaaaagaatggaatgcccccctgaatgtcctccagagctctacgctctcatgtccgactgctggatttacaagtgggaggacaggcctgacttccttaccgtggagcagagaatgagggcctgctattactctctggctagcaaggttgaggggcctcccggaagcacccagaaagcggaggccgcatgtgcctag

SEQ ID NO: 247093 - DNA, 939 bp, synthetic construct
  misc_feature 1..939: note = Description of Artificial Sequence: Synthetic coding sequence
  source 1..939: mol_type = other DNA
atgccaatggacacgagtgtctacgagtcaccttacagtgaccctgaggagctgaaggacaagaagctgttccttaaacgagacaacctgctgattgctgacatcgaattaggctgtggtaatttcggctctgtgcggcaaggcgtataccgaatgaggaagaaacagattgatgtggcaattaaggtgctgaaacaggggactgaaaaggcagacaccgaagagatgatgcgggaagctcagatcatgcaccagctagataacccctacatcgtacgactcatcggtgtgtgccaagcagaagccctaatgcttgtaatggaaatggccggtggtgggccactgcacaaattcttggtgggcaaacgtgaggagatccctgtctctaatgtagcagagcttcttcaccaggtgtctatggggatgaagtatctggaagagaagaattttgtccatcgggatctggccgcacgcaatgtgctgctggttaataggcactatgccaagatatcagacttcggtcttagcaaagctcttggggcagatgactcttattacaccgctcgcagcgctggtaagtggccactcaagtggtacgcgcctgagtgcattaacttcagaaagttcagcagccgctccgatgtctggtcctacggggttaccatgtgggaagccctgtcctatggtcagaagccatataaaaaaatgaagggcccagaggtgatggcctttattgagcagggcaagcgaatggaatgccctcccgagtgtcccccagagctctacgccctcatgtccgactgctggatatacaagtgggaggacaggcctgattttttaacagtggagcagcgaatgagggcttgttactactctttagcaagcaaggtggaaggccctccaggttcaacgcaaaaagctgaggctgcctgcgcatag

SEQ ID NO: 247094 - DNA, 1344 bp, synthetic construct
  misc_feature 1..1344: note = Description of Artificial Sequence: Synthetic coding sequence
  source 1..1344: mol_type = other DNA
atgcttttggacgcagggcctcagtatcctgcaataggagtcacaacatttggggcttcacgacaccatagtgccggtgacgtggccgaaagggacgtcggactgggcattaaccctttcgccgacgggatgggcgcatttaaactgaacccctcgagccatgaactagcatccgccggacagactgcatttacttcccaagcccctggttatgcagctgccgcagccttgggccaccaccaccatcctgggcatgtgggctcttactctagcgcagcctttaacagcactcgggattttctatttcgaaaccgaggattcggagacgccgcagccgcagcatctgctcaacactctctgttcgctgcctcagctggcggttttggaggtccccacgggcacacggatgcagcgggacacttgctatttcccggactgcacgagcaggccgcagggcacgcctctcctaacgtggtaaacgggcagatgaggttgggcttctcgggagacatgtacccgaggcccgagcagtatgggcaagtcacgtcccctcggtctgaacactacgcagctccacaacttcacgggtacggcccaatgaacgtgaacatggccgctcatcacggagctggggcatttttccgttacatgcggcagccaataaaacaggagctgatatgcaagtggattgagccggagcaactggccaaccctaaaaagtcatgcaataagacattttccaccatgcatgaactagtaacacatgtgacagtagaacatgtaggtgggccagagcagtcaaaccacatatgcttttgggaggagtgtccccgagagggtaaacccttcaaggcaaaatataagctagtcaaccacattcgcgtacacacaggcgagaaacctttcccgtgcccattccctggttgcggaaaggtctttgcccgatccgaaaatctgaagatacacaaaaggacacacaccggcgaaaaacctttcaagtgcgagttcgaaggatgtgaccggcgattcgcaaacagctctgatcgtaaaaagcacatgcacgtgcatacaagtgacaagccctacctgtgtaagatgtgtgacaagtcatatacccaccctagctccctgaggaagcatatgaaggtccatgagtcaagcagtcagggaagtcagccatctccagccgcaagtagcggctatgagtcctctacaccacccactattgtttctcccagcacagataacccaaccacttcttcgttaagtccttcgtcatccgctgttcatcacaccgcaggccatagcgcactcagctccaacttcaacgaatggtatgtgtag

SEQ ID NO: 247095 - DNA, 1599 bp, synthetic construct
  misc_feature 1..1599: note = Description of Artificial Sequence: Synthetic coding sequence
  source 1..1599: mol_type = other DNA
atgttgctcgacgctggtcctcaatttccggcaatcggcgtggggtccttcgcccgacaccaccatcattccgctgcagccgctgccgcagccgctgcagaaatgcaggatcgagaactgagtctggcagctgcccagaacgggttcgtagatagcgcagctgcacacatgggcgcttttaagctgaatcccggagcccacgaattgagccccggacaaagcagtgcctttactagccaaggcccaggcgcttaccctggtagcgctgctgcagctgctgccgctgctgccctggggcctcacgccgctcacgtgggttcatactcgggaccaccgtttaactcgacgagggacttccttttcagaagcagagggttcggggattccgcacctggagggggtcagcatggactattcggcccaggcgcaggagggctccaccacgcccactccgacgcccagggccacctgctctttccgggtctgcccgaacagcacggcccacacgggtctcagaacgtgcttaatggacagatgagactggggttgccaggcgaggtctttggcagaagcgagcagtatcgtcaggtcgccagtcccagaaccgatccctactctgccgctcaactgcacaaccagtatggcccaatgaatatgaatatgggcatgaatatggccgcagcagcagcccaccaccaccaccatcatcaccaccacccaggagcattctttcgctatatgaggcagcagtgtatcaaacaagaactaatttgcaaatggattgacccagaacagctctcaaaccccaagaagagttgcaataagacattctcaaccatgcatgaactggtcacacacgtttccgtggagcacgtgggcggacctgaacagtcaaaccatgtttgcttttgggaagagtgtcccagagagggcaagccctttaaggctaaatataagctcgttaatcatattcgggtgcataccggcgaaaagccttttccctgtccatttcctggatgtggcaaagtgttcgccaggtccgagaacttgaagatccacaagaggacacataccggagaaaaacctttccagtgtgagttcgaggggtgcgatcgcaggttcgcgaactccagcgacagaaagaagcacatgcatgtgcacacgtctgacaaaccttacctgtgtaagatgtgcgataaatcatatacccacccatcctccctgaggaagcacatgaaagtgcatgaatctagccctcagggctccgagtcatctcctgctgccagtagcggttacgagtcaagcacccctccaggtttggtgagcccatctgctgagccgcagtctagctccaacctgtctcctgccgcagctgcagccgctgccgcagcagcggctgcagctgccgcagtgagtgcggtccaccgaggaggaggctccggctccgggggagctggcggtggatccggaggaggttctggttccggtgggggaggaggcggagccggtgggggtggtggtggcagcagcgggggaggcagcggtaccgctgggggacacagtgggctgagctcaaacttcaatgaatggtacgtgtag

SEQ ID NO: 247096 - DNA, 489 bp, synthetic construct
  misc_feature 1..489: note = Description of Artificial Sequence: Synthetic coding sequence
  source 1..489: mol_type = other DNA
ccccctcccccaccaccccctcccgcacctcctccgccaccccctctaaaccccaagaagtcttgcaataaaacttttagtactatgcatgagttggtgacacatgtcagcgtggagcatgttgggggacccgaacagagcaaccatgtgtgcttttgggaggaatgtccaagagaggggaagcccttcaaggctaaatacaaactcgttaaccatatacgggtccataccggagagaagcccttcccgtgcccattcccaggctgcggaaaggttttcgcccgttctgaaaatctgaaaattcataaaaggacacatacgggagagaaaccgtttcaatgtgaattcgagggctgcgaccggagattcgctaactcctccgatcgaaaaaagcacatgcacgtacacacttctgacaagccctatttgtgtaaaatgtgtgacaagtcttacacacatcccagcagtctcagaaagcacatgaaatag

SEQ ID NO: 247097 - DNA, 783 bp, synthetic construct
  misc_feature 1..783: note = Description of Artificial Sequence: Synthetic coding sequence
  source 1..783: mol_type = other DNA
atgttgctcgatgccggacctcagtttcctgcaatcggcgtgggaagtttcgccaggcatcaccatcacagtgctgcggctgcagctgccgctgctgccgagatgcaggaccgagagctgtcacttgctgccgctcagaacggatttgtggactccgctgctgcacacatgggagcattcaagctgaaccctggagcacacgaactgtctccaggccagtctagtgccttcacaagccaaggcccaggcgcttatccgggatctgccgcagcggcagccgcagccgctgcccttggtcctcatgccgctcacgtgggatcttattcaggaccgcctttcaattccacacgtgactttctgtttcggtcccgcggattcggagactcagcacctggcggaggccagcatggtctcttcggaccaggcgcaggcggactgcaccacgcccacagtgacgcacaggggcacttactgtttcctgggctgcccgaacagcatggccctcacggtagccagaatgtcttgaacgggcagatgcgcttgggacttccaggcgaggttttcgggcgatcagaacagtaccgacaggtagcatcaccaagaaccgacccctattcagcagctcaactgcacaaccagtatggtccaatgaacatgaacatgggaatgaatatggcggctgctgccgcacatcaccaccatcaccatcaccatcccgtaccaagcttgctgaccaattgtgtccatagcggactcctgctgagcccacctcgctggttctag

SEQ ID NO: 247098 - DNA, 1404 bp, synthetic construct
  misc_feature 1..1404: note = Description of Artificial Sequence: Synthetic coding sequence
  source 1..1404: mol_type = other DNA
atgaccatgctactagatgggggtccccagtttccaggcctcggcgtgggctcctttggcgcaccacgccatcatgagatgccaaacagggagccagctggcatgggactgaacccttttggtgatagcactcatgcagccgctgcagccgctgccgctgcagctttcaaattatccccggctgcggcacacgatttgtcctctgggcagagcagcgcttttactccacagggctctggctatgccaatgctttgggccaccaccatcaccaccaccatcaccaccatcacacctcacaggtgccctcctatgggggtgcagcgtccgccgcatttaatagcacacgcgagtttcttttcagacagcgatcttcggggttatctgaggcagcatcaggtggaggtcagcatggactcttcgctgggagcgccagttccctgcatgcaccagccggtattcccgagccaccaagctacctgctgttccccggactgcatgagcaaggcgcaggtcatccaagccccacaggtcatgttgataacaatcaggtccacttaggactgaggggtgagctgttcggtcgggctgacccttatcgccctgtggcctcacctaggaccgatccttatgccgcaggtgcccagttccccaattatagccctatgaatatgaacatgggagtcaacgtggccgcacatcatgggccaggcgcttttttcaggtatatgaggcagcctatcaaacaagaactgtcatgtaagtggatcgatgaagcccagctcagccgaccaaaaaagtcctgcgataggactttttctaccatgcacgaactggtaactcacgtgacaatggaacatgtgggcggacccgaacaaaataaccatgtttgctattgggaggagtgcccccgagaaggaaaatcgttcaaagctaaatataaactggtgaatcacatccgggttcacactggtgagaaaccattcccatgccctttcccaggatgcggcaaaatttttgccaggtcggagaacttaaagatccacaaacgaacgcacacaggggagaagcccttcaagtgcgagtttgagggatgtgatcggcgattcgctaactcctcagatagaaaaaaacatatgcacgtgcataccagtgacaaaccctacatttgcaaagtgtgtgataaaagctacacccatccatcaagtctgagaaaacacatgaaagttcacgagtcgcaggggagcgattccagccctgcggctagcagtggttatgagtctagcactcccccagccatcgcatctgctaattctaaagacacgacaaagacgccctcagctgtccaaacatctacctcccataatcctgggcttccacccaatttcaatgagtggtatgtctag

SEQ ID NO: 247099 - DNA, 1374 bp, synthetic construct
  misc_feature 1..1374: note = Description of Artificial Sequence: Synthetic coding sequence
  source 1..1374: mol_type = other DNA
atgaccatgctgcttgacgggggaccacaattcccgggactgggggtaggatccttcggggctcctcgccaccacgagatgcctaatcgagagcccgctggcatgggactgaacccttttggtgacagcacacacgccgctgcagcggctgccgctgccgcagccttcaaactgtctccagctgccgcacatgatctgtcaagcgggcagtcatccgcattcactcctcagggctcagggtatgccaatgcactggggcaccaccaccatcaccatcaccatcaccaccacacctcccaggtgccatcttacgggggtgccgcatctgccgcttttaattccacaagagagtttcttttccgccaacgaagttctggactcagcgaggctgcctctgggggaggccagcatggactgtttgcgggatccgcatcctcactccatgccccagccggaattccagagcctcccagttatttgttgtttcctggcctgcatgagcagggcgctggacacccctcacccaccgggcacgtggacaataaccaggtccatctgggattaagaggggagctgttcggaagggccgacccatataggccagtagcgtctccgagaaccgatccttatgcagccggtgcgcaattcccaaactactcccctatgaacatgaacatgggggttaatgttgccgcacaccatggccctggcgcatttttccggtacatgcgacagcctataaagcaagagttatcatgcaaatggatcgatgaggctcagctaagcaggcctaagaagtcctgtgacagaactttttcaaccatgcacgagctggtgacacacgtgacaatggagcacgtggggggacctgagcaaaataatcacgtctgctactgggaagaatgtccacgggagggcaagtccttcaaagccaagtataagctggtcaatcatatccgcgtacacacgggggagaaaccctttccttgtccattccccggatgtggtaaaatatttgctcggagtgagaacttgaagatccataaacgcacacatacaggcgagaagccctttaaatgcgaatttgagggctgcgatcgccgttttgccaacagttccgataggaagaaacatatgcatgtgcatacatccgataagccatatatctgtaaagtttgtgataagtcctacactcacccttcctccctgcggaaacatatgaagtgctgtcctgcttggtaccccggtcagtcgctaattccagacgaagaacttgacaccgatgtcggcatgcaacagcctgctcttcacaacactacctaccccaaatgtcgggtgaacgcggaacccaccgtgcaagaaatgatctactag

SEQ ID NO: 247100 - DNA, 1005 bp, synthetic construct
  misc_feature 1..1005: note = Description of Artificial Sequence: Synthetic coding sequence
  source 1..1005: mol_type = other DNA
atgcgttacaaaacctctttggtgatgcgcaagcgactgcgcctgtatcgaaacaccttgaaagagagttcatcaagttccggtcaccatggtcctcaactaacagcagcttcgtcgcctagcgtttttcctggcttgcacgaagagcctccccaggcgtccccctccagacctctgaatggtctcctcagactggggcttcccggtgatatgtacgccaggcctgagcctttcccaccgggtccagcggctcgttccgacgcactggctgcggctgctgcactccacggctacggcggtatgaaccttaccgtgaatctggctgccccacatggccctggtgcatttttcaggtatatgagacaacctatcaagcaggaactcatatgtaagtggcttgctgccgacggtacggcaacaccctcactttgcagcaaaaccttctctacgatgcatgagctggtcacacatgtgactgtggagcacgtcgggggtccggaacaggcaaatcatatctgcttttgggaggagtgcccgaggcaggggaagcctttcaaagcgaaatacaagctcgtgaaccacatacgcgtccacaccggagagaaacccttcccctgccctttccccggttgcggcaaagtgtttgctaggagcgaaaacttaaaaatccacaaaaggactcatacaggcgagaagcctttccgctgtgagttcgaggggtgcgagcgtcgcttcgcaaactcttctgataggaagaagcatagccatgtccacaccagcgataagccttatacctgtaaggtaagaggctgtgataaatgctacacccacccatcttctttgagaaaacatatgaaggtgcacggaagatctccaccaccaagctctggatatgacagtgccactccaagcgcactggtttctccgtcatccgactgcggtcataaatcccaggttgcgagctccgccgctgtcgcagcgcgaacagccgacctcagtgagtag

SEQ ID NO: 247101 - DNA, 1119 bp, synthetic construct
  misc_feature 1..1119: note = Description of Artificial Sequence: Synthetic coding sequence
  source 1..1119: mol_type = other DNA
atgaacgggccttgtcagtccctgaggaaggctgagggactcttggaaggttgcacatccgcagtcacagtgtttcgcaagctgcctcttgactctaaagcgcaaagccagaaaatgcgatataaaaccagcttggtgatgaggaagaggctacgactgtatagaaacactttaaaagaatctagctcctcctcaggccaccacgggcctcagctgacggctgcgtcaagtccttccgtttttcccggacttcacgaggagcctccacaggcttccccctcaagacccttaaacggcttgctaagattgggcctccctggtgatatgtacgctagacccgagcctttcccccctggacctgctgcacgcagcgacgcgcttgcagcagcagctgcgctccacggctatgggggaatgaacttgaccgtcaatttagcagcccctcacggaccaggagcttttttccggtatatgcggcagccaattaagcaagaactgatttgcaaatggcttgcggctgacgggactgccacaccatccctctgctccaagactttctccaccatgcatgaactcgttacgcacgtgaccgtggagcatgtgggcggacccgaacaggctaatcacatctgtttctgggaggagtgtccgagacaagggaaacctttcaaggccaagtacaaactcgtgaatcacatccgggttcacactggggagaagccatttccctgtccctttcctggctgcgggaaagtcttcgctaggtctgaaaacctgaaaatccataagaggactcacaccggggaaaaacccttccggtgtgagttcgaggggtgtgagaggaggtttgccaactcaagtgacaggaagaaacattcccacgtacacacaagcgataaaccatacacttgtaaagtgagggggtgtgataagtgctacacccaccctagttccctccggaagcacatgaaggtacatggcagatcaccccctccttctagtggctatgattcagccactccgtccgccttggtgtctcccagctcagattgtggacacaagtctcaggtcgcatcgagcgctgcagttgcagccagaactgccgatctgagcgagtag

SEQ ID NO: 247102 - DNA, 690 bp, synthetic construct
  misc_feature 1..690: note = Description of Artificial Sequence: Synthetic coding sequence
  source 1..690: mol_type = other DNA
atgaggtacaagacctctttggtgatgagaaagcggttacggctgtaccggaacacactcaaggagagctcaagctcctccggacaccacggccctcagcttaccgcagcctccagtccatctgtgttccccggactgcacgaagagccaccacaggccagccctagccgtcccctcaatggccttctcaggctgggattaccaggagacatgtacgccaggcctgaaccctttccacccggaccagcggcacggtccgatgccctggccgctgcagcagcacttcatggctacggcggaatgaatctgacggtgaacctggctgccccacatgggccaggggcattctttagatacatgaggcaacccatcaagcaggaattaatttgtaagtggcttgctgccgatggtaccgcgaccccttcactttgttctaaaactttctctaccatgcacgagctggtgacacacgtcacagtggagcatgttgggggacctgaacaggctaatcacatttgtttttgggaggagtgtccacgccagggtaaacccttcaaagctaagtacaagctggtaaatcatatacgcgttcatacgggggaaaagccgtttccctgtccttttccaggctgtggcaaagttttcgcacgttccgaaaatctcaagatccacaaacgtacacacacctag

SEQ ID NO: 247103 - DNA, 207 bp, synthetic construct
  misc_feature 1..207: note = Description of Artificial Sequence: Synthetic coding sequence
  source 1..207: mol_type = other DNA
atgcgatacaaaacttccctggtaatgcgtaaacggctccgtttatatagaaatactctcaaggagagctcttcgtcctcaggccatcacggccctcagcttactgccgctagcagcccctccgtcttccctgggctgcacgaggagcctcctcaggcctctccttctcgcccactgaacggcctcttgcgcttagggctgccgtag

SEQ ID NO: 247104 - DNA, 1005 bp, synthetic construct
  misc_feature 1..1005: note = Description of Artificial Sequence: Synthetic coding sequence
  source 1..1005: mol_type = other DNA
atgcgatataaaacaagtctcgtaatgcggaagagactgcgcctttatcgcaacacgctgaaagagagctcttcatccagtggccaccatggtccacaactaactgctgccagttctccaagtgtatttcctggcctccacgaggaaccacctcaggctagcccgagccggccactcaacgggctgcttcggttggggcttcccggtgatatgtatgccagacccgagccattcccacctggcccagctgccaggtcagatgccctggctgctgctgctgcactgcatggctatggtgggatgaatctcaccgttaacctggccgctccacacgggcctggcgctttctttcgctacatgcgacagcccatcaagcaggaactgatctgcaaatggctagctgctgatggaaccgcaacaccatcgctctgcagcaagacgttttccaccatgcacgaattggtcacccatgtgactgttgaacacgtgggaggcccagagcaggcgaaccatatctgcttctgggaggagtgtcctaggcagggcaaacctttcaaggctaagtataaactagtcaaccacatcagagtacacacaggggaaaagcctttcccatgcccttttcctgggtgcgggaaggtgttcgctaggtctgaaaacctaaaaatccacaagagaacgcacaccggagagaaaccattccgatgcgagttcgaaggatgtgaaaggcgctttgcaaactctagcgacaggaaaaaacacagccacgtccatacgagcgacaagccctacacctgcaaagtcagaggctgtgataagtgttatacccatccttccagtttgcgaaagcatatgaaagtgcacggcaggagcccgccaccaagttcaggttatgactccgctacgccctcggccttggtgagtcctagtagcgactgtggacacaaatcacaggtggcgtcttcagccgctgtagctgccaggaccgccgatttgagcgaatag

SEQ ID NO: 247105 - DNA, 1005 bp, synthetic construct
  misc_feature 1..1005: note = Description of Artificial Sequence: Synthetic coding sequence
  source 1..1005: mol_type = other DNA
atgcgatataaaacttccctggtcatgagaaaacggctgcggttgtaccgcaatactctcaaggagtccagtagtagttccggccatcacggaccccagctgacagcagccagcagcccctcggtcttccccggactgcatgaagagcccccacaggctagcccctcccgcccactgaacggcttactccgactggggctgcctggcgacatgtacgcgaggccagagccctttccacctgggccagctgctaggagtgacgccttagcggcagctgcagcacttcacggctacggcggaatgaacttgaccgtgaacctggcagcccctcatggccctggggcattttttcgatatatgcggcagccaattaagcaagagttgatttgcaagtggcttgccgctgacggcacagccacccctagcctgtgcagtaagacttttagtacaatgcatgagctggtcacgcacgttaccgttgagcatgtgggcggtccagaacaggccaaccacatctgtttttgggaagaatgtccaagacaagggaaacccttcaaagctaaatataagctcgtgaaccatataagagtgcacacaggcgagaaaccttttccatgcccattccctggctgtggtaaagtgtttgcacggagcgagaacctgaagatacacaaacggacgcacacgggcgaaaaaccatttcgatgcgagttcgaggggtgcgaacgaagattcgccaacagcagtgatcggaaaaagcactcccatgtccatactagcgataagccctacacatgcaaggtgaggggctgtgacaaatgctatacccatccctcctccctaagaaaacacatgaaggtgcatggacgcagccctcctccctcttcaggatacgactcagcaacaccctctgcacttgtctcaccatcttctgactgcggccacaagtctcaggtcgcatcaagtgccgctgtggccgctaggactgctgatctttcagaatag

SEQ ID NO: 247106 - DNA, 234 bp, synthetic construct
  misc_feature 1..234: note = Description of Artificial Sequence: Synthetic coding sequence
  source 1..234: mol_type = other DNA
atgcgttataagacttctcttgtcatgcgtaaaaggttgcgcctgtaccgcaatacactgaaagagagttcctcatcaagcggtcatcacggccctcagctaacagccgcaagttccccctcagtgttccccggtctgcacgaagaacctccccaagcctcgccatccagacctttaaatggattattgcgcctcggcctgcctggagacatgtatgcccgacccgagccttag

SEQ ID NO: 247107 - DNA, 1155 bp, synthetic construct
  misc_feature 1..1155: note = Description of Artificial Sequence: Synthetic coding sequence
  source 1..1155: mol_type = other DNA
atgcccccattctgcagaaatgccaagctgggtttgctgtcctttctgatttgcgccggtcggagcctactgcctttgggcaagaacgctttctggttggaaagaatcgaaaacaataatacgctctgggaaaaagctcagtcccagaagatgagatacaaaacaagcctggtgatgcgaaaaaggctacgtctgtatcgcaacaccctgaaagaatcatccagtagcagtggacaccacgggccacagctgacagctgcctcttctcctagcgtgttccctgggctgcacgaagaaccacctcaagcatcacctagtaggccactgaatggcttactgagactaggcttacccggtgacatgtacgccagacctgagccatttccgccaggccctgccgcacgctcagacgccctcgccgcagccgctgcactccatggctatggagggatgaatttgacagtgaatctggccgctcctcacggccctggagcgtttttcagatacatgaggcaacctattaagcaggagttgatttgtaagtggctggctgccgacggcactgctaccccgtcgctatgctccaagacatttagcactatgcacgagcttgtgacccacgtgactgtggagcacgtgggtgggcctgagcaggctaatcacatctgtttctgggaagaatgccctcgtcagggcaaacccttcaaagccaagtataagctggtaaaccacatcagagtgcacaccggcgagaaaccctttccctgtcccttcccaggttgtgggaaagtgttcgcacgctcagagaatttgaaaatccataaacgaacacacacaggtgaaaaacccttcagatgtgaattcgagggatgcgagcgacggtttgcaaatagttctgatcgcaaaaagcatagtcacgtgcatacatcagataagccctacacttgtaaggtgcgtggctgcgacaagtgctacacacacccctcttccctccgtaagcatatgaaagtgcacgggagatccccccctccttcctccggctatgatagtgccacgccaagcgccctggtgtctccaagttctgattgtggccataagtctcaagtcgcctcgtctgccgctgtggccgcacgcacagccgatctgtccgagtag

SEQ ID NO: 247108 - DNA, 684 bp, synthetic construct
  misc_feature 1..684: note = Description of Artificial Sequence: Synthetic coding sequence
  source 1..684: mol_type = other DNA
atgggcggaaaacaaagcactgctgctcgaagccgcggaccctttcctggcgtcagtaccgacgatagcgctgtgcccccacccggtggcgctccccacttcggtcattatcgcaccgggggaggcgctatgggtttgcgaagtagatctgtttccagcgtggccggtatggggatggatccctcgaccgcaggaggcgtgcccttcggcctctatactcctgctagtcgcggaactggggacagcgagagggctcccggaggtggaggctcagcatctgattctacatacgcgcacggaaatggataccaggaaaccggcggtggccaccatcgggatggcatgttatatcttgggtcaagagcctccctggcagacgccctccctttacatattgcgcctcgctggttttcttctcattctggtttcaaatgccccatctgcagcaagtccgtcgcctcagacgagatggagatgcattttattatgtgcctgtcaaaacctcgattaagttataacgatgacgtgctgacaaaagacgccggagagtgcgttatctgtctggaggagttattgcagggcgacacgatcgccagactaccctgcctgtgcatttaccataaatcctgtattgatagctggtttgaagttaacaggtcttgtcccgaacatcctgccgattag

SEQ ID NO: 247109 - DNA, 543 bp, synthetic construct
  misc_feature 1..543: note = Description of Artificial Sequence: Synthetic coding sequence
  source 1..543: mol_type = other DNA
cagcggggtgttcctgcagccggtaccccatcttcgccccgactgcttgttagccgcagcctggggggtgcagtgggatccgttgcctcaggcgctagggccgcacaaagcccattttccatcccaaactcctcctccgggccttacggcagtcaagacagtgtccattccagcccagaggacggcggagggggtagagacaggcctgtaggaggatcccccggaggcccaagacttgtaatcggcagtctaccagcccacttgtcgcctcatatgttcggaggatttaaatgtccagtctgttccaaattcgtgagcagcgacgagatggacctgcacctggtgatgtgcctcacaaaaccaagaattacatacaacgaggacgtgctctcaaaagatgcaggcgagtgcgcgatctgtctggaggagctgcagcagggagatactatcgctcggttaccttgcctgtgtatttaccacaagggttgcattgacgaatggtttgaggtgaaccgctcttgccccgagcacccttcagactag

SEQ ID NO: 247110 - DNA, 729 bp, synthetic construct
  misc_feature 1..729: note = Description of Artificial Sequence: Synthetic coding sequence
  source 1..729: mol_type = other DNA
atgggtgcaaagcagtctgggccagccgctgccaatggacgcacccgcgcatacagtggaagtgatctgccttccagctcaagcggaggagcaaacggcacagcgggaggcggaggaggagctagagctgccgctgccggtcggtttcctgctcaggtcccatctgcccatcaaccttccgcttccggaggcgctgctgcagccgctgctgcccctgccgctccagcagcacccaggtcaagatctctgggtggggctgtcgggtctgtcgcgagcggcgctagggctgcccagagtcctttcagtatccctaatagtagctccggcccttatggctcccaggactctgtgcattcctcacctgaggatggtgggggaggtagagatcggcctgtaggtggctcacccggtgggcctagactagtgatagggtcactgccagcccacttgtcacctcacatgttcgggggtttcaaatgcccagtctgttcaaagttcgtgagctcagatgagatggatctacatcttgtgatgtgcctcactaagccacggataacatataatgaggacgttctttcaaaggatgccggtgagtgcgccatttgcttggaagaactccaacagggcgacactatcgcacgactgccctgcctctgtatctaccacaagggctgtatcgacgagtggtttgaggtgaataggtcttgtcccgagcacccctcagactag

SEQ ID NO: 247111 - DNA, 2511 bp, synthetic construct
  misc_feature 1..2511: note = Description of Artificial Sequence: Synthetic coding sequence
  source 1..2511: mol_type = other DNA
atgcaccccctcggcctttgcaataacaacgacgaagaggacctctacgaatacggctgggtgggggttgtgaagcttgagcagcctgaattagatccaaaaccatgcctgacagtacttggaaaagctaaacgggcagtccagcgaggagccacggccgtgatcttcgatgtttccgaaaaccctgaagccattgatcagttgaaccagggcagcgaggatcctctgaagagacccgtcgtctacgttaaaggggcagacgccatcaaactcatgaacatcgtgaataagcagaaggtggccagggcacgcattcaacaccggcctccaaggcagccaacagaatacttcgatatgggcatatttctggcattcttcgtagtggtctccctagtctgcctcattttgctggtgaagataaagttgaaacagaggagatcacaaaattccatgaaccggctggctgtgcaggctctggagaagatggagaccagaaaattcaacagtaaatcaaaaggtcgcagggagggctcctgcggcgctcttgatactctgtcctcatccagtacatcagactgcgccatatgcttagaaaagtacatcgacggggaggagctgcgcgtgatcccatgcactcatcgtttccatcgaaagtgcgtcgatccctggctcctccaacatcacacatgcccacactgtcggcataatatcatagagcaaaagggaaatccctctgcagtctgtgtcgagacatctaatctctcccgtggacgccaacagcgggtgaccttgcctgtccactacccgggtcgggttcatcggactaatgcaatccctgcttatccaacgcgtaccagcatggattcccacgggaatccagtgacactgttaactatggatcggcacggcgagcagagcctgtatagcccacagacacctgcctatataaggtcctatccccctttacatctggaccactcactggccgctcaccgatgcggcctggagcatagggcttattctccagctcatccttttagaagacccaaactgtccggaagaagtttcagcaaagccgcttgtttttcacagtacgaaaccatgtaccagcactattactttcaaggtctcagctaccccgaacaggagggccagtcccctccatctctggcaccccgaggaccggctagagcgttccccccatccggatcaggctctctgctgtttccaaccgtcgtgcatgtcgctcccccatctcacttggagtccggctccacaagtagcttttcctgttaccacggacatcgcagcgtctgctctggctacctggctgattgcccaggctctgattccagtagttcatcatcttcaggccagtgccactgcagctcaagcgattccgtagtggattgcactgaagtcagcaaccagggggtctacggtagttgcagcacgtttagaagctcccttagctcagactacgatccatttatttacagatcgaggtccccctgcagagcatcagaagctgggggtagcggctcatctggaaggggcccagcgctgtgttttgaaggcagtccacctcctgaggagctgcccgcagtacattcacatggggcagggaggggcgaaccgtggccagggccagccagcccttcaggcgatcaagtttcaacgtgctccctagagatgaattactcgagcaatagtagcctcgaacaccgcggtccaaattcatctacgtcggaggtgggactggaagcatcgccgggtgccgcacccgacttaagacggacctggaagggagggcacgaacttccatcttgtgcttgttgctgtgagccgcaaccaagtcccgcagggccaagcgccggtgccgcaggcagttcaaccctgtttctcggaccacacctctacgaagggtccgggcctgcaggtggagagccccagagcggctcatcccagggactttatggactccacccagatcatctccccaggaccgatggcgtcaagtacgagggtctgccttgctgcttttatgaggaaaagcaggtggctaggggtggaggaggcggatcgggttgctacacagaggattattccgtgtctgttcagtacactctgacagaagaacctccgccaggctgttatcctggggcaagggacctcagccagaggatccccataattcctgaggatgtcgattgcgacttggggttaccctccgactgccagggtacgcatagcctaggcagttggggtggcacccgcggacccgacaccccgagaccacataggggtcttggggctacgcgtgaggaagaacgtgcgctgtgctgtcaagccagagccttgctcaggcctggatgcccgcctgaggaggcgggagccgtgcgcgcaaactttccaagtgccctgcaggacacccaggaatccagtacaacagctacagaagccgctggacccagatctcactctgctgactcttcgagccctggtgcctag

SEQ ID NO: 247112 - DNA, 2511 bp, synthetic construct
  misc_feature 1..2511: note = Description of Artificial Sequence: Synthetic coding sequence
  source 1..2511: mol_type = other DNA
atgcacccattaggactttgcaacaataatgacgaagaggacctatacgagtatggttgggtgggagtagtcaagctggaacagcccgagttggatccaaagccctgtctcacggtgctcggaaaggccaagagagctgtgcagaggggagcaactgctgtaatctttgacgtgtctgagaatcccgaggcaatagaccaattgaatcagggtagcgaagacccactaaagaggcctgtggtatacgtcaaaggcgctgacgccataaagctgatgaacatcgtcaacaaacagaaagttgctcgggctagaattcaacaccggccaccacgccagccaaccgagtatttcgacatgggaatcttccttgccttttttgttgtggtctccctggtgtgtctgatcctgctcgtgaaaattaagctgaaacagcgtaggtcacaaaatagcatgaatcgactcgccgtgcaggccttggaaaagatggagacaaggaaattcaacagtaaatctaagggaagaagggaaggctcttgtggtgcactggacactctgtcgtcaagcagcactagcgactgcgctatctgcctcgagaagtatatcgacggggaagagctgagagtaattccctgcacacacaggttccacaggaagtgcgtagacccttggctgctgcagcaccatacttgccctcattgtaggcacaatataatcgagcagaaggggaacccatcggccgtgtgcgttgagaccagtaacctgagtcggggacgacagcagagggttaccctgccggtgcattaccctgggagagtgcaccgcacaaacgcaatcccagcctatcctactaggacaagcatggatagccatggaaatcctgttacgttactgaccatggaccgtcatggtgaacagtctttgtatagtccgcagactcctgcatatatacgatcataccccccattgcatctagaccactcactggccgctcacaggtgcgggttagagcaccgggcttactcccctgcccacccctttcgccgacccaaacttagcggcaggtccttctcgaaggcggcatgtttcagccaatatgaaactatgtatcagcattactattttcagggcctgagctaccccgagcaggaagggcagtctcctccaagcctggctccacgtggcccagctagggcgtttcctcctagcgggagcggttctttgctgttccccacggtggtccacgttgcacccccaagccacctggaatcggggtccacttcgagttttagttgttatcatggtcacagaagcgtctgcagcggatatctggcagattgtcccggaagtgatagttcctcttcaagcagttctggtcagtgccactgctctagttccgatagcgtagtggattgtaccgaagtgtccaaccagggggtctacggctcatgctccactttccgaagcagtttgagttccgactatgacccattcatctatcgatcacgttctccttgcagagcgtccgaggctggcggatccggttcaagcggacggggtcccgctttgtgcttcgagggctcccccccacccgaggagctccccgctgtgcactcacatggcgcaggaagaggggagccctggccgggtcccgcaagcccctctggagaccaggtgtccacctgctctcttgaaatgaattactcctcaaactcttctctcgaacaccgtggacctaattcaagcactagcgaggtgggactcgaagccagccccggtgctgccccagacctgcgtcgtacatggaagggaggacatgaactgccctcatgcgcgtgctgctgcgaacctcaaccctcaccagctgggccttccgcaggcgcagctggatcatcgacgctcttcctagggccacacctctatgagggaagtggacctgccggaggcgagccccaatctggctcttcacaaggattgtatggcctgcacccagaccatctacccaggaccgatggcgtaaagtatgaggggttaccgtgttgtttctacgaggaaaagcaggtggccagaggcggaggaggaggaagcggctgctacaccgaagactacagcgtatcagtgcagtacactctgacagaggaacctccgcctggatgctacccgggagcgcgtgaccttagtcaacgtatccctatcatacccgaggatgttgactgcgacctgggacttcccagtgattgccaaggaacccacagtctgggttcttgggggggtacgagaggacctgataccccacgccctcaccggggactgggtgcaacccgggaagaagagcgcgcactgtgttgccaggctcgggctctgctccgtcctgggtgtcctcctgaggaggccggagcagtgcgagctaatttcccatccgctctccaggatactcaagagagtagcaccaccgctaccgaagccgctggccctagaagccattccgccgactcttcaagtcccggagcatag

SEQ ID NO: 247113 - DNA, 2511 bp, synthetic construct
  misc_feature 1..2511: note = Description of Artificial Sequence: Synthetic coding sequence
  source 1..2511: mol_type = other DNA
atgcatccactggggctgtgcaataacaacgacgaagaagacttgtatgaatatggctgggtcggtgttgtaaagcttgaacaacctgaactcgaccccaaaccgtgcctaactgtgctcgggaaagcaaaacgggcagtgcagagaggtgctacagctgtcattttcgatgtttctgagaaccctgaggccattgatcagctgaaccagggctcagaagatcctctgaagagacctgttgtgtatgtgaaaggagccgatgccatcaagttaatgaatattgttaacaaacagaaagtcgctagagcacggattcaacacagacctcccaggcaacctacggagtatttcgatatgggaattttcttagccttctttgtcgtagtatccctggtatgtcttatcctactggtgaaaatcaaactcaaacaaaggcgctctcagaatagcatgaaccgcctggcagtacaggcactggagaagatggaaacccggaaatttaatagcaagtctaagggaaggcgagagggtagttgtggcgcactggacaccctctcttcctcctccacctccgattgtgcaatctgcctggaaaaatacattgacggtgaagagcttcgagtgattccatgcacacaccgcttccaccggaaatgtgtggacccctggctactgcagcatcatacctgcccccactgcagacacaatatcatcgaacagaaggggaacccctccgctgtatgcgtagaaacttctaacttgtctagaggacggcagcagcgtgtcacactgcccgtccactatcccggtagggttcacaggaccaacgccatacctgcatacccaacaagaacctctatggacagccacggcaaccctgtgactttgcttaccatggacagacacggtgaacagagcctctacagcccacagacgcctgcctacattcgcagctacccacctctccacctggatcatagccttgcggcacatcgttgcggccttgaacaccgcgcatacagtcctgctcatccttttcggagaccgaaattgtctggaagatcctttagcaaggcagcctgttttagccagtatgagactatgtatcagcattactatttccagggactctcctatccagagcaggaagggcagagtccccctagtctggcccctaggggtcctgctagagcttttccgccatctgggtccgggtccctcctctttccaacagtcgtgcacgtcgcacccccttcccatctagaaagcggctccaccagttcatttagctgctatcacggccaccgtagtgtttgttctggatatctcgcggactgtcccggaagcgactcgtcatccagcagcagtagcggacagtgccactgttctagctcggacagtgtcgtggattgtaccgaggtgtccaatcaaggcgtgtatggctcttgtagcacctttcggtcctcattgagttctgactatgacccctttatctaccgctcacgaagcccgtgtcgcgcatctgaggcaggaggttcaggtagctccggcagaggtcccgctttatgcttcgaaggatcaccccctcccgaggagctcccagcggtgcacagccatggagcaggaaggggcgaaccatggcctgggccagcaagtccatcaggcgatcaggtgtcaacctgtagcctggaaatgaattatagcagcaattcttcgctggagcatcggggtccaaattcctccacttccgaggtggggcttgaagcttccccgggtgcagcccctgaccttaggcgcacatggaaaggcggacacgaactccctagctgcgcatgctgttgtgaaccacagccctcacccgctggcccaagtgcaggcgcagctggaagctcaacgctttttctcggcccacatctgtatgagggctccgggccagctggaggggagcctcagagcggatcgtctcaagggttatatggtttacatccagatcacctgcctaggaccgacggtgtcaagtacgaaggactgccttgttgcttttacgaagaaaaacaagtcgctagaggcggagggggtggctctggttgctacacagaagattatagtgtgtctgtccagtataccctgacagaagaacctccccctggatgctatccgggagcaagagacttatcacagaggataccaatcattcctgaggatgtcgattgcgacttaggattaccaagcgattgtcaggggacacattccctgggttcctggggcggtactcgcggacccgacactcccaggccacaccgcggtctcggggcaacacgggaggaagagagggccctctgttgtcaggctagagctttactgcggccaggatgtccacccgaggaagcgggtgccgtgcgcgctaactttccttcggctctccaagacacacaggaatcatctaccaccgccacagaggcagctgggcctcgaagtcattccgcagattcctctagccctggcgcttag

SEQ ID NO: 247114 - DNA, 1932 bp, synthetic construct
  misc_feature 1..1932: note = Description of Artificial Sequence: Synthetic coding sequence
  source 1..1932: mol_type = other DNA
gttccctcagtatggaggtctactctgatggaaaggtcatgtggctcttcacccgtcctgacaggctttacaggatctgcttggacgcctctcctgcagcatcatacctgccctcactgcagacacaacattattgagcaaaaaggaaacccttccgctgtatgtgtggagacatccaacctgtctagaggaaggcagcagcgggtgacactccctgtgcactacccgggacgggttcaccggactaacgcgattcctgcttatccgactagaacatctatggacagtcacggtaatcccgtaacgcttctgacgatggatcgacacggcgagcaatctctctattctcctcagacacccgcatatattagaagttatcccccactacatcttgaccactcactagccgctcacaggtgtggcctggaacacagagcctacagcccagctcacccctttcgacgcccaaagttgagtggaaggtctttcagtaaggccgcttgcttctctcagtatgagactatgtaccagcattattacttccaggggttgtcataccccgagcaggagggacagtctcccccaagcctggctcctcggggtccggctcgggcttttccgccttcgggtagtgggagccttttgtttcccactgtcgtgcacgtcgcgcctccgtctcatctagagagtgggtccacctctagttttagctgttatcatgggcaccggagcgtatgttcaggatatcttgccgattgtcctggtagtgactcctcctcaagttctagcagtggacagtgccattgcagttcttctgattccgtggtcgactgcacagaagtgtcaaatcagggggtctacggctcttgtagcacgttccgctcttccctatcatctgattatgaccctttcatctatcgctcccggtccccttgtagagccagcgaggccggtggcagtggatcctccggcaggggtccagctctatgcttcgaggggtctccccctcccgaagaactacctgccgtgcatagtcacggtgccggaaggggcgagccgtggcctggacctgctagtcctagcggcgatcaagtatccacctgtagcctggagatgaactactcttcgaatagctcattagagcaccgtggtccaaactcctccacttccgaagtcgggttggaggctagccctggcgctgccccagatctgaggcggacctggaaagggggacacgaattaccaagctgtgcctgctgttgtgagccacagccctcgcccgcaggaccatccgcaggagccgcagggagcagcacactgtttctggggccacatctgtacgagggcagcgggccagctggaggtgagccccagtcaggctctagtcaaggtctttatgggcttcacccagaccacctgcccaggactgacggagtcaagtatgagggcctgccctgttgtttctatgaggaaaagcaagtcgccaggggcggaggaggtgggtctggttgttacacggaagattacagcgtatccgtgcagtatacacttaccgaggagccacccccaggctgttatccaggagccagagatctgagtcagagaatcccgatcattcccgaagacgtggattgcgatttgggtctgccttctgactgccagggcacgcactcactagggagttgggggggaacaaggggccctgatacacctaggccacacaggggtctaggggctacgcgtgaagaggaacgcgcactgtgctgtcaagctcgagccctccttcggcctggctgtccacctgaggaagctggcgcagttcgcgcaaattttccttccgccctccaggacacacaggagtcgagcactacagcgactgaggccgcaggcccaaggagccactccgccgattccagctctcccggtgcctag

SEQ ID NO: 247115 - DNA, 2811 bp, synthetic construct
  misc_feature 1..2811: note = Description of Artificial Sequence: Synthetic coding sequence
  source 1..2811: mol_type = other DNA
atgcggccacggagtggaggtagacccggtgccactggtaggcgcaggcggaggctgagaagacggccacgcggactgcgatgctcccgtctgcccccaccgccaccattaccattgctgctaggacttctgctagccgcagctggtccgggtgctgctcgcgctaaggaaaccgcattcgtagaggtcgtgctattcgaaagcagcccctctggcgactacactacctatacgactggcctgactggtaggttctcccgagcaggggctactctgtccgctgagggtgagatagtacagatgcatcctttgggcctgtgtaacaacaatgacgaagaagacctgtacgagtacggctgggtcggagtcgtaaagctcgaacaacctgagctcgacccaaagccctgcctcacagtgctgggtaaagccaagagggctgtccaacgcggtgccaccgccgtaattttcgacgtaagcgagaatccagaagcaatcgaccagctgaaccaaggctctgaggaccctctgaagcgccctgttgtctatgtgaaaggggctgacgccataaagctgatgaatatcgtgaacaaacagaaagtggccagagcccgtatccagcacaggcctccaagacagcccactgaatacttcgacatggggatattcctggcgttctttgtagtcgttagcttggtatgtctgatcctcctggtgaaaattaagttaaagcagcgcaggagccagaactcaatgaaccgactggcggtccaggctctcgagaagatggagacgcgtaagttcaatagcaagtccaagggtcgccgtgagggtagctgcggtgccttggacacgctctcctcgtcatcaacttccgattgcgctatttgcctggagaagtatatcgacggcgaggaattgagagttatcccctgtacccatcgcttccacaggaaatgcgtggacccctggcttcttcagcaccacacatgccctcactgcagacataacattatagagcagaaagggaatccttctgcagtatgcgtagagacttctaacctgagccggggtcgacagcagagggtcacactgcctgtgcattaccctggcagagtacataggaccaacgcgatccctgcgtacccaacgaggactagcatggatagtcatgggaacccagtcaccctcttaacaatggatcggcatggcgagcagtcactctattctccgcagaccccagcctatattcgttcctatccacccctgcacctcgatcactctctggccgcacaccggtgtggcttggaacatagagcctattcaccggcacatccctttagaaggcccaaacttagtggccgaagcttcagcaaagcggcatgtttctctcagtacgaaaccatgtaccagcactactactttcagggtctgtcttaccccgagcaggaagggcagtctcccccttccttggccccacggggtcctgctagagcctttcccccaagtggttccggtagtctcctcttccctacagtggtccatgtcgccccaccctcccacctggaatcagggtctacaagcagcttctcatgctaccatggacaccgctctgtctgtagtggatatctcgcagactgcccaggctccgattcatcttctagttcctcaagcggccagtgtcattgcagctcttccgattcggtcgttgattgcaccgaggtgtcaaaccagggggtgtacgggtcttgctccacgtttaggtcgagcctaagtagcgattacgatccattcatctacaggtcgcgcagtccctgcagagcgagtgaggcgggaggctcaggaagctccggacgtggcccagccctttgttttgaaggaagcccccctccagaggaactccctgccgtccattcgcacggggcagggaggggagagccatggcccggacccgcatcaccatcaggggatcaggtgtcaacctgcagcttagaaatgaattacagtagtaactcaagcctggaacaccgcggaccaaatagctccacttccgaggtgggtcttgaagctagcccaggggctgcaccggacctgagaagaacctggaagggaggccacgagctcccttcctgtgcgtgttgttgcgagccacagccgtcccctgccggaccctccgccggtgcagccggatcttcaactctcttcctgggcccacacctctatgaaggaagtggacctgccggaggtgagccgcagagcggctctagtcaggggctctatgggctccatcccgatcatctgccgaggaccgacggcgtgaaatatgaggggctgccttgttgcttctacgaggaaaagcaggtggcccgtggcggtggaggcggaagcggttgctacactgaggattacagtgtcagtgtgcagtacaccctgacggaggaaccaccaccaggatgctatcccggagccagagatttgagccagcggatccctatcattcccgaggacgtcgactgcgacttaggcctgccgtccgattgccaaggcacgcactctcttggttcttgggggggaacaagaggccctgatactcccaggccccataggggcctgggtgctacgagggaagaggagagggcactctgctgtcaggcccgagcgctgttgagacccggttgcccgccagaagaagcaggcgcagtacgagccaatttcccttcagcactccaagacactcaggaaagttctacaacagccactgaagccgcaggcccaagaagtcacagcgcagacagcagctccccaggcgcttag

SEQ ID NO: 247116 - DNA, 339 bp, synthetic construct
  misc_feature 1..339: note = Description of Artificial Sequence: Synthetic coding sequence
  source 1..339: mol_type = other DNA
atgtcttaccccgttacgtcccagcctcaatgtgcaaccactagttgctaccagacccagctgtccgattggcacacaggcctgacagactgctgcaacgacatgcctgtttgtttgtgcgggacattcgcgcctttatgtctggcatgtcggatctccgacgattttggcgagtgttgttgtgcgccatacctgcccggagggctccatagcattagaactggcatgcgcgagcgctaccatatacagggttctgtgggccacgattgggctgccctgacattctgtctgccatgtgcgttatgtcagatggctcgggagctcaagatccgggaatag

SEQ ID NO: 247117 - DNA, 1440 bp, synthetic construct
  misc_feature 1..1440: note = Description of Artificial Sequence: Synthetic coding sequence
  source 1..1440: mol_type = other DNA
atggccgcattagaaaagatgacgttccctaaaaagatgacattccccgaaaaacccagccacaagaaatatagagccgctctaaaaaaggagaagagaaaaaaacggcgtcaggaactggcacgtcttagagacagtggactgagccaggaggaagaagaggacacttttattgaagaacagcaactggaagaggagaagttactggagcgggaacgcgaacggctccacgaagagtggctgctccgggagcaaaaggcacaggaggaatttagaatcaaaaaggaaaaggaagaagccgctaaaaagtggttggaggagcaggaacgtaagctcaaagagcagtggaaggagcaacagcgcaaggagcgagaagaggaggaacagaaacaacaggagaagaaagaaaaggaggaggccgtacaaaaaatgctcgaccaggcagagaacgacctggagaactcgactacatggcagaaccctgagcctccggtggatttccgggtaatggagaaggacagagctaattgtcctttttactctaagaccggcgcatgccgctttggcgaccggtgctcccgtaagcataacttcccaactagctcccccacccttttgataaaaagcatgttcaccacgtttgggatggaacagtgcagacgggacgattacgatcccgacgcgtcactagaatattccgaagaggaaacatatcagcagtttcttgatttctacgaggacgtgctgcctgaatttaaaaacgtgggaaaagtcattcaattcaaagtctcctgcaacctggagccgcatcttcggggaaacgtgtacgtccaatatcaatccgaagaagagtgtcaggccgctctctctctgttcaatggtaggtggtacgctggccgtcagctgcagtgcgagttttgccctgtgactcggtggaaaatggcaatttgcggcctgttcgagattcaacagtgccctcgagggaaacactgtaactttctccatgtattcagaaaccccaacaatgagttttgggaggccaacagggatatttacctgtcttccgatcagacaggtagcagctttggaaaaaattcagagcggagagagaaaatgggtcatcacgaccactattattctcgccagcgcggtcgccgtaaccccagccctgatcatacgtacaagcgcaacggcgaatctgaacgtaagaaaagcagccataggggcaaaaagtcgcataagaggacttccaaatccagagaaaggcataattccccttcaagaggccgtaaccgtcaccggtcctgggaccagggacgacgctcgcaatcccggcgtagccatcggagtaggtcgcagtctagctctaggtgtcgatccagggggagaaggaagagcggaaaccgcgaccgaacagtccagagtccacagtcaaagtag

SEQ ID NO: 247118 - DNA, 1449 bp, synthetic construct
  misc_feature 1..1449: note = Description of Artificial Sequence: Synthetic coding sequence
  source 1..1449: mol_type = other DNA
atggcggctcccgaaaagatgaccttccctgaaaagccatcccacaagaaatatcgagccgctctgaaaaaggagaaaagaaagaagcggcgacaggagctggcccgactgagagatagcggactgtctcagaaggaggaagaggaggatacttttattgaggaacagcaacttgaggaagagaagctgttagagcgcgaacggcagcggttgcatgaagagtggctgctccgcgagcagaaggcccaggaagagtttagaattaagaaggagaaggaggaggccgctaagaaacgacaggaggaacaggagcgaaaactgaaggaacagtgggaagagcagcagagaaaagaacgggaagaagaggagcagaagaggcaggagaagaaagaaaaggaggaggcgttacagaaaatgttggaccaagctgagaacgagctggagaacgggactacctggcaaaaccctgagccccctgtggatttccgcgttatggagaaagacagagccaattgtcctttctactccaaaaccggcgcatgccgcttcggtgacagatgttcacgcaagcataatttcccaacctcttctcctacgctgctgatcaaatcgatgttcactactttcgggatggagcaatgtcgtcgggatgactatgaccctgatgccagtctggagtatagcgaggaggaaacctaccagcaatttttagacttctatgaagacgtcctgccagaatttaagaatgttggcaaagtcattcagttcaaggttagttgtaatctcgaaccacatttgcgtggcaatgtgtacgttcagtaccagtctgaagaggagtgccaggctgcgttgagcctgttcaacggcaggtggtacgccggtaggcaactccaatgtgaattttgccctgttacacgctggaaaatggcaatctgcgggcttttcgagattcagcagtgcccaaggggaaagcattgcaacttcctgcacgtctttcgcaaccctaataacgagttctgggaagcgaatagagacatttacctctcaccagatcgcacgggtagttcctttggcaagaactctgagcgtcgggagcggatgggacatcacgatgattactattcacgactgcgtgggaggcgaaatccttccccggatcactcctacaagaggaacggcgagagcgagagaaaaagttctcgccacagaggtaaaaagagccataaacgtacctcaaagtcccgggaacgccacaatagtagatctcgcggtagaaatcgagaccgatctagagatcgcagtcggggacgcggaagcaggtcccgctctcgcagtagatcgcggaggagcaggcgcagtaggtcccaatcttcgagtcggtcaaggagtagaggccgtcgtcgcagtggaaacagggaccggacagtgcagagccccaaatccaagtag

SEQ ID NO: 247119 - DNA, 444 bp, synthetic construct
  misc_feature 1..444: note = Description of Artificial Sequence: Synthetic coding sequence
  source 1..444: mol_type = other DNA
atggctgcacctgaaaagatgacattcccagagaagccttcccataagaaatacagagctgctctgaagaaagagaagaggaaaaaacgtaggcaggaattggcacgcctcagagactccggcttgagtcagaaagaggaggaagaggacacattcattgaagaacagcagctcgaggaagaaaagttgttagaacgggagagattggaatgttccggcgtgatttccgcccatagaaatctgcaccttccgggatcgcacgatagccctgcatctgcatctagggtagccggaataaccgggacacatagacacactcagctaatctttttctgcacgtttagcagagatggcgtaagtccatgctggcctgggtggtctcggtcgctggatctcatgatatgtccgcctaggccccacaaggtgctgagactgcaggtctag

SEQ ID NO: 247120 - DNA, 3438 bp, synthetic construct
  misc_feature 1..3438: note = Description of Artificial Sequence: Synthetic coding sequence
  source 1..3438: mol_type = other DNA
atgtgtaagtgttgcaatctgttcagtcccaatcagagtgaactgttgtcacacgtctccgaaaagcacatggaggagggagtgaatgtggatgaaatcattattccgctgcgcccactctcgacacctgagcctcccaatagctctaaaacgggggacgaatttcttgtcatgaagaggaagcggggtcgccctaagggctccacaaagaagtcgagcacggaagaggaactggccgagaatatcgtctcccccactgaggactcgccactggcgccagaagaaggcaactccctgccgccttcctcattggagtgtagcaaatgctgccgaaagttctcaaacactcgacagctccgtaagcatatatgcatcatcgttctcaacctcggagaagaagaaggcgaagcagggaacgagtctgatttggaattggagaagaagtgtaaggaggacgaccgtgagaaggctagcaaacgcccacggagccagaaaacggagaaggtgcagaagatttcaggtaaggaggctagacagcttagcggagccaagaagccgatcatcagcgttgttctcacagcccacgaagccatccccggtgcgacaaagattgtcccagtggaagccggacctcccgaaaccggcgctactaacagcgaaaccaccagtgccgacctggtgcctcgtcgcggttaccaggagtacgccattcagcagacaccgtacgaacagcccatgaaatcttcaagactaggtcccacccagcttaaaatatttacctgcgaatattgcaacaaggtctttaaatttaagcatagcctgcaggcccacttaagaattcataccaacgaaaaaccctataagtgtcctcaatgcagctacgcttcggccattaaagccaatcttaatgtgcacctcaggaagcacacaggagaaaagtttgcatgcgattactgctccttcacatgtcttagcaagggccaccttaaggtgcatatcgaaagggtgcacaaaaagattaagcagcactgcaggttctgtaagaaaaagtattctgatgtcaaaaatctgatcaagcacatcagagatgcccacgacccacaggataaaaaggtgaaagaggccctggatgagctgtgcctgatgacccgcgaaggtaagagacagctcctgtacgactgtcatatatgcgagaggaagttcaagaacgaactcgatagggaccggcacatgcttgtacatggggacaaatggccgtttgcttgcgagctttgtggacacggcgcaacaaaatatcaggccttggagctgcacgtgaggaagcatccttttgtgtacgtctgcgccgtatgcagaaagaaatttgtttcctctatcagactgagaacccacattaaagaggtgcacggtgctgctcaagaagcacttgtcttcacgtcttccattaaccagtcattctgtctcctagagccagggggtgacattcagcaggaggcacttggcgatcaattacagctagtggaagaggagtttgcgctgcaaggggtaaatgccctgaaagaagaggcctgccccggtgacacacaattagaagaaggcagaaaggagccagaagctcccggtgaaatgccggctcccgctgtgcacctggcttccccacaggccgaatccactgccttgcccccttgcgagctggagacgacagtggtctcctcatctgatttacacagccaggaggtggtgtctgacgactttctgctcaagaatgatacctcgagcgccgaagcacatgccgcacctgagaaacctccggacatgcagcaccgctcctcagtccaaacccagggagaagtcatcacgctgctgctctctaaagcccagagcgccggaagcgatcaggagtcccacggcgctcagtcacccctgggcgaaggtcaaaatatggccgtactttctgctggcgatccagatccatcccgctgtctcagaagcaatcctgccgaagcgtctgacctgttgccccctgtggccggagggggtgacaccataacccatcagccagattcatgcaaagccgctccggagcataggtcaggtataacggcctttatgaaagtgctgaattctttacagaagaagcagatgaacacaagtttgtgtgaaagaataagaaaggtgtatggtgacctggaatgtgaatactgcggaaagttgttctggtaccaagtccacttcgacatgcatgtgcgcacccacactagagagcacttgtactattgttcgcaatgtcattacagcagtatcaccaaaaattgtttaaaaaggcatgtaatccagaagcattctaacattttactcaaatgccctaccgatggttgtgactacagcacccctgataaatacaagctgcaggctcacctaaaggtgcacaccgcactggacaaaagaagctattcctgccctgtgtgcgagaaatcattcagcgaagaccggcttatcaagagccatatcaagaccaaccaccctgaagtgtccatgtccacaatatcagaggtgcttggtcgccgagttcagctgaagggactgatcggcaaaagagcaatgaaatgcccatattgtgacttctactttatgaagaacggttccgatttgcagcgccacatctgggcccatgagggggtgaaacctttcaagtgttccctctgtgagtacgcaacaagatccaaaagcaatctgaaggctcatatgaaccgccactctacggaaaaaacacacctttgcgacatgtgcggaaagaagttcaaatcaaagggtacactgaagagccacaagcttcttcatacagcggacggcaagcagttcaaatgcactgtgtgcgactacacagccgctcagaagccccagctccttcggcatatggaacagcacgttagcttcaagccctttcggtgtgcgcattgtcattactcttgcaacatctccggcagtcttaaacgccattacaatcgtaagcaccccaatgaggaatatgcaaacgtgggtaccggagagctggctgcagaggtgctgattcagcagggcggacttaaatgccccgtctgctcgttcgtctacgggacaaaatgggagttcaatcggcatttaaagaacaaacatggcttgaaagtcgtcgagatcgacggcgaccccaagtgggaagttacagaagaggaaccatcatctaatcatacggttatgatccaggagactgtacagcaggctagtgtagaactagcagagcagcatcatctggtggtgagcagtgacgacgtcgagggaattgaaactgttacagtgtatacgcaggggggagaagcgagtgagtttatagtgtacgtgcaagaggctatgcagccggtcgaagaacaggctgtcgaacagcctgcccaggagctgtag

SEQ ID NO: 247121 - DNA, 3546 bp, synthetic construct
  misc_feature 1..3546: note = Description of Artificial Sequence: Synthetic coding sequence
  source 1..3546: mol_type = other DNA
atggaaactagagctgctgaaaacaccgcaatattcatgtgcaaatgttgcaatctgtttagtcctaatcagagcgaactactgtcacacgtgagtgaaaaacacatggaagagggggtaaacgtagatgagatcatcatcccactccggccactgtccactcccgagccacccaacagctccaaaacaggggacgagttcttagtgatgaaaagaaaaagaggcagaccaaagggaagcaccaaaaaatctagcaccgaagaagaactcgcggagaatatagtctcgcctactgaagattccccattggcccctgaggagggcaactctctgcctccatccagcctggagtgcagtaagtgctgcaggaagttctccaatacacgccagttacgcaaacatatctgcatcattgtgctcaatctgggagaagaggagggcgaagcgggagcaaccaagatcgttccagtggaggccggtccgccagagactggcgctaccaatagcgagaccacatccgcagatcttgtcccacgcagaggataccaggaatatgcgattcagcagaccccatatgagcagcccatgaagagtagtagactgggtcctacccaactcaaaatttttacttgcgagtactgcaacaaagtcttcaagtttaagcatagtctgcaagcacatttgcggatacacactaacgagaagccgtacaaatgtcctcagtgttcctacgcctccgccataaaggccaacctgaatgtccacctgcggaaacatactggcgagaagttcgcatgtgattactgtagtttcacatgcctgtctaagggccatcttaaggtgcacatcgagcgggtccacaagaagataaaacagcactgcaggttctgtaagaagaagtactctgatgtgaaaaatttaattaagcatattcgagacgcgcatgaccctcaagacaagaaggtaaaggaggctctcgatgagttgtgtctaatgactagggaagggaaacgtcagcttctgtatgattgccatatctgcgagaggaagtttaagaatgaactggatcgggatcgtcatatgctcgtgcatggcgataagtggcccttcgcctgtgagctgtgcggacacggggctactaaatatcaggcgctggagcttcacgtgaggaagcacccattcgtgtacgtgtgcgcagtgtgccgcaagaagttcgtgtctagtattaggctgcgtacacacattaaggaggtgcacggggctgctcaggaggcgctggtgtttacatcctccatcaatcagtctttttgtttattagaaccaggaggggacatacagcaagaagccctaggtgaccaactgcagcttgtggaggaagaattcgccctgcagggtgtcaatgcgcttaaggaagaggcttgccctggtgacactcagctggaggaggggagaaaggagccagaagcccctggggaaatgcccgctccagctgttcacctcgcctctccacaggcagaaagtacagctctgccaccctgcgagctggaaactacagtggtaagctcttcagaccttcacagtcaggaggtcgtttccgacgatttcctgctgaaaaacgacactagcagcgccgaggcccatgccgctcccgagaagcctccagatatgcagcatcggtcgtccgtgcaaactcagggggaagttatcacgctgctgctgtcaaaggcccagtctgccggatccgatcaggagtcacatggagcccaatcaccactcggggaaggccagaatatggccgtgctttcggccggagatcccgaccctagccggtgcttgcgcagcaatcccgctgaagcctcagatctcctccccccagtggccggaggcggtgacaccatcactcaccagccagactcatgtaaggctgcacccgaacaccgttccggaattactgcattcatgaaggtcctgaattcactccagaagaaacaaatgaacacctctctctgcgaaagaatcagaaaagtatacggtgacctggagtgtgagtactgtggaaagctcttttggtatcaggtccattttgacatgcacgttcgcactcataccagggaacatctctactattgttcccagtgccattactcatccatcactaaaaactgtctgaagagacacgtgatccagaagcacagtaacattctccttaaatgcccaaccgacggatgtgactatagcacgcccgacaagtacaagctccaagctcacttgaaagtgcacaccgccctcgataagaggagctattcctgccccgtatgcgagaagtctttctccgaggatagactcatcaaatcacacatcaaaactaaccacccggaagtatcgatgtctaccatctcggaggtcctgggtagacgagtccaacttaaagggcttatcgggaagcgggcaatgaaatgcccctactgcgatttttatttcatgaagaatggcagtgatctgcagaggcatatctgggcacacgagggagtaaagccatttaagtgttcactttgcgaatatgccacccgctctaagtctaacctaaaggcacacatgaatcgacatagcactgaaaaaacacatctgtgcgacatgtgtgggaagaagttcaaatctaaaggaactcttaagagccacaaactcctgcacaccgcggacggtaaacagttcaagtgtaccgtgtgcgattatacagcggctcagaagccacagctcctgaggcacatggagcagcatgtctctttcaaaccttttcgttgcgcccattgccattacagctgcaatattagcggaagcctgaaacgccattataatcggaaacaccccaatgaagagtatgccaacgtggggacaggggagctggccgcagaagttctcattcagcaggggggactcaaatgtcccgtgtgtagcttcgtgtacggaactaagtgggagttcaacaggcatctgaaaaacaaacacgggctcaaagttgttgagatcgacggagatcccaaatgggaaacagctacggaggcccctgaagaaccatctacacagtacttgcatatcacagaggccgaggaggatgtgcagggcacccaagccgctgtagccgcacttcaagacttacgctacacaagcgaatcaggcgatcgcctagatcccaccgctgtgaatattctacaacagattatcgagttaggggctgagacccatgacgcgaccgccttggcctccgtggtcgctatggctccgggaaccgtgacagtcgtgaagcaggttacagaggaggaaccatctagcaaccacaccgtaatgatacaggaaacggtacagcaggcttcggtggagctggctgagcagcatcacctagttgtcagctctgatgacgtggagggcattgagacagtcacggtctacacacagggaggggaagcctccgagttcatcgtgtatgtgcaggaagcgatgcagcctgtggaggagcaggccgtcgagcagcccgcacaagagctgtag

SEQ ID NO: 247122 - DNA, 177 bp, synthetic construct
  misc_feature 1..177: note = Description of Artificial Sequence: Synthetic coding sequence
  source 1..177: mol_type = other DNA
atggaaactagggcagccggactcctggagttcgccggaggtcctctccacactctcttcgcctgggtatccccagttgaagctgctgagcagcagcgactactgcccgtccccgcttcaggctccttcgtgcctgaaggccacctaccagacgccagtcagtcatcacccgtctag

SEQ ID NO: 247123 - DNA, 1653 bp, synthetic construct
  misc_feature 1..1653: note = Description of Artificial Sequence: Synthetic coding sequence
  source 1..1653: mol_type = other DNA
atggatctgaccaagatgggtatgatccagctgcagaacccctctcaccccaccggcctactgtgcaaagccaatcaaatgcgcttagccggtacactgtgtgatgtggtaattatggttgattcccaggagtttcatgcccaccggacagtgctcgcatgcacatccaaaatgtttgagatcctgttccacagaaattctcagcactatactctggatttcctgagcccaaaaaccttccagcagatcctggaatatgcttacacagccaccttgcaggcaaaggccgaagatctggacgacctgttgtacgcagcagagattctggagatcgaatacctggaggagcagtgtttaaaaatgcttgagactatccaagcgtccgacgataatgacacggaagcaactatggccgacggaggcgcagaggaggaagaggaccggaaggctcggtatctgaaaaatattttcattagtaaacactcatcagaagaaagtggctatgcctccgtggccggacagtccctgccaggcccaatggttgaccagtctcctagtgtgtccactagcttcggattgagcgcaatgagccccaccaaggcggctgtggattcattgatgaccatcggacagagcttgctgcagggtacattgcagcccccagcagggccagaggaacccactttggctggtggcggacgacaccctggtgtcgcggaggtgaaaacagaaatgatgcaagttgatgaagtaccctcccaggggtttatccagcgagaactcttcagtaaattgggtgagctggcagtcggaatgaagagcgaatcacgtaccataggggaacagtgttccgtgtgcggcgttgaacttccagataatgaggctgttgagcaacatagaaagctgcattctggaatgaagacctacggctgcgagctctgtggcaagagatttctggactcccttaggctgaggatgcacctgcttgctcactcggccggtgctaaagcattcgtttgtgatcagtgcggagcccaattctctaaagaggatgcgcttgagactcacagacaaacacacactgggacggacatggcagtcttctgcttgctgtgtgggaaacgttttcaagctcaaagcgcactccaacagcatatggaggttcacgcaggggttcggagctacatttgttctgaatgcaacaggacctttccctcccacacggcgttgaaaagacatttgcggtcccacaccggcgaccatccctacgagtgtgagttttgtggtagctgttttcgggatgaatcaactctgaagagccacaaaagaattcacactggcgaaaagccctatgagtgtaacggatgcggcaaaaaattctcactaaaacatcagcttgaaacacattaccgcgtgcacactggggaaaagcccttcgaatgcaaactgtgccatcagcgctccagagattattcagccatgattaagcacctcaggacccataacggagcatccccttatcaatgcactatttgtactgaatactgtccatctctttcgagtatgcagaaacacatgaaaggccacaaaccagaagagattcctcctgactggaggatagagaagacctatctttacctatgttacgtatag

SEQ ID NO: 247124 - DNA, 2022 bp, synthetic construct
  misc_feature 1..2022: note = Description of Artificial Sequence: Synthetic coding sequence
  source 1..2022: mol_type = other DNA
atggacctcacaaagatggggatgattcagctgcagaacccaagtcaccccaccggcttactatgtaaagcaaaccaaatgagactggccggtacgctctgtgatgttgtgataatggtagattcacaggaattccatgctcaccgtacagtcctggcctgcacctctaagatgtttgagatactcttccaccgtaactctcagcactataccctcgacttcttgtccccaaagacttttcagcaaattctggaatatgcttatacagcaacactgcaggccaaggccgaggatctcgacgaccttctgtatgctgccgaaattctcgaaatcgaatatctcgaggaacagtgcctcaagatgctggagacaattcaagcctccgacgacaacgacacagaagctaccatggctgatggcggtgctgaggaggaggaagatcgtaaggccaggtatctaaagaacatattcattagcaaacactccagtgaggagtcggggtatgcgagtgtagccggacagtccctgccaggacccatggttgatcagagtcccagcgtgagtaccagctttggcttatccgccatgtcccctacaaaagccgctgtcgacagcctcatgaccatcggccagtccctgctgcaggggacgcttcagccacctgccggtccagaagagcccaccctggccggaggtgggcgtcaccccggtgtcgctgaggtgaaaaccgagatgatgcaggtggatgaagttccctcccaggattctcccggtgccgctgaaagcagcatctcgggcggtatgggggataaggtggaggagagggggaaagagggccctggtaccccgacccgaagctctgtcataacttccgcacgggagctgcattatggcagagaagagtccgccgaacaggtcccaccacctgccgaggccggtcaggcacccacgggtcggcctgaacatccagcccctccacctgagaagcatcttgggatctactcagtcctgcctaatcacaaggccgacgccgtgctgtctatgcccagcagcgtgactagtggtcttcacgttcaacccgctctagccgtctcgatggacttttccacatacggtggcctcctgccccaaggattcatccaaagggagctgttttccaaattaggagaactggccgtaggcatgaagtccgaatcgcgcacgattggggaacagtgttccgtgtgcggggttgaattgccagataacgaggcagtagaacagcatcgtaagctacacagcggaatgaaaacttatggatgcgagctgtgcgggaagaggttcctcgattcgctccgattgagaatgcatcttctggctcactcagcgggtgcaaaagccttcgtctgcgaccagtgcggagcccagttcagcaaggaggacgcattggaaacacacagacagacccataccggaacagatatggctgtgttttgcctgttatgtggaaagagatttcaagcccagtccgccctgcaacagcatatggaagtgcacgccggagtccgctcctatatttgtagcgagtgtaaccgcacttttccctcccacactgcgctcaaaagacacttaaggtcccacaccggcgatcacccatatgagtgtgaattttgtggcagttgtttccgcgatgagtcaactctgaaaagccacaaaaggatacatactggcgaaaaaccatatgagtgcaacggctgtggcaagaagttcagtttgaagcatcagctcgagactcattatagagttcatacgggagaaaaaccatttgagtgtaaactttgtcaccaacggtcgagggactactcggctatgattaagcatctccggacgcacaatggggcatcaccttatcagtgtacaatttgcactgaatactgccctagcctctcatcaatgcagaagcatatgaagggacataagcccgaagaaattccgcctgactggcgcattgagaaaacttacctgtacctgtgttatgtgtag

SEQ ID NO: 247125 - DNA, 2022 bp, synthetic construct
  misc_feature 1..2022: note = Description of Artificial Sequence: Synthetic coding sequence
  source 1..2022: mol_type = other DNA
atggatctgacgaagatgggcatgatccaacttcaaaatcccagtcatccaacaggcctgctatgtaaggctaatcagatgaggcttgctggtacactgtgtgatgtggtgatcatggttgattcgcaggagtttcacgcacaccggaccgtcttagcttgcacgtccaagatgttcgaaattctctttcacaggaactcacaacactacacgcttgattttctctccccgaagacgtttcagcaaattttggaatatgcttacacagctaccctccaagctaaggcagaggatctggatgacctgctgtatgctgccgaaattctggaaattgagtatttagaagagcagtgcctgaagatgttggaaaccatccaggcctcagacgacaatgatactgaggctaccatggccgatggaggcgctgaagaggaagaggatagaaaagctcgatacctcaaaaacatctttataagcaaacattcctccgaggaatctggatatgcaagcgttgcaggtcaatcgctgcctgggccaatggtggatcagagcccgtcagtaagcacctctttcgggctgtctgcaatgagcccgacaaaagccgcagtggatagcctcatgacaattggccagagtctgctgcaggggactctgcagcccccagcagggcctgaagagcccacgcttgccggtgggggtcgacaccctggggtggcagaagtcaaaacagaaatgatgcaggttgacgaagttccttctcaggacagtccaggggctgccgaaagctctatatctggtgggatgggagacaaggtagaggagcgagggaaggaggggccaggaacccccacacgctcatccgtgataacgtcggcaagagagctgcactacggacgtgaagagtcagctgaacaggttccccctcctgctgaagctggacaagcccctacgggccgacctgaacatcctgcacccccaccagagaaacaccttggcatctatagcgtcctgccaaaccataaagctgacgcagtcctgtccatgcctagcagcgtcacctccggattacacgttcaaccagcgttggcagtgtctatggactttagtacgtacggtggtcttctgccccagggctttatccaacgggagctgtttagcaaacttggagaactcgccgtggggatgaagagtgaatctcgtaccatcggggagcagtgcagcgtgtgtggggttgaattgccagacaatgaggcagtggagcagcataggaagttacatagtggtatgaagacctacggctgtgagttatgcggaaagcgtttcctcgacagtctgcgcttacgcatgcatctgctggcccatagcgccggtgccaaagcctttgtgtgcgatcaatgcggagcacagttctccaaagaagatgcccttgagacccataggcagacccacaccgggacagacatggcggtcttctgcctgctttgtggtaagagattccaggcccaatccgccctccaacagcacatggaagtccacgccggagtgcgctcctacatttgcagcgagtgtaacagaaccttcccctctcataccgcgttgaagagacacctgcggtcccacacaggggatcacccatacgaatgcgagttttgtgggtcatgtttccgagatgagtcaacgctcaagtcgcacaagaggattcacacaggggagaagccttatgaatgcaatgggtgcgggaaaaagttttcactgaagcaccaattggagacccattaccgggtccacacaggggagaaacctttcgaatgcaaactgtgtcatcagaggtccagagattatagcgcgatgattaagcacctgagaacacacaatggtgcaagcccctaccagtgcaccatttgtaccgaatactgccccagtctctcctcaatgcagaaacatatgaagggacacaagcccgaggaaatccctcctgactggcggattgagaagacttacctgtatctatgctacgtgtag

SEQ ID NO: 247126 - DNA, 447 bp, synthetic construct
  misc_feature 1..447: note = Description of Artificial Sequence: Synthetic coding sequence
  source 1..447: mol_type = other DNA
atggacctcactaagatgggcatgatacagctgcagaatccatcacacccaaccgggttgctttgtaaggccaatcagatgagacttgctggcaccctgtgtgatgtcgtgataatggtagacagccaggagttccatgcacatagaacagtgctggcctgtaccagcaagatgtttgaaattcttttccaccggaatagccagcattacactttggactttctgtccccaaagacttttcagcagattctcgaatacgcatacacggccacactgcaggcgaaagcagaggaccttgacgacctactttacgccgcagagatcttggagatcgagtacctcgaagaacagtgtctcaagatgcttgaaacaatccaggcctcagacgacaacgacactgaagccacaatggctgacggcggtgccgaggaggaggaggaccgatag

SEQ ID NO: 247127 - DNA, 348 bp, synthetic construct
  misc_feature 1..348: note = Description of Artificial Sequence: Synthetic coding sequence
  source 1..348: mol_type = other DNA
atggacctgacaaagatgggcatgatccaattacaaaatcctagccacccaacgggcctactgtgcaaagccaaccagatgaggctggccggaaccttgtgtgacgtagtgattatggtggatagccaggaatttcacgctcatcgtaccgtgctcgcctgcacatcaaaaatgttcgagatcttatttcaccgtaactcccaacattatactttggattttctgtcacccaaaaccttccagcagatcctggaatatgcctacacagccactcttcaggctaaagcagaagacttggatgaccttctatatgctgcagagatactggagatagaatatctagaatag

SEQ ID NO: 247128 - DNA, 723 bp, synthetic construct
  misc_feature 1..723: note = Description of Artificial Sequence: Synthetic coding sequence
  source 1..723: mol_type = other DNA
gaagccctccccgtccgattactcaggcctctcctgttgaggccacacttccaggacgcccctccgggagacccgcgtcacggccagggcgctcaggtgccaaccctgcgccaggaggttcagccaggaaacctgaagaggcatctgaggatccactccggcgagaagccgtatgtgtgcatccattgtcagcggcagttcgccgaccccggagcgctccagaggcatgtgcgcatacatactggagagaaaccttgccagtgcgttatgtgtggtaaagcattcacccaggcctcttcgctaattgcgcatgtacgccagcacaccggcgagaagccatacgtatgcgaaagatgtgggaagcggttcgtgcaatcttctcaactggccaaccatattagacaccacgataacattcggccacacaagtgttctgtttgcagcaaagccttcgtgaatgtgggcgatctaagtaagcacatcattattcacaccggggagaagccctacctgtgtgacaagtgtggacgtggcttcaaccgagttgacaacctccgtagccatgttaaaactgtgcatcaaggtaaggctggcatcaaaatcctcgaacctgaggagggttccgaggtcagtgttgtgaccgtggacgatatggtgactttagccaccgaagccttggctgcgaccgcagtcactcagctcactgtggtgcccgtcggatag

SEQ ID NO: 247129 - DNA, 2433 bp, synthetic construct
  misc_feature 1..2433: note = Description of Artificial Sequence: Synthetic coding sequence
  source 1..2433: mol_type = other DNA
atggatttcccccagcactcacagcacgtattggagcaacttaatcagcagcggcagctcggtctgctttgtgactgtactttcgtggtggatggggtgcattttaaggcgcacaaggctgtgctagccgcatgcagcgagtactttaaaatgcttttcgttgaccagaaagacgttgtgcatcttgatatctctaatgccgctgggcttggtcaggtgctagagttcatgtatacagcgaagctgtcattgtcaccagagaatgtggacgacgtgctggccgtcgcaaccttcctgcagatgcaagacataattactgcttgtcatgccttgaaatccctggccgaacctgctacttcacctggtgggaacgctgaggctctggctactgagggaggagataaaagggccaaggaagagaaagttgcaacctccaccctcagtcgacttgagcaggctgggagatcaactcctatcggccctagcagagatttgaaggaagagcgcggtgggcaggcgcagagcgctgcgagcggtgccgagcaaactgaaaaggccgatgcgccacgggaaccaccccctgtcgaactgaaacccgaccctacatccggcatggccgctgccgaagccgaagccgctctgtcagagagttccgagcaggagatggaggtcgaacctgcgagaaagggggaggaagaacagaaagagcaggaggaacaggaggaagaaggggcaggccctgcagaggtgaaggaagagggctcccaactggaaaacggcgaagcacccgaggaaaatgagaacgaggagtccgctggaaccgatagtggccaggaactgggttccgaagcccgaggtctgaggagcggcacatatggcgataggaccgaatcaaaagcctacgggagcgtaatacataaatgtgaagattgtggtaaagagttcacacatactggaaactttaagagacacatcagaatccatacaggtgaaaaacctttctcttgcagggagtgttctaaagccttcagtgaccctgctgcctgtaaagcgcatgaaaagactcatagcccacttaaaccatacggctgtgaggagtgcggaaagtcttatcgcttaatttcacttttgaatctgcacaaaaaacggcacagcggggaggcaaggtacagatgcgaggattgcggcaaactctttaccacatccggcaatttgaaacggcaccagcttgtccactctggagagaaaccttatcaatgtgattattgtggacggtcttttagcgatcccacctctaagatgcgccatcttgagactcacgatacagacaaggagcacaagtgtcctcactgcgacaaaaaatttaatcaggtcggaaatctaaaagctcatctgaagatccacatcgcagatggcccactgaaatgcagggagtgtggcaagcagtttacaacctccggcaacctgaaacgccatctgcggattcacagtggcgagaaaccatacgtgtgtatacactgtcagaggcagtttgctgatcccggagctctgcagaggcacgtcagaatccacacgggagaaaagccgtgtcaatgtgtgatgtgtggcaaggcatttacccaggcctcgagcctgatcgcccacgtaagacaacatacaggtgagaagccatacgtctgcgagcgctgcggcaagaggtttgtccagagctctcagttagcaaatcacatccggcatcatgacaatatcagaccgcataagtgctctgtgtgtagcaaggctttcgtaaacgtgggggatctgtcaaaacatatcatcattcacacaggcgagaagccttatctgtgtgacaagtgtggtagggggtttaaccgcgtcgataaccttaggtcccacgtgaaaacagtccatcaaggaaaagccggaataaaaatactggaaccagaagagggcagtgaggtttcagtagtcacagtggacgacatggttacattggccaccgaggctctcgccgctaccgccgttacccaactgacggggccagccaccctgccggctgtggttccagtgggagctgcagtgaccgccgacgaaaccgaggtgttaaaggcagagattagcaaagctgtgaagcaggtacaggaggaggatccaaacactcacatattgtatgcctgtgattcatgtggtgataaattcttggacgcaaactctctggcccagcacgtacggatccacacggcccaggctctcgtgatgttccagaccgatgccgacttttaccagcagtacggccctgggggaacttggccagcaggacaagttctgcaggcgggagagctggtgttcagacccagggacggagcggagggacagccagcgctggcagaaactagccctacagcgcctgaatgcccaccccctgccgagtag

SEQ ID NO: 247130 - DNA, 2412 bp, synthetic construct
  misc_feature 1..2412: note = Description of Artificial Sequence: Synthetic coding sequence
  source 1..2412: mol_type = other DNA
atggatttcccacagcactctcagcatgtcctggagcagttaaaccagcaaagacaacttggcctcctttgcgactgtactttcgtggtcgacggcgtgcatttcaaggctcataaggcagttctagctgcttgctcggaatacttcaagatgctttttgtggatcagaaggacgtggtgcacctggacatctccaatgctgccggactcgggcaggttcttgagtttatgtatacagcaaagctctctctgtctccggaaaatgtggatgacgtgctcgccgtcgctacttttctccagatgcaagatataattactgcttgtcacgctctgaaatctttggccgaaccagcaacttcgcctggaggtaatgctgaagctctggccacagagggcggagacaaaagagcgaaggaagaaaaggtagccacgtcaaccctcagtcgcctggaacaggctggcagatccacaccgataggaccctcccgcgacctgaaagaggagcggggagggcaggcacagtcagccgctagcggggcagaacagaccgaaaaagccgatgccccacgagaaccaccacctgtcgagctgaaacccgacccgaccagcggcatggctgcggcagaggcagaagctgccctgagcgagtccagcgaacaagagatggaagttgagccagctcggaagggagaagaggaacaaaaggagcaggaggaacaggaagaggaaggcgctggccctgccgaagtgaaagaggaaggcagccagctcgagaatggcgaggcccctgaggaaaacgaaaatgaggagagtgcaggaacagacagcggtcaagagctcgggtccgaggcacgaggtcttaggagcggaacctatggcgatcgaaccgaatctaaggcatacggttccgtgattcacaagtgtgaggactgcggcaaggaattcacacacactgggaattttaaacgacacatccgcatccatacaggcgagaaacctttcagttgcagagaatgttctaaggccttctcggatcccgcagcttgcaaggcccatgaaaaaactcattcacctctaaagccgtacggctgcgaggaatgtgggaagtcctacaggctgattagcctgttaaacttgcacaagaagaggcacagcggagaggctagataccgctgcgaagactgcggcaagctgttcaccacctccggcaatctgaagcggcatcagctggtgcactccggcgagaaaccttatcagtgtgattactgtggcaggtccttttccgatccaacttccaagatgagacacctggaaactcacgacaccgacaaagaacataagtgcccccactgtgataaaaaatttaatcaggtggggaaccttaaggcccacctaaaaatacacatcgccgacgggcctctgaagtgcagggagtgtggaaagcaattcactacatccgggaacttaaagaggcatttgcgaattcattctggagaaaagccatacgtgtgcattcactgccagcgtcaatttgctgaccccggagcacttcagcgccacgttaggatacatacaggggaaaagccatgccagtgcgtgatgtgtggaaaagccttcacccaggccagttctctgatcgcgcatgtacgccaacacaccggcgagaagccttacgtatgtgaacgttgtggcaagcgcttcgtgcagagctcacagctcgcaaaccacatcaggcaccacgataacattcgaccacacaaatgtagtgtctgttccaaggccttcgtcaatgtgggagatcttagcaagcatattataatacacactggggaaaagccatatctgtgtgacaaatgcggcagagggttcaatagggtggacaatctccgctcccatgtcaaaacagtacaccagggaaaggcgggtatcaagattctcgagccagaggagggatcggaagtgagtgtcgtgacagtggatgacatggtaacactggctacagaggcccttgctgcgaccgctgtgacacagttgactgtcgtccccgtgggcgctgcggtgacggccgacgaaaccgaggtgctaaaagcagaaattagcaaggcagttaaacaagtgcaggaagaagaccctaacacacatatactgtacgcatgtgactcatgcggagacaagttcctcgacgcgaacagcttggcccaacacgtgcgaatacacactgcccaggccttggtgatgttccagacggatgctgatttttaccagcagtatggaccagggggaacatggcccgcaggccaagtcctgcaggcaggcgaattagtgtttcggccaagggacggtgcagaggggcagcctgccctagccgagactagccccacagcccctgagtgtccacctcctgcagagtag

SEQ ID NO: 247131 - DNA, 633 bp, synthetic construct
  misc_feature 1..633: note = Description of Artificial Sequence: Synthetic coding sequence
  source 1..633: mol_type = other DNA
tagtctaagcatatcattattcataccggcgagaagccatacctctgcgataagtgcggaagagggtttaatagggtcgataacctccgatcacatgtgaaaaccgtacaccaggggaaggctggcattaagatcttagaacccgaagagggctccgaagtatcagtggtcaccgtggacgacatggtgacgctggccaccgaggccctggcggctacggccgtcacacagcttaccggcccagctaccttgcccgcagttgtccccgttggcgcagccgtgaccgctgacgagaccgaagtgttgaaagctgaaatatccaaggcagtcaagcaggtccaggaagaggacccaaatacccacatactctatgcttgcgactcatgtggtgacaagtttctcgacgctaactcccttgcccagcacgttcgaatccacactgctcaggccctggtgatgttccagacggatgcagatttttaccagcagtatggccctgggggaacatggccagccggacaggtgttgcaggccggagagttggtgttccggcctagggacggagcggaaggacaacccgctctcgccgagacaagccccactgccccagaatgtccaccccctgccgagtag

SEQ ID NO: 247132 - DNA, 726 bp, synthetic construct
  misc_feature 1..726: note = Description of Artificial Sequence: Synthetic coding sequence
  source 1..726: mol_type = other DNA
taagaggctcttcccgttcggttgctgaggccccttctgctgaggccgcacttccaggacgcacctcccggagacccaaggcatggccagggcgctcaggtgcccaccctaaggcaggaggtgcaacctgggaacctaaaaagacacctacgcattcactccggggagaagccctatgtgtgcatccattgccagagacagttcgccgatcccggagctctccagcggcacgtacgcatccatactggggagaagccgtgccagtgtgtgatgtgcggcaaggcctttacacaggcttcatctctgattgcccacgtgaggcagcataccggcgagaaaccttacgtttgtgagcgctgcggtaaacggttcgtccagagtagtcagctggccaatcacattaggcaccacgacaacattagaccccacaaatgctcagtgtgcagcaaagctttcgttaacgtgggcgacctgtcaaaacacatcattatacacaccggggaaaagccatacctatgtgacaagtgtggaagggggtttaatagagtggataacttgaggagccatgtgaagaccgtgcaccagggcaaagccggaattaagatcctggaacccgaagaggggtccgaagtgtctgtggtaacagtagacgatatggtgactctggctactgaggcactggcggctaccgctgttacacagctgaccgtggttcctgtgggctag

SEQ ID NO: 247133 - DNA, 2169 bp, synthetic construct
  misc_feature 1..2169: note = Description of Artificial Sequence: Synthetic coding sequence
  source 1..2169: mol_type = other DNA
atggattttccacaacactcccagcacgtgctggaacagctgaaccagcagcgacagttgggactactgtgtgattgcacgtttgtggtggacggagtgcacttcaaagctcacaaggctgtgttggcagcttgttctgaatacttcaaaatgctgttcgttgatcagaaggacgtagtgcacctcgacatctccaacgcagccggactgggacaggttttggagtttatgtatacagctaaactgtctctatcccccgagaacgtggacgatgtccttgccgtcgcaccaggcgctgaacagaccgagaaagccgacgctcccagagaacctcctcccgtagagctgaagcccgatcccactagcggcatggctgctgccgaggcggaggccgctttgagcgagagttccgagcaggagatggaggtggagcctgctagaaaaggtgaggaagaacaaaaggagcaggaagagcaggaagaggaaggcgcaggccctgctgaggtgaaggaggaggggtctcagctcgaaaacggcgaagcgcctgaggagaacgagaatgaagaatctgccggaaccgattctggccaggaactgggttcagaagctcggggactgcgcagcgggacatacggcgaccggactgaaagcaaggcctacgggtctgtcattcacaaatgtgaagattgtggaaaagagttcactcacaccggaaattttaaacgccacatccgcatacatactggagagaagcctttttcttgtcgtgagtgctccaaggccttctccgaccctgcggcatgcaaggcccatgagaagacacattccccacttaagccgtatgggtgtgaggagtgtggcaagagctatagattaattagtctgctcaacctacacaaaaagagacattctggagaggcaaggtaccgttgcgaagactgcggtaagctgtttacaacctcagggaatctgaaaaggcaccagcttgtgcatagcggggaaaagccataccagtgcgactactgcgggagatcatttagcgacccgacctcgaagatgcggcacctcgagacccacgatacagacaaggagcataaatgccctcactgtgacaagaagttcaatcaggtcggtaacctcaaggcacacctcaaaatccatatcgccgatggccctctgaagtgcagggagtgtgggaagcagttcacaactagtggtaacctcaaacgacacctcaggatccatagcggcgaaaaaccctatgtgtgtatccattgccagcggcagtttgccgatccaggtgccttgcagaggcatgtccggatccacactggcgagaaaccatgtcaatgcgtgatgtgcgggaaagcgttcacacaggctagtagcctaatagcacacgtccgtcagcacaccggagagaagccttatgtctgcgagaggtgcggtaagcggttcgttcagagctctcagctggcaaatcacataaggcaccacgataacatacggcctcacaagtgttcggtctgttccaaggcattcgtcaacgtaggagatctgagcaaacatatcatcatccacaccggagagaaaccttacctctgcgataagtgcgggagaggcttcaacagggtggacaacctgaggtctcacgtcaagactgtccatcaagggaaggctggtatcaaaatcctggagcctgaagaggggtctgaggtgagcgttgttacggtcgatgatatggtcacactggcaactgaagcgctcgcagcgacggcggtgacacaacttactgtggtgcccgtgggggcagctgtcaccgccgacgaaactgaagtgcttaaagctgaaatctctaaagcagttaagcaggtgcaggaagaagacccaaacactcacattctctacgcatgcgattcttgcggcgataagttcctcgacgctaacagtttggcccaacatgttcgaatccataccgctcaagctctggtgatgtttcagaccgatgccgacttttaccagcaatatggtcccggaggcacatggcccgctggccaggttctgcaagcgggagaattggtattcagacctagggacggcgctgaaggtcagccagctctggccgaaacttctccaaccgcaccagagtgtcccccacctgccgaatag

SEQ ID NO: 247134 - DNA, 1530 bp, synthetic construct
  misc_feature 1..1530: note = Description of Artificial Sequence: Synthetic coding sequence
  source 1..1530: mol_type = other DNA
atggacttcccccagcactctcagcatgtcctagaacagctgaatcagcaaaggcagttggggctgctttgtgattgtacgttcgtagttgatggcgtccactttaaagctcacaaagctgtgctggcggcatgctccgaatattttaaaatgttatttgtggaccagaaagatgttgtgcacctcgatataagtaatgccgctggcggtgacaagcgggcaaaggaagaaaaggtagctacatcaaccctttccagactggagcaggcaggcagatccacacccatcggaccctctcgcgatttgaaggaggagagaggaggccaggctcagtctgctgcctccggtgccgagcagacagaaaaagctgacgcccctcgcgaaccgccacccgtggagctgaagcccgacccgacatctggaatggctgcagctgaggccgaagccgctctgagcgagtcgtctgagcaggagatggaggtcgagcctgccagaaagggggaggaggaacaaaaggagcaggaggagcaggaggaggagggtgcaggcccagcagaggtgaaggaagagggctcccagctcgaaaacggcgaagcacccgaagagaatgaaaacgaagaatctgccggtactgattctggccaggaattgggctcggaggcgaggggccttcgctcggggacttacggggaccgcactgaatcaaaggcttacggttcagtgatccataagtgcgaggattgtggaaaggagtttacgcacactggcaattttaaacggcatatcaggatccacacaggtgagaagccattcagctgtcgggagtgctctaaggcttttagcgaccccgctgcttgtaaagcccatgaaaagacccactcccctttgaagccatatggttgcgaagagtgtggcaaatcgtaccgcctgataagcctgctcaatttacacaagaagagacactctggtgaggcgaggtaccgctgcgaagattgtggaaagttattcaccacttctggcaacctcaagcgccaccagctggtgcactcaggtgagaagccataccaatgcgattattgcggtcgcagctttagtgatcccacttctaagatgcgtcacttggaaactcacgatactgacaaagagcataagtgtcctcactgcgataagaagttcaatcaggtctgtggtccgctccccgagccggctcctggctcccggaggtggccccagccgcatgcttgccatgtggtgggcagggctggtagtactgccccagcttctcgatccagtagtgcatgctctccacgtaagcaggctcagagggagcctttgcctagaggttcatcaagattgctgtgcggcggacaggctgactctggtcgcggtctggtccttaagaaatggggcggtgctgcatacctcagtccactgggccctgggacatcccctgacccgggagagatcgaacctttcacggaccccggtaagccagagagccaactatttctgtgtggtagaggtcgatag

SEQ ID NO: 247135 - DNA, 2166 bp, synthetic construct
  misc_feature 1..2166: note = Description of Artificial Sequence: Synthetic coding sequence
  source 1..2166: mol_type = other DNA
atgatgtgttggccctggccactgtcgtccaaatgtcggactagtagcagacccgcaatgccaagttcacacctactgagtcggctccctgcgctgggcgaaatgcgtcgtccctggccacagaaagtgtgccctgttccttcccctggaggggacaagcgtgccaaggaggagaaagtggccacaagcaccctgagtcgcttagagcaggccggacggagtacgcctattggtcctagccgagacctgaaggaagaacgcggtgggcaagctcaaagcgccgcaagcggagctgaacagacagaaaaggccgatgcgcctagagaaccccctccggtggaactgaaaccagatccaaccagcggaatggccgctgccgaggccgaggccgctctgtctgaatcttccgaacaggagatggaggtagagccggctcgaaagggcgaggaggagcagaaagaacaggaggagcaggaggaggagggggcaggacccgctgaggtgaaggaagagggatcacagcttgagaacggggaagcgcctgaggaaaatgagaacgaggaaagtgcaggcaccgactccgggcaggagctagggtctgaagcccgagggttaagaagcggaacatatggcgatcggactgaaagcaaggcttacgggtctgtgatacacaagtgtgaagactgcggcaaggaatttacacatactggaaacttcaaacggcacatacgtatccacacaggagagaagccgttttcttgtagagagtgctccaaagcttttagcgacccagccgcatgcaaggctcacgagaaaactcactctccactgaaaccctacggatgcgaggaatgtgggaagtcataccgccttatctccctgctcaatctacacaagaaacgacactccggcgaagccagatacaggtgtgaggattgcggaaaacttttcaccaccagtggaaacctgaaaagacatcagctagttcattccggagagaagccataccaatgcgattactgcggtcgaagcttctccgatccgaccagtaagatgcggcacctggagacccacgacaccgataaggagcacaagtgtccccactgcgataagaagttcaatcaggtcggaaacttaaaggctcacctgaagatccacattgccgatggccctctgaagtgcagggagtgcgggaaacaatttacaacctctgggaatctgaaacggcacctccggattcattcaggagaaaaaccttatgtgtgcatccattgtcaacggcagtttgctgacccgggagcattgcaacgccacgtgcgaatccacacaggcgagaaaccatgtcagtgcgtcatgtgcggcaaggcattcacacaggcatctagcctcatcgcgcatgtaaggcaacatactggggagaaaccgtatgtgtgcgaacgatgcggcaaaaggtttgtgcagtcatctcagttagccaaccacattagacaccatgataacattcgcccacacaaatgtagtgtgtgctccaaggcgttcgtgaatgtcggcgatttatccaaacatattatcatccacactggagaaaaaccgtatctctgcgataagtgcggccgaggattcaacagagtagataatctcagatctcatgtcaagacagtccatcagggaaaagctggcataaagatactcgagcccgaggagggatcagaagtatccgtcgttaccgtcgacgacatggtcacactcgctacagaagcactcgcagccactgccgtgactcagctgactgtcgtcccagtcggggcagccgtgaccgccgatgagaccgaggtgttgaaagccgagatttcgaaggcagttaagcaggttcaggaggaagatcctaatacccacattttgtacgcctgtgactcttgcggggacaaattcctggacgcaaattcccttgcacagcacgttaggattcacactgcccaggccctggtgatgttccagacagacgcggatttctatcagcaatacgggcctggtgggacttggccagctggacaagtgctgcaggctggggaattggtcttcaggccacgcgatggggctgagggccagcctgctctagccgagaccagccctaccgcacctgagtgtcctcctccagccgaatag

SEQ ID NO: 247136 - DNA, 2007 bp, synthetic construct
  misc_feature 1..2007: note = Description of Artificial Sequence: Synthetic coding sequence
  source 1..2007: mol_type = other DNA
atgaccgaaagaattcacagtatcaacctccacaactttagcaattcagttctcgaaactctcaacgaacagaggaacagaggccacttctgtgatgtgaccgtccgtatccacgggtctatgctgcgagcccacagatgtgtgctggcagccggatctccattttttcaggataaactgctcctgggatacagtgacattgaaattccttcagtagtctccgtgcagtctgtgcagaagctgatcgatttcatgtattccggggtgcttagagtctctcaaagtgaagccctgcagattctgacagccgcaagcatcctgcagatcaaaaccgtgatcgatgaatgtacccggatcgtcagccaaaatgtaggcgacgtgttccccggaatccaggatagcgggcaggacacccctcgcggtactcccgagtctggcaccagcgggcaatcgagtgatactgaaagtgggtatctgcagagccatcctcagcatagtgtagatcgcatctacagtgcactgtatgcttgcagcatgcagaacgggagcggtgagcgatctttttactccggtgcagtggtctcccaccacgagactgccctgggcctacctcgagaccaccatatggaggatccgagctggattactcgtatccacgaaaggtcacaacaaatggaacgttatttaagcacaacccctgaaactactcattgccgcaaacaaccaagacccgttcgtattcaaactctcgttggcaacatacacattaagcaggagatggaagacgactatgactactacggacagcagcgggtgcaaatactggagaggaatgaaagtgaagagtgcactgaggacactgatcaggccgaagggactgagtctgagcccaaaggagagagttttgatagcggcgtgagttcttctataggtacagagcccgacagtgtcgagcagcagttcggcccaggcgctgctagggactcacaagcagagcctacacaacctgaacaagctgcagaagctcctgctgaggggggtccccaaacgaaccagcttgagactggggcttccagtccagagaggtccaacgaagtggaaatggattctacggtgataacagtaagcaactcttccgataaatccgtgctccaacagccttccgttaatacctccatcggtcagccactgccgtctacccagctttacctccgacagacagaaacactcacgagtaatttgcggatgcctttgaccctcacctccaacacacaggtgattggcaccgccggtaacacatatctgcctgctcttttcacgacccagcccgcagggtctgggccaaaaccattcctgttttctctgcctcagcctcttgcaggacagcagacccagttcgtgactgtgtcacagcctggactgagtacatttacagcgcagctgccggctcctcagcccctcgcatcctccgccggtcactctactgctagtggacaaggcgaaaagaagccttacgaatgtacactctgtaacaagacattcacagcaaagcaaaactatgtgaaacacatgtttgttcataccggtgagaaacctcaccagtgcagcatctgctggaggagtttctcattaaaagattacctgattaaacatatggtgacccacacgggcgttagggcctaccagtgttctatctgtaataaacgctttactcaaaagagcagtttaaacgtacatatgcgcctgcatagaggtgagaagtcatatgaatgttatatctgcaaaaaaaagttctctcacaagactctccttgagcgtcatgttgcgttgcactccgccagcaacgggacgccccctgccggtacccctcccggagcgagggctggacctccaggggtcgttgcttgtacagaaggcaccacttacgtctgtagcgtctgcccggcaaagtttgaccagatcgagcagtttaacgaccacatgaggatgcatgtgagtgacggatag

SEQ ID NO: 247137 - DNA, 2007 bp, synthetic construct
  misc_feature 1..2007: note = Description of Artificial Sequence: Synthetic coding sequence
  source 1..2007: mol_type = other DNA
atgacggagagaatccattccatcaatctgcacaattttagcaatagcgtgctggagacactcaatgagcagaggaaccgcggacatttttgcgatgtaacggtgcgtatccacggctcaatgctgcgggctcaccggtgcgtcctggctgctggaagccctttcttccaggataaactcctgttgggctattccgatatcgaaataccctccgtagtcagcgtccagtcagtgcagaagctaatcgacttcatgtactcaggcgtcctgcgcgtgtcacagagtgaagcgctgcaaatccttactgctgcatcaattctccagatcaaaaccgtgattgatgagtgtacccggatagtgtctcagaatgtgggggatgtattccccggtatccaggactccggccaggacactcctaggggcaccccagagagcggtacctccggccagtctagcgataccgaaagcgggtatctgcaatcacacccacagcacagtgtcgatcggatttattctgcactgtacgcttgcagtatgcaaaatggcagcggtgagcgctctttctatagcggcgctgtggtctctcatcatgaaactgctctaggcctgcctagggatcaccacatggaggacccctcctggattacgcgcatccacgagcgctcccaacaaatggagcgataccttagtactaccccggaaacgacgcactgtaggaagcaaccaagacctgttagaatccagacactagtgggaaacatccatatcaaacaggaaatggaagacgactacgattactatggacagcagagagtacagattttggaacgcaatgaatccgaagaatgtactgaagatacagatcaggcggaaggcacggaatcagaacccaaaggggaaagtttcgactcaggagttagctcttccatcggcacagaacccgatagcgtggagcagcagttcggacccggtgcggctcgcgacagtcaggctgagccgacccagccagagcaggcggctgaggcacctgctgaggggggtccccaaactaaccagctagagacgggtgctagtagccctgaacgttccaacgaagtcgaaatggactctacagtgatcaccgtatccaactcttcagacaaaagcgtactgcagcagccctccgtgaacaccagtattggacagccacttccaagtacgcaattatatctgaggcagacagagactctcacctctaacctgcggatgccactgaccctgaccagtaatacccaagttattggaaccgctggcaatacttatcttcctgcactcttcaccactcagccagcgggaagtggcccaaagcctttcctgttttccctaccacaacccctagcagggcagcagacacagttcgtaacagtatcacaaccaggattgtcaacgttcactgcacagttacctgctccccagccattggcctcttcagccggtcacagcaccgccagcgggcagggcgaaaagaagccgtacgaatgtacactctgcaacaagaccttcacagcaaaacaaaactacgtgaaacacatgtttgtccacaccggtgagaagcctcaccagtgttccatttgttggagatccttctccctaaaagactatctcatcaagcacatggtgacccataccggggtgcgggcatatcaatgcagcatttgcaataagcggttcacgcaaaaatctagcctgaatgtccacatgaggctgcacagaggtgaaaaatcttacgagtgttacatttgtaaaaaaaaattcagtcacaaaaccctactcgagaggcatgtcgccctgcatagcgcatccaatggaacacctcccgcaggtactccacccggagcacgggcaggcccacctggcgttgtggcttgcaccgaaggcaccacttatgtgtgttccgtctgtcctgccaagtttgaccagatagagcaattcaatgatcacatgaggatgcatgtctctgatggctag

SEQ ID NO: 247138 - DNA, 2007 bp, synthetic construct
  misc_feature 1..2007: note = Description of Artificial Sequence: Synthetic coding sequence
  source 1..2007: mol_type = other DNA
atgacagagaggatccactccattaatttgcacaatttctccaactctgtcctggaaaccctgaacgaacagaggaataggggccacttctgcgacgtaaccgttaggatccacggtagcatgttgagagcccataggtgcgtgctggcagcaggcagtcctttttttcaggataaactgctgttgggttactctgacattgaaatcccgtctgtagtttccgtccagagcgtgcagaaactgatcgacttcatgtatagcggcgtgttgagggtgtcccagagtgaggccctccagatccttaccgccgcttccatccttcagattaagacagtaattgatgagtgtacgaggatcgtgtctcagaatgttggcgacgtctttccgggaatccaggactccggacaagacacccctcggggaacccccgaatccggaacaagcgggcaaagcagcgatactgagtctggctacttgcagagccaccctcagcactcagtggaccggatctattcagccctgtatgcctgttctatgcagaacggctctggggaacggtcattctactcaggtgccgtcgtaagtcatcacgaaaccgcgttggggttaccaagagatcatcacatggaagatccaagttggattacgaggatacatgaaagatcccagcagatggagagatatttgtcaacaacaccggagacaacgcattgtcgtaagcagcctagacccgtccgtattcagacactcgtggggaacatccacatcaagcaagaaatggaagatgactatgattattacgggcagcagagggtccaaattctcgaacgtaatgagtcagaagaatgcactgaggatacagatcaggcggaaggcaccgagtccgagccgaagggagaatcctttgactcaggtgtctcctctagcatcgggactgaaccagattctgtcgagcagcagtttggccctggggctgcacgggacagccaggctgaaccaacacagcctgaacaggccgctgaggccccagccgaaggcggaccccagaccaaccagctggagacgggggcttctagtcccgaacgtagcaacgaggtagaaatggattcaaccgtcattacagtctctaacagttcagacaaaagtgtcctgcagcagccgtcggtgaacaccagtattggtcaacccctaccctcaactcaactgtacctgcgtcaaaccgaaaccctgactagtaacttaagaatgcctctcacccttacttccaatacacaggtcatcgggacggctggcaacacgtatctgcccgcactgtttactacacagcccgcaggctcaggacctaaaccctttctgtttagcttacctcagcccctggcgggacaacagacccagtttgtcactgtcagccagccaggcctctccacgtttacagcacagctgccagctcctcaacctctagcttcatcggcaggccattcaactgcctcaggtcaaggagagaaaaaaccttatgagtgcacactatgcaacaagacgtttacggctaagcagaattatgtcaaacacatgtttgttcatacaggcgagaagccccatcagtgctctatctgctggcgatccttctccctgaaagactatcttatcaaacatatggttacccatactggcgtgcgcgcataccagtgctcaatctgtaacaaaaggtttactcaaaagtccagcctcaacgttcatatgcggttacaccgcggtgagaagtcttacgagtgctatatatgcaaaaaaaagttcagtcacaaaaccttgctcgaaagacacgttgctctccactccgcctctaatggaacacctcccgcaggtactcccccaggggctcgcgcaggacccccaggagtggtcgcttgtactgaaggtaccacatacgtgtgtagtgtgtgccctgccaaattcgaccagattgagcaatttaatgaccacatgcgcatgcatgtgagcgacggctag

SEQ ID NO: 247139 - DNA, 2007 bp, synthetic construct
  misc_feature 1..2007: note = Description of Artificial Sequence: Synthetic coding sequence
  source 1..2007: mol_type = other DNA
atgacggagcgcatccactctataaatctccacaacttctcaaactcagtgctagagacactaaatgaacagaggaaccgtgggcacttttgcgatgtgaccgtaaggatccatggctctatgctgagggcacatagatgcgtgctggctgccggtagcccttttttccaggataagttgctgctggggtattctgatatcgagatcccatctgttgtgtcagttcagtctgtacagaaactgattgatttcatgtactctggggttcttcgtgtctctcagtctgaagcacttcaaatactcacggctgcaagcatactgcagattaaaactgtgattgacgagtgtaccagaatcgtgtctcaaaatgtgggcgacgtatttccgggaattcaggattctggacaggacaccccccgtggtacacccgagtcaggcacttcaggtcagtcttccgacaccgagagcggctatctgcagtcgcatccgcagcactccgtggatcgcatttactccgccttatatgcctgctctatgcagaacgggtcgggcgagagatcgttctactctggagcagtggtcagccaccacgaaacagctcttggcttaccccgtgaccaccacatggaggatccgtcctggattacaaggatccacgaaaggagccagcagatggagcgttacctctcaaccaccccggagaccacacattgccgcaagcaaccgcgaccagtgcgcatccagacactcgtcggaaatatacatattaagcaagagatggaagatgactatgattactatggccagcagcgggttcaaatcctggagcgaaacgagagcgaggagtgtaccgaagatacagaccaggcagaaggcacagagtctgagcccaagggggagagttttgattctggggtgtcatcaagcattgggacagagcccgatagcgtcgagcaacagttcggacctggcgctgccagggactctcaggccgaacccactcagcctgaacaggctgccgaggctcctgctgaaggcggaccccagaccaatcagctcgagactggagccagttcacccgaacggagcaacgaggtcgagatggacagcactgttatcaccgtctcaaactccagtgacaaaagcgtgttgcagcaaccctctgttaatacttccatcggacagcccctgccctccacacagctgtacctacgacagacagagaccctaacgagtaaccttcgtatgcccctcacactgacctctaacactcaggtgattgggacagccggtaacacttatctgccggcattgttcactacacagcctgctggcagtggtcccaaacccttcctcttttccctcccacagcctctagctgggcaacaaacacagtttgtcaccgtaagtcagcccggattgtccaccttcaccgcccagttgcctgctccacagcccctggctagctccgccggacacagcacggcgtcgggccagggagagaagaagccttacgagtgtaccctgtgcaacaaaacattcacagctaaacagaattatgtgaagcatatgtttgtccacacaggtgagaagcctcaccagtgttccatttgctggagatcttttagcctcaaggactatctgattaaacatatggtaacacacactggggtaagagcatatcagtgtagcatttgtaacaaaaggttcacccagaaatctagcttaaatgtgcacatgagactccaccggggagaaaagtcctatgagtgctatatctgcaaaaagaagttttcccacaagactctcctcgaaaggcacgttgcgctccattcagctagtaacggcaccccacccgctggaactcccccaggggctagggccggacctccgggagtggtggcctgcacagaagggactacatacgtgtgcagtgtgtgtcctgctaagtttgaccagatcgaacagtttaacgaccacatgcggatgcacgtgtccgacggatag

SEQ ID NO: 247140 - DNA, 174 bp, synthetic construct
  misc_feature 1..174: note = Description of Artificial Sequence: Synthetic coding sequence
  source 1..174: mol_type = other DNA
atgactgaacggattcattccattaacctacacaacttctctaattccgttttggagactttaaacgaacagcgtaatcgagggcacttctgcgacgtgactgtgagaatccatggctcaatgctgagggctcaccgttgtgtgctcgctgccggttcacctttcttccagtag

SEQ ID NO: 247141 - DNA, 2007 bp, synthetic construct
  misc_feature 1..2007: note = Description of Artificial Sequence: Synthetic coding sequence
  source 1..2007: mol_type = other DNA
atgactgaaagaatccactcaatcaacctgcataacttcagtaacagcgttttagaaactctcaatgagcagagaaatcgcggacatttttgcgacgtgacagtgcgcattcacgggagcatgcttagagctcatagatgcgtcctcgcagctggcagcccctttttccaggataaactgctgctgggttactcggatattgagataccctcagtggtaagcgtacaaagcgtccagaagctgatcgacttcatgtactcgggggttttgagagtgagccaatctgaagctttgcagatcctcactgcagcgtcaattctacagattaaaacagtgattgacgaatgtacgcgcatcgtgtcccaaaatgtgggcgatgtcttccccggaatccaggacagcggccaggacacaccgagggggacacccgagtctggaacatcaggtcagtcatcagatacggagtcaggctacctccagtcacatcctcaacacagtgtagatcggatttatagcgccctttatgcatgctcgatgcagaatggttccggagaaaggagtttctattccggcgctgtcgtgtcacatcacgaaactgcactaggtctgcctagagaccatcacatggaagatcctagttggattacccgcatccacgagagatctcagcagatggagcggtacttgagtactacgcccgaaacaacccactgcaggaagcagcctaggcccgtcaggatccagaccttggtgggcaacattcacattaagcaggaaatggaggatgactatgattattacgggcaacagcgcgtccagatcctggaacggaatgaatccgaggagtgcacagaggataccgatcaagccgaagggaccgagtccgagcctaagggtgagtcttttgacagcggcgtttcctcatcgatcggcacggaaccggacagcgtggagcagcagtttgggccaggggctgctcgagacagccaagctgaaccgacacagcctgagcaagctgccgaggcccctgccgagggtgggccacaaaccaaccaactggagaccggcgctagtagtcccgagcggtctaacgaggtggagatggattctaccgtaattaccgtaagtaacagttccgacaagtcagtgctgcagcaaccttcagtcaacacaagcataggccagccgctcccctccactcagttgtacctccggcagaccgaaactctgacatcaaacttacgaatgcccctgaccctgactagtaacacacaggtcatcgggacggccggaaacacctacctgcctgcattgtttaccacacagcctgctggctcgggcccaaagccatttctattttctttgccccagccactggccggtcagcaaacccagtttgtgaccgtgagtcagccaggcttatctacattcaccgcacagctgccagcccctcagcctctcgcaagctcagctggacatagtaccgcaagcggacagggggaaaagaaaccatatgagtgtaccctgtgtaacaagactttcacagccaaacagaattatgtaaagcacatgttcgtgcataccggggaaaaaccccatcagtgctccatatgctggcggagtttttctttgaaagactatctgattaaacatatggtgacccatacaggtgtgcgggcttaccagtgttcaatctgtaataaaagatttactcagaagagctccctcaacgttcacatgaggctccatagaggcgaaaagtcctacgaatgttatatctgcaaaaagaaattctcccataaaaccctactggagaggcatgtggccctgcacagcgccagtaatggtacgccacccgcaggaacacctcctggagctcgagccggaccccctggcgtcgtagcctgtacagaagggaccacttacgtctgctccgtatgtcctgccaagttcgatcagattgaacagtttaatgatcacatgcgtatgcatgttagcgatggctag

SEQ ID NO: 247142 - DNA, 2226 bp, synthetic construct
  misc_feature 1..2226: note = Description of Artificial Sequence: Synthetic coding sequence
  source 1..2226: mol_type = other DNA
atgctcgaaaggaagaaaccaaaaacagcggagaatcaaaaggctagtgaggaaaacgagattacccaacccggtggctcctccgccaaaccaggcctgccctgtctaaactttgaggcagtcttatcacccgaccctgctctgattcactcgacccacagcttgaccaatagtcacgcccatactggcagtagtgattgcgatataagctgcaaggggatgacggagcgcatccattccatcaacctgcataacttctccaacagtgtgttggagacattaaatgagcagcggaacagaggacatttctgcgatgtgacagttaggatacacggttctatgctcagggcccaccgttgtgttctggctgccggttccccattctttcaggacaaacttctgctgggttattccgacatcgagattccatctgtggtgagtgtgcaatctgtgcagaaactgatagacttcatgtacagcggcgtactgcgagtttcacagagcgaggccttgcagattctgaccgcagccagtatcctccagattaaaacagttatcgatgagtgtacaagaattgtgagtcagaatgtgggggacgttttccccggaatccaggattcggggcaggacactcctagaggaacccccgagtctggcaccagcggccagtccagcgatactgagagcggatacctacagtcccatcctcagcatagtgtcgacaggatctattccgctctctacgcttgttccatgcaaaacggcagtggagagcggagtttctatagcggggctgtcgtgtcgcaccatgaaacggccttaggactgcccagagatcaccacatggaagacccaagctggattacacgaatccacgagcggtcacagcagatggaacgctatctgtctacgaccccagaaaccacgcattgtcgcaaacagccaagaccagttagaattcaaactctggttgggaacatccacattaaacaggagatggaggacgattacgactactatggccaacagcgcgtgcagatccttgagcgcaacgagagcgaggagtgtactgaagatacagaccaggcagaaggcaccgagagcgagcctaaaggggagtcctttgactccggagtttcttccagcatcggaacagaacctgatagcgtcgagcagcagtttggccctggggcagctcgagattcacaggccgagccaacccagcctgaacaggccgcagaagccccagcagagggcggaccccaaaccaatcaattagagaccggtgcctctagcccggaacggtccaatgaggttgaaatggactcaaccgttatcacggtgagtaactctagtgacaaatccgtccttcaacagccctccgtgaacacctctatagggcagcccttgcccagcacccagctgtacctacgccaaaccgaaactctcacatccaatctccggatgcccctgacgttaactagtaacacccaagtgataggaactgccggtaacacctatctcccggcacttttcactacccagcctgcgggatccgggccaaaacccttcctgttttccttgcctcagcctttggcaggtcagcagacccagttcgtgacagtttcgcaacccggactatctacatttactgctcagctccccgctcctcagcctcttgcctcgtctgctggacacagcaccgcttcaggtcagggagagaagaaaccttatgaatgtacgctctgtaacaaaacttttacagctaagcaaaattatgttaagcacatgtttgtccacaccggcgagaaacctcaccagtgttccatctgttggcgcagtttttcacttaaggattacctcataaaacatatggtcacgcacacaggcgtgcgcgcttaccagtgcagcatctgcaataagcgatttacgcaaaagtcgtctctgaacgtgcacatgcgactgcacaggggggagaagtcttatgagtgttacatttgcaagaagaaattctctcacaaaaccttactggagagacacgtagccctacactctgcaagtaatggaacccctccagccggaactccccctggagcacgtgcaggaccacccggtgtcgtcgcttgtacggaggggaccacctacgtgtgttccgtttgccctgctaagtttgaccagatcgagcagttcaatgatcatatgaggatgcatgtttcagatggttag

SEQ ID NO: 247143 - DNA, 2007 bp, synthetic construct
  misc_feature 1..2007: note = Description of Artificial Sequence: Synthetic coding sequence
  source 1..2007: mol_type = other DNA
atgactgaaagaatacattctataaacttgcataactttagtaattccgtgttagaaaccctgaacgagcagagaaacagagggcatttctgcgacgtcaccgtgaggatccacggctcaatgctccgggctcaccgctgcgtgctagcagctgggagccctttcttccaggacaaactcctgttgggttactcagatatagagattccatcggtggtcagcgttcagagcgttcaaaagctcatcgatttcatgtacagtggagtgctccgggtatcgcagtccgaggcactgcagattctcacagccgcatcaattctccaaatcaagactgtgatcgatgaatgcactcgtattgtctcccagaacgtgggagatgtgtttccaggaatccaggacagcgggcaggacacgccaaggggcactccagaatccgggacatccgggcaatcctccgatactgagagcggctatctccagtcacaccctcagcattcagttgaccgaatatatagcgccctgtatgcttgctcgatgcaaaatggcagcggggaacgctccttctatagtggggcagtggtttcccatcatgaaaccgccctggggctacccagagaccaccacatggaagatccctcttggatcactagaattcacgaacgctcacagcagatggaacgttacctgagcacgacccctgaaaccacccactgcagaaaacaacccagaccggtgcgaatccaaacgctggtgggaaacattcacataaagcaggaaatggaggatgactacgactactatggacagcagagggtgcagatcctcgagcgcaacgagtctgaggagtgcaccgaggataccgaccaagccgagggcacagagtctgaacctaagggagagagcttcgacagtggtgtgtctagctcaattggcaccgagccagattcagtagagcagcagttcggtcctggggctgcccgtgattctcaggccgagccgacacagcccgagcaggctgccgaagccccagccgaaggtggcccacaaacgaatcaactggagacaggcgcttcaagccccgaaaggagcaatgaagttgaaatggattccaccgtgatcaccgttagcaactcttcagataaaagtgtactgcaacaaccctccgtgaacacctcaatcgggcagcctctcccaagcacacagctgtatcttcgtcagactgagacccttacgagtaatctgaggatgcccctgacactgacctccaatacacaagtgataggtacagccggaaacacctacttgcctgctctattcacaactcagcccgcaggcagtggcccaaagcctttcctgtttagtctgccacagccgttagcaggccagcagacccagtttgtcacagtgagccaaccaggtctctccaccttcactgcacaactgcctgctccacagccgctggcatcttctgctggccactctacggcttctggccagggcgaaaagaagccctatgaatgtactctttgtaataaaacttttacagccaaacagaactacgtgaaacatatgttcgtccacaccggagagaagccacaccagtgctctatctgttggaggagttttagcctcaaggactacctcatcaaacatatggttacccacacaggagtccgcgcataccagtgctccatttgtaacaagagatttacacagaagtccagtttgaatgtgcatatgaggctccaccgtggggagaaaagctatgagtgctacatctgcaagaagaagttttcacataagactttgttagaacgccacgtggcactccacagcgcgtcaaatggcacccctccggcaggcacccctcccggagcacgggctggaccgccaggggttgttgcatgcaccgaaggtaccacttacgtgtgcagcgtttgtccagccaagttcgaccaaatcgaacagtttaatgaccacatgcggatgcacgtgtctgatgggtag

SEQ ID NO: 247144 - DNA, 60 bp, synthetic construct
  misc_feature 1..60: note = Description of Artificial Sequence: Synthetic coding sequence
  source 1..60: mol_type = other DNA
atgttagagaggaagaagcctaagacagccgaaaaccagaaagcgagtgaggaaaattag

SEQ ID NO: 247145 - DNA, 489 bp, synthetic construct
  misc_feature 1..489: note = Description of Artificial Sequence: Synthetic coding sequence
  source 1..489: mol_type = other DNA
atggctgagacagtggccgacacacgcagactgatcactaagccacagaaccttaacgacgcctatgggcctccttccaactttctggagatcgacgtgtccaacccacagacagttggagtgggcaggggacggtttaccacttacgagatccgggtgaagacaaatttgcctatcttcaaattgaaagagtcaactgtgagacgtcggtactccgactttgagtggctaagatctgagctcgagcgcgagtctaaagtcgtggtcccgcctttgccaggaaaagctttccttaggcagctgcccttccggggtgatgatggcatttttgatgataatttcatcgaggagcgcaagcagggtctagaacagttcattaacaaggtggccggacaccccctggcccagaatgagaggtgcctgcatatgtttctacaggatgagatcatcgacaagagctacaccccgtcgaaaatcagacatgcctag

SEQ ID NO: 247146 - DNA, 1308 bp, synthetic construct
  misc_feature 1..1308: note = Description of Artificial Sequence: Synthetic coding sequence
  source 1..1308: mol_type = other DNA
atggacactgctagtcacagcctcgttctgctgcagcaactgaatatgcaaagagagtttgggtttctgtgcgattgcaccgtagccattggggatgtgtactttaaggcccatagggctgttttagccgcatttagcaactatttcaaaatgatatttatccaccagacgtccgaatgcatcaaaatacagccaaccgacatccagcccgatatcttttcttacctcctgcatattatgtatactggaaagggcccaaaacagattgtggaccattctaggctagaagaagggatccgcttcctacacgcagattatctgtcgcacatcgcaactgaaatgaaccaggttttcagtcctgagactgtccaatcatccaacttgtatggcatacagatttccaccacgcagaagactgtcgttaagcagggcctcgaagtgaaagaggccccaagttctaacagcggtaatcgagcagctgtacaaggagatcaccctcagctgcaactgagcctagccattggactggacgatggtacagctgatcagcaacgagcttgtcctgcaacacaggctctcgaggagcaccaaaaaccacctgtttcgattaagcaggagcggtgcgaccctgagtccgttataagtcagagtcaccctagcccttcttctgaggtgactgggcctacctttacggagaattctgtaaagatacacctgtgtcactattgtggggaacgctttgattccaggagcaatttgcgccagcatctccacacacacgtgtccggaagtctccccttcggtgtgcctgcgagtattctggagagtaacgacctaggcgaggtccatccccttaacgagaatagcgaagccttggagtgtaggcgcctttcctctttcattgtgaaggaaaacgagcagcagcctgaccacactaacaggggcacaacagagcccctccagatatcgcaggtgtcgctcatttcaaaagataccgaacccgtagagcttaactgtaactttagtttttccaggaagagaaaaatgagttgcactatctgcgggcacaaatttcctagaaagtcccagctgctggagcatatgtacacacacaaggggaagtcttatcgttacaataggtgccagcgtttcgggaatgcacttgcgcagaggttccagccctattgtgactcgtggtcggatgtgtctctgaagagtagcaggctgtcccaagagcacctggatctgccctgtgcgctggagtctgagctgacgcaagagaatgtcgataccattctggtggagtag

SEQ ID NO: 247147 - DNA, 1308 bp, synthetic construct
  misc_feature 1..1308: note = Description of Artificial Sequence: Synthetic coding sequence
  source 1..1308: mol_type = other DNA
atggacactgcttcacatagtctggtgttattgcaacagctcaacatgcagcgcgagttcggttttctctgcgactgcacagtggctatcggtgatgtatatttcaaagcgcaccgggctgtgttggcggcattctcaaactattttaagatgatttttatccaccagaccagcgagtgtataaaaatacagcctactgatatccagcctgacattttcagctatctgcttcatattatgtatacaggcaagggccctaagcaaattgtggaccactctagacttgaggaaggcattcgatttctgcacgccgattacttatctcacattgccaccgagatgaatcaagttttttctccagaaaccgtacagagcagcaatctttacggcatccagatctccactacccagaagactgtggttaaacagggcttggaggtaaaagaagcacctagcagtaactccggcaacagggcagccgtacagggggaccatcctcagctgcagctgagcctcgcaataggtctcgatgacggtaccgctgatcagcaacgagcttgccccgctactcaagcgctggaggaacaccagaaacctccagtatctatcaaacaggagagatgcgacccagagagcgtaatttcccagagccacccctcccccagctctgaggttactggccctactttcacagagaattcagtgaagatccacctgtgtcactattgtggcgaaagatttgactcgcgcagtaaccttaggcagcaccttcacacacacgtatctggcagtttgccctttggcgtccctgcctctatcttagaatccaatgacttaggtgaagtgcaccctctcaatgaaaactctgaagccctggagtgtcgaaggctcagcagctttatagtgaaagagaacgagcagcagccagaccacactaacagaggcaccacggaaccattacagatcagccaagtttcccttatttcgaaggacaccgagcccgttgagctcaactgtaactttagcttcagtcgcaagaggaaaatgtcctgtacgatatgtgggcacaagttcccaagaaaatcccagctcctggaacacatgtatacccataaaggcaaatcttaccgctacaatcgatgccagaggtttggcaatgcgcttgcacaacggttccagccgtactgtgacagttggtcggacgtaagtctgaaatctagcaggttgagtcaggaacatcttgacctgccatgcgcgctagaatcggagctgacccaggagaacgtcgatactattctggtggagtag

SEQ ID NO: 247148 - DNA, 1464 bp, synthetic construct
  misc_feature 1..1464: note = Description of Artificial Sequence: Synthetic coding sequence
  source 1..1464: mol_type = other DNA
atgtcgctgcctccaattagactcccctccccatacgggtccgataggctggttcaactggccgcacgattaagacctgctctgtgtgacacattaatcaccgtggggagccaggagtttcccgctcattcgctcgtgcttgcgggagttagccaacagctggggagaagaggccaatgggccttgggagaggggatatcaccctccacgtttgcccagcttttgaattttgtgtacggcgaaagcgtagaactgcagcctggagagctgcgtccccttcaggaggcggcacgtgctctgggcgtccagagcctggaggaagcgtgttggagagcccgtggggatcgcgcaaagaagcccgatcctggtctcaagaagcaccaagaggagcctgaaaaaccttcccggaatcctgaacgggagctgggagatcccggagaaaagcagaagcccgagcaagtgtcacggacgggcggacgagaacaggagatgctgcacaaacactctccacccagaggcaggcctgagatggcaggagccacccaggaagcacagcaggagcagacacggagtaaggaaaaaagacttcaagccccagtcggccaaagaggcgctgacgggaaacacggggtgctcacttggctgcgagagaacccaggtggcagcgaagagagcctccgaaaactgcccggacctctccccccagctgggtcgctccagaccagtgtgaccccaagaccatcttgggccgaagcgccatggctggtggggggtcagcccgctctttggtccatcctgcttatgccacctaggtacggtattcctttttaccactctacacccacaaccggcgcatggcaggaggtatggagggagcagcgcatcccactgtccctgaatgctcctaagggcctgtggtcccagaaccagctcgcaagcagttcccccactccagggagcctgcctcagggtccagcccaattgagccccggagaaatggaggagtcagaccagggacacacgggggctcttgccacatgcgccggtcacgaggacaaggcaggatgtcctcccagaccacatccaccaccagccccacctgcaaggtctagaccttacgcatgttcagtgtgcgggaagagattcagcctgaagcaccaaatggaaacacattaccgggtgcataccggagaaaaacctttttcctgctctctttgtcctcagagaagccgggacttctccgctatgacaaagcatctgcgcacacacggagctgccccatataggtgttccctgtgtggagccggttgtcctagcctcgcctccatgcaagcccacatgagagggcactccccctcgcagctgccccctggctggaccattaggtcaacatttctgtattcatcttcacggccatccagaccctccacaagtccttgttgcccctcctcatctacgacttag

SEQ ID NO: 247149 - DNA, 1464 bp, synthetic construct
  misc_feature 1..1464: note = Description of Artificial Sequence: Synthetic coding sequence
  source 1..1464: mol_type = other DNA
atgagtctccctcctattcgattgccgagcccttatggttcagaccgcctcgtgcagctggcagccagactccgacccgctctgtgtgataccctcattaccgtgggttcccaggagttcccagcacacagcctcgtcctagctggagtctcgcagcagcttggtcgacgaggacagtgggcactcggagaaggcatcagccctagtacattcgcacagctcctcaatttcgtgtatggggaatctgtagaactgcaaccgggagagctaagacccctgcaggaagcggctcgtgcactgggggtgcagagcctggaggaagcctgctggcgcgctcgcggtgatcgcgctaaaaagcctgacccaggactgaaaaaacatcaggaagaaccagaaaaacctagtagaaaccccgagcgcgagcttggcgatccaggggagaagcagaaacccgaacaggtcagtcgaaccggcggaagagagcaggaaatgttgcataaacatagccctcctaggggcagacctgaaatggctggggctactcaagaggcgcagcaggagcagacacgcagcaaggaaaaacgcctgcaagcaccggtcggtcaacggggtgctgacggaaaacacggcgtcttgacttggctgagagagaaccctggagggtccgaagaatcgctgagaaagctgccagggcctctccccccagctggaagtctacagaccagcgtcactccacggccaagctgggctgaagcaccatggttagttggaggccagccggctctgtggtcaatcttgttaatgccgccacgctatggcatcccattttaccacagcacaccaacaaccggcgcatggcaggaggtgtggagggaacagcgcattcctttgagcctgaacgctcctaaaggactatggtcacagaaccaattggcgagtagctccccaacaccaggttcactcccacagggtccagcgcagctcagtccaggcgagatggaagaatctgaccaaggccacacaggcgcactggctacgtgcgcaggccatgaggacaaagccggatgcccaccgaggcctcaccccccacccgcacctcccgcaagatctcggccttatgcgtgcagcgtgtgtgggaagagattcagcttgaagcaccaaatggagacacactatcgagtccataccggtgagaaacccttttcatgcagcctgtgcccacaacgatctagagatttcagcgccatgactaaacatttaaggacccacggagccgctccttacaggtgctccttatgtggggcaggttgtccaagcctggcaagcatgcaagcacacatgaggggccattctccctcgcaacttccacccggttggacaatccggtccacatttctgtactccagctccaggccatcgagaccttccacctctccatgttgtccaagttcatctacgacatag

SEQ ID NO: 247150 - DNA, 2019 bp, synthetic construct
  misc_feature 1..2019: note = Description of Artificial Sequence: Synthetic coding sequence
  source 1..2019: mol_type = other DNA
atggagtcaagaaagttgatctctgcaaccgacattcagtacagtgggagcctgctgaatagcctgaacgagcagcgaggacacggcctcttctgcgacgtcactgttattgtcgaggataggaaatttcgagctcacaagaatattctatccgccagcagtacttactttcatcaattgttttcagtcgctggacaggtggtggaactgagtttcatacgcgctgaaattttcgctgaaatcctgaattacatctacagcagtaaaatcgtgagggtgaggtccgacctgcttgatgagctgataaaaagtggtcagctcctaggagtcaagttcattgccgagttaggggtccctctgagccaagtgaaaagtataagcggaaccgcgcaggacgggaataccgagcctctgccgcctgatagcggtgataaaaatttagtgattcagaagtccaaggacgaggctcaggataacggtgctaccatcatgcccatcataactgagagcttttcactctctgcagaggattatgagatgaaaaagatcatcgttaccgatagtgacgatgacgacgacgacgtgattttctgtagcgagatcctcccgactaaagaaactctcccgagtaacaacacggttgcccaggtgcagtccaatccagggcctgttgcgattagcgacgtggctccctccgcttctaacaactctcccccactaaccaatatcaccccaacccagaagctgcccacccccgtaaaccaggctaccctttctcaaacacagggctccgagaaactgctggtctcctccgccccaacccacctaacaccgaacatcatcttgctcaaccagacgcctctgtctaccccccctaacgtgagctcctcactgcctaaccatatgccctcttcaattaatttactggtgcagaatcagcagactccgaattcggcaattctgaccgggaacaaggcgaatgaagaagaagaggaggagattatcgacgacgatgatgatacaatctcctctagcccagattctgctgtgtccaatacaagcctggtgccacaggcagacacctcccaaaacactagcttcgacggatcattaatccagaaaatgcaaattcctaccctcttacaggagcctttgtccaattcgcttaaaatctcagacattatcacccgaaatactaacgacccaggtgttggctctaagcacctgatggagggccagaagattataaccttggacactgcaaccgaaattgaaggactgtctacaggctgtaaggtgtatgcaaatatcggtgaggacacgtatgacattgttatccccgtgaaggacgaccccgacgagggcgaagcacgactggaaaacgaaatcccaaaaacatctggttccgagatggctaacaaaagaatgaaagtaaagcacgatgaccactacgaacttatcgtcgatggccgagtgtattacatctgcatagtgtgtaaacggtcctacgtttgtttgacatccctccgacggcattttaacatccattcatgggaaaagaaatacccatgccggtactgtgagaaggtctttcctctggccgagtacaggacgaaacacgaaattcaccacaccggagagcgtaggtaccaatgcttggcatgcggtaaaagcttcattaactatcagttcatgtccagtcacatcaagtccgtgcacagccaggacccttccggcgattcaaagttgtaccgcctccacccctgtaggagccttcaaatacgccagtacgcatacctgagcgaccggtcatccaccatccccgctatgaaggatgatggaattggttacaaagtggacactggcaaggaaccgcctgttgggacgaccacatccactcagaataagcctatgacatgggaggacatcttcatacagcaagagaacgattccatatttaaacaaaatgtgacggacgggtcaaccgaattcgagtttattattcccgagtcttattag

SEQ ID NO: 247151 - DNA, 2019 bp, synthetic construct
  misc_feature 1..2019: note = Description of Artificial Sequence: Synthetic coding sequence
  source 1..2019: mol_type = other DNA
atggagtcccgaaaactcatcagcgcaacagatattcaatactccggaagtctgttgaactcactgaacgagcagcgaggtcatggactgttttgcgacgtgacagtgatcgtcgaagatcggaagtttcgcgctcacaagaacatcctcagcgcttctagcacgtatttccatcaattgtttagtgtcgctgggcaggttgtggagttgagtttcattcgggctgagatcttcgccgagatcctcaattatatatacagctccaaaatcgtgcgcgtgaggagtgatctcctggacgaattgattaaaagcgggcagctgctgggtgtcaaattcatcgcagaactcggggtgcctctttcgcaggtgaagagcatttcaggaaccgcccaggacggtaatactgagccactacccccagacagcggagacaagaatctagttatccaaaaatcaaaagatgaggcacaggacaacggggctaccatcatgcctattatcactgaatcattcagtctgagcgctgaagactacgaaatgaagaagatcatcgtgacagactccgacgacgacgatgatgacgtgattttctgttctgagattcttccgaccaaggaaacgttgccctccaacaataccgtggctcaggtacaaagcaatcccggtccagttgccatttcagatgtggctccttcagccagcaacaactccccacctttgacgaacattacacctactcagaaactcccgacccctgtaaaccaagccacactgtcacaaactcagggttcggagaagctcctcgtgtctagtgcccctacccacctgaccccaaatatcatcctcctgaaccagacaccattaagcaccccaccaaacgtgagctcctccctaccgaatcacatgccctcgtctattaacctactggtgcaaaatcagcagactccaaattccgctattctgaccggcaacaaagcaaacgaggaggaggaagaggagattatcgatgacgatgacgataccatcagttcctcccccgatagcgctgtcagtaatacctcactcgtcccgcaggcagacacatcccaaaatacctcttttgatggatcattaattcagaaaatgcagatccctaccctgctgcaggagccactgtccaattcccttaaaatttcagacataatcacgcggaacaccaatgatccaggtgtcgggtccaagcacctcatggaagggcagaagattataacgctcgatacagcaacggagattgaaggcctaagcacaggttgtaaggtgtatgcaaatatcggcgaagatacttacgatatcgttatccctgttaaagacgacccagatgaaggagaagccagactagagaatgagatcccgaagacgtctgggtccgaaatggctaataagcgaatgaaggtgaagcatgatgaccattatgaattgatagtcgacggccgagtttattacatctgcatcgtgtgcaagcgctcatatgtttgtctgacatcgctgagaagacattttaacatacatagctgggagaagaagtatccctgcaggtactgcgagaaagtgtttccgctcgcggaatacaggacaaagcatgagatccatcacacaggcgagagaagatatcagtgtctggcctgtggaaaatctttcattaattatcaattcatgtcaagccacattaagtccgtgcattcgcaggatcccagcggagatagcaagttatatagactgcacccctgccgatccctgcagataaggcagtatgcttatctgagcgatcgtagctctactatccctgccatgaaggacgacggcattgggtataaggtcgatactgggaaagagcccccagtcggaactactacatctacccaaaataaacccatgacatgggaagatatcttcatacaacaggagaacgacagcatcttcaaacagaatgtgactgacgggagtacagagttcgaattcatcatcccagaaagctattag

SEQ ID NO: 247152 - DNA, 2019 bp, synthetic construct
  misc_feature 1..2019: note = Description of Artificial Sequence: Synthetic coding sequence
  source 1..2019: mol_type = other DNA
atggagagccgtaaactgatttcagccacagacattcagtactcgggcagcctcctaaactctctcaacgagcaacggggtcatgggcttttttgtgacgtgaccgttattgtggaggataggaaattccgcgcacataagaacatactgtctgccagctccacatactttcatcagttattctcagtggccggtcaggtggtcgaattgagctttatccgggcagaaatctttgccgaaattctgaactacatttatagctccaagattgtgagggtgcgatctgatttactggacgaattgatcaaatctggccaattactgggagtgaaatttattgccgagcttggggtaccgctaagccaagtgaaatctatttcagggacagcccaagacggcaacactgagcctttacctcccgacagcggtgataaaaacctggtgattcagaagtcaaaggatgaagcccaggacaacggagccaccatcatgcctattattacagagagtttctctctctctgcggaggactatgaaatgaagaaaattattgtcacagactccgacgatgatgacgatgatgtgatcttctgttccgagatccttcccacaaaagagacattgccatccaataataccgtggcacaggtgcaatcgaatcctggaccagtggccattagcgacgtggccccatccgcctctaataattcccccccactgaccaacataaccccgacccaaaagcttcccacccccgtgaatcaagcaaccctttctcagacccagggaagcgagaagcttctggtcagctcagccccaactcacctcacacctaacatcatcctgctgaatcagacaccgctcagcacccccccaaacgtgtcttcttctttgcccaaccatatgccctcctctattaatctgctggtgcagaatcagcagacccccaattctgcaatcttgaccggaaacaaggcaaacgaggaggaggaggaagagattatagatgatgatgacgatacaatttcctcctcccctgatagtgctgtgtccaatacaagtctcgtccctcaggccgacacttcacaaaatacctcatttgacggctcgcttatacagaaaatgcagatcccgactctactgcaggagcccctgtctaatagcttaaagatttccgacatcataacacggaacacaaacgaccccggagtgggttccaagcacctgatggagggtcagaaaattatcacactcgataccgctactgagattgagggactgtccaccggctgcaaagtttacgcaaacattggtgaagatacatacgatatagttatcccggttaaagatgacccggacgagggagaggcgagactggaaaacgagatacccaagacgagcggctccgagatggcgaacaagcgaatgaaggttaagcacgatgaccattacgagctgattgttgacgggagagtgtactacatttgtatagtgtgcaagcggagctacgtgtgcctcacaagtctccgacgtcattttaacatccacagctgggagaagaaatacccctgcagatactgtgagaaagtgtttcctctggcagagtacagaaccaagcacgaaattcaccatacaggggagcgcaggtatcagtgcctcgcgtgtggtaagtcatttataaactatcagtttatgagtagtcatataaagtccgttcattctcaagatccttccggcgacagcaagctttatcgtttacacccttgtagatctctgcagattaggcagtatgcctatttgtccgacagatccagcaccattccagctatgaaagatgacggaatcggttacaaagtggatactggtaaagagcccccagtgggcaccacaacttccacccaaaataagcccatgacctgggaggatatcttcatccagcaggaaaacgactccattttcaaacagaacgtgaccgacggctcgactgagttcgagtttatcattcctgaatcctactag

SEQ ID NO: 247153 - DNA, 1515 bp, synthetic construct
  misc_feature 1..1515: note = Description of Artificial Sequence: Synthetic coding sequence
  source 1..1515: mol_type = other DNA
atgagtgttgagatggattcatcatcgttcatccagttcgacgtgccagagtacagctcgactgtgctttctcagctgaacgagctgaggctgcagggtaagttgtgtgacattattgtgcacattcagggtcagccctttcgcgcacacaaggcagtactcgccgcttcttccccctacttcagagaccatagcgcactgtccacgatgtccgggttgtcaatttcggttataaaaaaccccaatgtgttcgagcaattgctgtcgttctgctacaccgggaggatgtctctccagctgaaagatgtggttagttttctcactgccgcatctttcctgcagatgcagtgtgttattgacaagtgcactcagattctggagtccatccactcaaaaatttcagtcggcgacgtagatagtgtgaccgttggtgcagaggagaatccggagtctcgcaacggagtcaaagattcctcgtttttcgccaatcccgtggagatttctcccccatattgctctcaggggcgtcagcccacggcctcttccgatctgaggatggagacgaccccatctaaggctctccgctcccgtcttcaggaggaaggacactccgaccgcggtagtagtggcagtgtaagcgagtatgagattcagatagaaggggatcacgagcagggtgacctgctggtgcgagagagccaaattaccgaggtaaaagttaaaatggaaaagtccgacagaccaagctgcagtgattcctccagcttgggagatgacgggtaccacaccgagatggtggacggggaacaagtggtggctgtgaatgttgggtcctacgggagcgttctccaacacgcttattcatactctcaggcagcgagccagcccactaatgtctccgaggcctttgggtccctctcaaactccagcccatcccgcagcatgctcagttgtttccggggtggcagggctcggcaaaagcgggctctgagtgtacatcttcactccgacctgcaaggactggtgcaggggagcgactccgaagcgatgatgaacaaccctggatatgagagctccccccgtgaaagatccgcacgcggtcactggtacccttacaacgagaggctcatttgtatttactgcggtaagagcttcaatcagaagggctctctagatagacatatgcgtttacatatggggatcacccccttcgtgtgtaaattctgtgggaaaaagtatacgaggaaagaccagctggagtaccatatccggggacatacagatgacaaacctttccgatgcgaaatctgcggaaagtgcttccctttccagggcacgctcaaccaacacttgagaaagaatcaccctggagtagcagaggtccgttcaaggatcgagtccccggaacggactgatgtgtatgtggagcagaaactcgagaatgacgcaagtgcttccgagatggggcttgattccaggatggaaattcataccgtaagcgatgcacctgactag

SEQ ID NO: 247154 - DNA, 1503 bp, synthetic construct
  misc_feature 1..1503: note = Description of Artificial Sequence: Synthetic coding sequence
  source 1..1503: mol_type = other DNA
atggactcttcctcatttatccagttcgatgtgcccgaatactctagcaccgttttgagtcaacttaatgagctccggcttcaagggaagttatgtgatattattgtccacattcaaggtcagccattcagggcgcacaaggcggtgctggctgccagctcaccctattttcgcgaccacagcgcgctgtcgactatgtctgggctttcgattagcgtcataaagaatccaaatgtgttcgaacagctgctgagtttttgctatacagggaggatgtctctgcaactgaaggatgttgtaagcttcctcaccgccgcttctttcctgcagatgcagtgcgtgatcgacaagtgcacccaaattctggagagtatccactctaaaatctcagtaggagacgtggatagcgtgaccgtcggtgccgaagagaatcctgagtcccgtaacggcgtcaaagacagttctttttttgccaacccagtcgaaatctctccaccatactgcagccagggacgacagcccaccgcctcctcagatcttcggatggagacaacacctagcaaggccttgcggagcaggctgcaggaagaaggacactccgatcgcggtagtagtggctctgtgtcagaatacgagatccagatcgagggcgaccatgagcagggcgatcttctggtgcgagaatcccagattaccgaagttaaggtcaaaatggagaaaagtgatcgtccatcatgctccgacagttctagcctgggagatgatggttatcacaccgagatggtagatggagaacaagttgtggcagtcaacgtgggcagctatggttctgttctgcagcacgcatacagctatagtcaggccgcatctcaaccgaccaacgtctctgaagcatttgggagcctgtctaacagttcccctagtcggagcatgctgagttgttttagaggtggtcgtgcccgacagaaacgcgcactgtctgtacacctccattctgatttgcaaggactggttcagggcagtgacagcgaggctatgatgaataatccgggatacgagtcctcacccagagagcgctctgcacggggacattggtacccttacaacgaaaggctgatttgcatatattgcgggaaatcgttcaaccagaaaggatccctcgaccggcacatgagactccacatgggtattaccccattcgtgtgcaaattttgcggcaagaaatacaccaggaaagatcagctagaataccacatcagaggccacactgacgataagccatttcgctgcgagatatgtgggaagtgcttcccatttcagggaaccctgaatcagcatctacggaaaaaccatcctggcgtggccgaggtcagatcaaggattgagtcacccgaacgcaccgatgtgtacgtggaacagaagcttgagaatgatgcttccgcatctgaaatgggtctggacagtaggatggaaatacatactgtctctgatgcaccggactag

SEQ ID NO: 247155 - DNA, 3591 bp, synthetic construct
  misc_feature 1..3591: note = Description of Artificial Sequence: Synthetic coding sequence
  source 1..3591: mol_type = other DNA
atgatgacagttatgagtttaagccgggacttaaaggacgactttcacagcgacacagtgctgtcaattttgaatgagcaacgaattcgaggaatcctctgtgatgtgaccattattgtggaagacacaaagtttaaagctcactcaaatgtgctggcggcttcatccctgtacttcaagaatatattctggagccacacaatctgcatctctagccatgtgcttgaattggacgacttgaaagccgaggtatttactgagatcctaaactatatctatagctcaacagtcgtggtaaaacgacaagaaaccgtaacagacctcgcagctgccggtaagaagctcggcattagcttcctcgaggacttgaccgaccgcaatttctccaactctcccggaccatacgttttctgtatcactgagaagggagtcgtcaaggaagaaaaaaacgagaagaggcatgaggagccagccatcacaaatggccctcggatcacgaatgctttttcaataatagagaccgaaaactcaaataatatgttctccccgctggacctgcgcgcttcttttaagaaggtctccgactctatgagaaccgcaagtctctgtctcgagcgcaccgacgtgtgtcacgaggccgaacctgtcagaactctggcggaacatagttatgcagtgagctctgtggctgaggcttaccgcagtcagccggtcagggagcatgacgggagcagtcccggtaataccggtaaagaaaattgtgaagcgcttgccgcaaagcccaagacatgtagaaaacctaaaaccttctccattccccaagactccgactccgctacagaaaatatacctcctccacccgtgagtaacctggaggtgaatcaagagcggtcccctcagcccgctgcggtgcttacaagaagtaaatcacctaataacgaaggagacgtccacttcagccgggaagatgagaaccagagttccgacgttccaggtcctcccgctgctgaagtccctcccctggtctacaattgttcatgttgctcaaaagctttcgattcctcgacactgctatcggctcacatgcaactccataaaccaacccaagagcctctcgtctgcaagtattgcaataagcagtttaccactttgaacagactcgaccgccacgaacaaatttgtatgagatcttcccatatgcctatcccaggtgggaatcagaggttcttggagaattatccaacaattgggcaaaacggaggctcctttaccggtcccgaaccgcttctttcagaaaacaggattggggagtttagctctaccggcagcactttgccagataccgatcacatggtaaaatttgtgaatgggcaaatgctttactcctgtgtggtgtgtaagcgttcctatgtcactcttagcagcctgagaaggcacgccaatgtccatagctggaggcgaacttatccatgccactattgtaataaggtgtttgctctggctgaatatcggactagacatgaaatctggcacaccggggaaagaaggtatcagtgtatcttttgtcttgaaacatttatgacttactatatactgaagaatcaccagaagagcttccatgcaatcgatcacagattatctatatccaagaaaacagccaacggaggactgaagccttcggtgtacccctataagctttaccgcctcctgccaatgaagtgtaaaagggccccttataagagctataggaacagctcctatgaaaacgccagggagaatagccaaatgaatgagagtgcgcctggaacgtacgtggttcagaatcctcatagctctgaactcccaacactgaacttccaagatactgttaacaccttaaccaattcgccagccatcccgctggaaacaagcgcctgtcaagatattcctaccagtgccaatgtccaaaacgccgaggggactaagtggggcgaggaggccttaaagatggacctggataacaatttttatagcactgaggtctccgttagtagtacagagaacgcggtcagctcagacctccgagctggcgatgtacctgtgctcagcctcagcaactctagcgagaacgcggcaagcgttatctcctactcaggatctgccccatccgtgattgtgcattcttcacagttcagctctgtgattatgcacagcaatgccattgctgctatgacttcctccaatcacagggctttttctgatcccgcagtctcccagtctctcaaagatgactcgaagcccgagcccgacaaggtaggacgcttcgcatcaaggccaaaatctataaaagagaagaaaaagaccactagtcacaccaggggcgaaatcccagaagaaagtaattatgtcgctgatcctggcggatccctctccaagactaccaacatcgctgaagagacatctaagatagagacctatatcgccaaacccgctctccctggcacatcaaccaattcaaatgtggcacccttgtgccagatcacggttaagatcggcaatgaggctatcgtgaagaggcacatcttgggaagcaaattgttctacaagaggggtcggaggcctaagtaccagatgcaggaagagcctctgccacaggggaatgaccccgagcccagcggtgatagtccactgggcctttgccaatctgagtgtatggagatgagtgaagtgtttgatgacgctagcgatcaagactccacagataagccctggaggccttattacaattacaagcccaagaagaaaagtagacagctgaagaagatgagaaaagttaactggcgcaaggagcacggcaacaggtctcccagccacaaatgcaaatacccggctgaactggattgtgctgtcggaaaggcaccccaggacaaacccttcgaagaggaggaaacaaaagagatgcctaagcttcagtgtgagctgtgcgacggagacaaagctgtaggcgctgggaaccaaggaaggccacatcgccacctcactagccggccatatgcctgtgaattgtgcgccaaacagtttcagtcccccagcaccctcaagatgcacatgcgttgtcacactggagagaaaccttaccagtgtaaaacctgtggaaggtgcttctccgtccaggggaatttgcagaagcatgagagaatacatctgggactcaaagagttcgtgtgtcaatattgcaataaagccttcacactgaacgaaacattgaagatacacgaaagaattcatacgggagagaaaagataccattgtcagttttgtttccagcgttttctctatctcagcaccaaaagaaatcatgagcagcgccatatccgagagcacaatggcaaggggtatgcttgcttccagtgccccaaaatctgcaagaccgcagctgcgctcgggatgcaccaaaaaaagcacttattcaagagcccaagccagcaggagaagatcggtgacgtttgccacgaaaatagcaatcctctagaaaatcagcacttcattggaagtgaagacaacgatcagaaagacaatatccaaactggggtcgagaatgttgtcctatag

SEQ ID NO: 247156 - DNA, 3588 bp, synthetic construct
  misc_feature 1..3588: note = Description of Artificial Sequence: Synthetic coding sequence
  source 1..3588: mol_type = other DNA
atgaccgtcatgagtctgtcacgggaccttaaggacgacttccactcagacaccgtgctctctatcctcaacgagcagagaatccgcggaatactgtgcgacgtgaccatcattgtcgaggacacaaagtttaaagcacactctaatgttttagccgcatcttccctatatttcaagaatatattttggtctcacactatctgtatatcaagccacgtcctggagttggatgacctcaaggcagaggtgttcaccgagattctgaattacatttattcctccaccgtcgtggtgaaaaggcaggaaaccgttaccgacctcgccgcagccggtaagaagcttggtatcagcttcctggaggacctcacagatcggaacttctccaactcgccaggaccatatgtattttgtataaccgaaaaaggcgtcgtgaaggaagaaaaaaacgagaagaggcatgaagagccagctataaccaatggacctagaattactaacgcgttctccatcatagagactgaaaacagtaacaacatgttctctccccttgatctgagggcatcttttaaaaaagtgtccgattccatgaggaccgccagcttatgtttggagcggacggacgtgtgccacgaggccgaaccagtgcggacactggctgaacattcgtacgctgtgtcatctgtcgccgaggcatacagatcacagccagtccgggaacatgatgggtctagtcccggtaacactgggaaagaaaattgtgaggccttggccgctaaaccaaagacatgtagaaaaccgaagactttcagcattccgcaggattccgactccgctacagaaaacattccgcctccaccagtgtccaatttagaagttaatcaggaaagatccccccagcccgcagccgtgctgactcggtccaagagtcctaataatgagggagatgtccatttctcccgggaggatgaaaaccagagttcagatgtgcctgggccaccagccgctgaggttccaccactcgtgtacaactgctcctgttgttcgaaagcttttgattcctcaaccctactgtctgctcacatgcagctccacaaacctactcaggaaccactggtgtgcaaatactgtaacaagcaattcacaactttgaaccggcttgaccggcatgagcagatttgcatgaggagctcacatatgcctattccgggaggcaatcagcggtttctcgagaactacccaacaatcgggcagaatggcggatctttcactggccctgagcccctgcttagtgagaataggatcggagagttctcctcaactggcagtaccctgcccgacacagatcatatggtgaagtttgtgaatggccagatgctgtatagttgcgtggtctgcaaaaggtcctatgttaccctgtccagcctccggcgtcatgccaacgtgcacagttggcgccgtacgtatccctgccattactgcaataaagttttcgctctggccgagtatcggacaaggcatgaaatttggcatactggcgagcggagatatcaatgtattttctgtctggagacattcatgacttattacatcctgaagaatcaccagaaaagctttcacgcaattgaccaccgcttgagtatttccaaaaagacggccaatgggggattgaagccctccgtatatccttacaaattgtatcgactgttgccaatgaaatgtaagcgcgcaccatataagagttacagaaattccagctatgagaacgctagagaaaacagccaaatgaacgagagcgccccagggacatatgtggtccagaatccccattccagcgagcttccgactcttaacttccaggacaccgtcaataccctgaccaattcccccgcaatccccttggagacatccgcttgccaggacattcctacgagcgcaaatgtccagaacgccgagggcacaaaatggggtgaggaggccctgaaaatggacctcgataataatttctattccacggaggtgtcagttagttcaactgagaatgcagtgagtagtgatttacgcgcaggcgacgtgcccgtcctcagcttgtcgaacagctccgaaaatgccgcttcggttatctcatactcaggatccgctccctctgttattgtccattcgagtcagttcagttcagtgataatgcactcaaatgctatagcagcgatgacaagttccaatcacagagccttctccgaccctgccgtgtctcagtcactgaaagacgacagcaagcccgagcccgataaggtcggcaggttcgccagtcgccctaagagcatcaaggaaaaaaagaagacgacctcccatacacgcggagaaattcctgaagaatcaaactacgtcgccgacccgggtggctccctgtctaagaccactaatatcgctgaggagacctcaaagattgagacgtatatagccaagccagccctgccagggactagtacaaattccaatgtcgctcctctttgtcaaatcacggtgaaaatcggaaacgaggcaattgtcaagcgccacatcctagggtccaaactcttttataagcggggacgtcgccctaagtaccagatgcaagaggaacctctgcctcaaggcaatgatcccgaaccttctggagattccccactgggcctgtgccagagcgaatgcatggagatgagcgaagtgtttgacgatgcctcagaccaggattcaacagataaaccctggcgtccttattataattacaaaccaaagaagaaatcgagacagcttaagaaaatgcgaaaagtcaattggcggaaggagcacgggaaccggagcccaagccacaagtgtaaataccctgccgaactggattgtgcagtcgggaaagcccctcaggacaagcccttcgaagaagaggaaaccaaggagatgccaaagttgcaatgtgaactgtgcgacggcgacaaggctgtgggcgctggcaaccaggggaggccccacagacaccttacgtcacggccatatgcttgcgaactgtgtgcaaaacaattccagagccctagtactctgaagatgcatatgagatgtcatactggggaaaaaccatatcagtgcaaaacgtgtgggagatgcttctccgtgcagggcaatctgcagaaacatgagcgcatccatctcggccttaaggaattcgtctgtcagtattgcaataaagccttcactctcaacgagactctcaaaatacacgagagaattcacaccggagaaaagcgctaccattgtcaattctgcttccaacgcttcctatacctctcaactaagcgcaatcatgaacagcgccacataagagagcacaacggcaagggatatgcgtgctttcagtgccctaagatctgtaaaacagccgctgccctcgggatgcaccaaaagaagcacctgttcaagagtccatcacagcaagaaaagatcggggacgtgtgccacgagaacagcaatcccctggagaatcagcatttcatcggaagcgaagataatgatcaaaaagacaacattcagaccggcgttgagaatgttgtactgtag

SEQ ID NO: 247157 - DNA, 105 bp, synthetic construct
  misc_feature 1..105: note = Description of Artificial Sequence: Synthetic coding sequence
  source 1..105: mol_type = other DNA
atgaccgtcatgtctctatcacgcgatctcaaggatgatttccatagtgacaccgtcctgtctatcctaaatgagcaacgaatccggggaatcctatgcgattag

SEQ ID NO: 247158 - DNA, 285 bp, synthetic construct
  misc_feature 1..285: note = Description of Artificial Sequence: Synthetic coding sequence
  source 1..285: mol_type = other DNA
atgacggtgatgtccttaagcagggacctgaaggatgactttcacagtgatacggtcctgtcaattcttaacgagcagcggatacgcggaatcctgtgcgacgtaaccatcatcgtcgaggacaccaagttcaaagcgcacagcaatgtcctcgccgcatcctccttgtacttcaagaacatcttctggagtcacactatttgtatctcgagtcacgttctggagctcgacgacttaaaggctgaagtgtttaccgaaatccttaattacatctactcaagctag

SEQ ID NO: 247159 - DNA, 357 bp, synthetic construct
  misc_feature 1..357: note = Description of Artificial Sequence: Synthetic coding sequence
  source 1..357: mol_type = other DNA
atgacagttatgtcactgtcccgcgacctaaaggacgactttcattccgataccgtgctgagcatcctgaacgaacagcgaataaggggaatactgtgtgacgtgaccattatcgttgaggacacaaagttcaaggcacattccaacgtgctggccgcatcctcgttatatttcaaaaacattttttggtcacacacaatctgcatctcctctcacgtccttgaactcgatgacttgaaggctgaggtgttcacggagattctgaattatatttacagctcaacagtggtggtcaagcggcaagaaacagttactgacctcgcagcggcaggtaagaagcttgggatcagcttctag

SEQ ID NO: 247160 - DNA, 336 bp, synthetic construct
  misc_feature 1..336: note = Description of Artificial Sequence: Synthetic coding sequence
  source 1..336: mol_type = other DNA
atgaccgtaatgtctttgtccagagacttgaaagacgattttcactctgacactgtgctctcgatcctcaacgagcagagaatccgcggtatcctgtgcgacgtgaccattatcgtagaagacactaaattcaaggcacactcaaatgttctcgccgcatcttctctttactttaaaaacatcttttggtcgcacaccatctgtataagcagccatgtcctggagctggacgacctgaaggccgaggtattcaccgaaattctgaattacatctattcgagcacagtggttgtaaaaaggcaagagaccgtcactgatttggcggctgctgggtag

SEQ ID NO: 247161 - DNA, 453 bp, synthetic construct
  misc_feature 1..453: note = Description of Artificial Sequence: Synthetic coding sequence
  source 1..453: mol_type = other DNA
atgactgttatgtctctcagtagggatctcaaagacgatttccatagcgataccgtgcttagtatcctcaatgaacagcgtatcaggggcattctgtgcgacgtgacaataatcgtggaagataccaagttcaaagcccacagcaatgttttggctgctagtagcctgtactttaagaatatcttctggtctcacaccatctgcatctcatcacatgtcctcgagctcgacgacttaaaggccgaggtctttaccgaaattcttaactacatctacagctccaccgtcgtggtgaaacgacaggagaccgtgaccgacctcgcagcagccggtaaaaagttgggcatctcttttcttgaagacctgacggatagaaacttttccaacagcccaggcccttatgtgttttgtatcactgaaaagggcgtggtcaaagaggaaaaaaacgaatag

SEQ ID NO: 247162 - DNA, 2316 bp, synthetic construct
  misc_feature 1..2316: note = Description of Artificial Sequence: Synthetic coding sequence
  source 1..2316: mol_type = other DNA
atgactgtcatgagcctctctcgggacttgaaagacgacttccactcggacacagtgctgtctattctgaatgagcaaagaattagggggatcctgtgtgacgtgacaatcattgtggaagacaccaaattcaaggcacactcaaacgtcctggcagcctcatctctctacttcaagaatatattctggagccacaccatttgcatctcatcccatgtgttggagctggatgacctgaaggctgaggtcttcaccgagatcttgaattatatctactctagcactgtagtagttaagcgccaggagactgtaacagatctcgccgcagccggaaagaaactggggatatcttttctcgaggacctcactgatcgaaactttagcaatagcccaggcccatacgtgttttgcatcaccgagaagggagtggttaaggaagagaaaaatgaaaagaggcacgaggagcccgctatcaccaatgggccaagaatcactaacgccttcagcattatagagacagaaaattctaacaatatgtttagcccgctggacctccgcgcatcttttaaaaaggtgtcagatagtatgcgcacagcttcactttgtctggaacgaactgacgtgtgtcatgaagcagagcccgttcggaccctggccgagcatagctacgccgtgagttcagtagccgaagcatacaggtcccagccagtacgggaacacgatgggagtagtcctggaaataccgggaaggagaactgcgaggccctagccgcaaaaccgaaaacatgccgcaaacccaaaaccttctctatacctcaagattcggactcagccacagagaatatcccccctccacctgtctcgaatctggaggtaaatcaggagagatccccacaaccggcagcagtgcttaccaggagcaagtccccaaataacgagggagatgtccatttcagtcgcgaagatgagaatcagagctcagatgtgccaggcccacctgctgccgaggtccctcctcttgtgtacaattgcagctgctgttcaaaagctttcgatagttcgactctgctatcagcccatatgcagctgcacaaaccgacccaggaacccctagtatgtaagtattgtaacaaacaattcactacactgaaccgtcttgataggcacgaacaaatatgcatgcgatcatcccacatgcccatccccggaggcaatcagaggttcttggaaaactacccaaccatcggacaaaatggcggaagctttacaggacccgaaccactcctctcagagaatagaatcggagaattttcctccacgggtagcacacttccagatacggatcacatggttaaatttgttaacggtcagatgctttatagttgcgtggtttgcaagcgctcctatgttacactcagtagtttaagacgccatgcgaatgtgcactcctggcgacgcacctatccatgccactattgcaataaggtctttgccctggccgagtataggacacgacatgagatctggcataccggagaacgtagatatcagtgcattttttgcctcgaaacctttatgacatattacatactgaagaatcaccagaaaagctttcacgccattgaccaccggctgtcgatttccaaaaagactgcaaatggtggactgaaaccgagcgtatatccgtacaagctgtatagactgttgcccatgaaatgcaagcgcgctccctacaagagctacagaaacagcagttatgaaaatgccagggagaatagccagatgaacgaaagtgccccaggaacctatgtggtgcagaatccccactcatccgaattgcccaccctaaatttccaggatactgtgaatacactcaccaacagcccagctattccgctggagacctcggcttgtcaggatatccctactagcgccaacgttcagaatgctgaaggcaccaaatggggcgaagaagcgttgaagatggacctggataacaatttctattcaactgaggtgtctgtgtcttccactgaaaacgccgtatccagtgatctgcgggcaggggacgtaccagttctgagtttatccaattcatctgagaatgccgctagtgttataagctactctggctccgccccttctgtgatcgtacacagttcgcagttttcctccgtgataatgcacagcaacgcaattgccgctatgacatccagtaaccaccgcgcattctccgaccccgcagtcagccaatcattgaaagacgattctaagcccgagcctgataaggtgggacggtttgcaagcagaccgtag

SEQ ID NO: 247163 - DNA, 441 bp, synthetic construct
  misc_feature 1..441: note = Description of Artificial Sequence: Synthetic coding sequence
  source 1..441: mol_type = other DNA
atgacagtcatgtccctgagtcgcgatcttaaagacgacttccactccgatacagtgctaagcatactgaatgagcagcgtatccgaggtattctgtgcgatgtgactattattgtcgaggataccaagttcaaagctcactcaaacgtgctggcagcttcctcactctacttcaagaacattttctggtcacatacgatctgtatttcgtcacacgtcctggagttggacgatttaaaggccgaggtgtttacagagatcctcaattacatttatagcagcaccgtcgtcgtgaaaaggcaagaaaccgtgacagatctcgcagccgctggaaaaaagctgggcatttctttcctcgaagacctgaccgatcgcaatttctccaatagccctggtccctatgtgttctgcataacggagaagggggtggtgaaggaatag

SEQ ID NO: 247164 - DNA, 633 bp, synthetic construct
  misc_feature 1..633: note = Description of Artificial Sequence: Synthetic coding sequence
  source 1..633: mol_type = other DNA
atgacagtcatgagtctcagcagagatctgaaagatgatttccatagtgacacagtgttaagcatccttaacgagcagcgcataagaggaatcctgtgtgatgttacgatcatagttgaggacacaaaattcaaggctcattctaatgtcctggcagcatcctccttgtattttaagaacattttctggtcacatacgatatgtatcagctcacacgtcctggagttggatgatctcaaagcagaagtgtttacagaaattctaaactacatttatagttccaccgtcgtggtgaagcgacaagagaccgtcactgaccttgcagctgcagggaaaaaacttggaatctcttttttggaagatctgacagaccgaaacttcagcaatagtcccggtccatatgtgttttgtattaccgagaagggggtggtcaaggaggagaagaacgaaaaaaggcacgaggaaccagccataaccaatggaccgaggattacaaacgctttcagcatcattgagaccgaaaattccaataacatgttctcacctttagacctgcgggcttccttcaaaaaagtttctgactctatgagaaccgcaagcctctgcctggaaaggactgatgtgtgtcactag

SEQ ID NO: 247165 - DNA, 327 bp, synthetic construct
  misc_feature 1..327: note = Description of Artificial Sequence: Synthetic coding sequence
  source 1..327: mol_type = other DNA
atgacagtgatgtccctgtccagggatctgaaggatgatttccattctgacacagtgttaagcatcctgaacgagcagagaatccggggaatcttgtgcgatgttacaattatcgtcgaggacaccaagtttaaggcccacagcaacgtcctcgccgcatccagcttatactttaagaatatcttttggtcacatacgatctgtatctcttcacacgtgcttgaactggatgatctgaaggctgaggtctttaccgagatcctgaattatatttactcatccacagtcgtggttaaacggcaggaaacagtgactgatctagcgtag

SEQ ID NO: 247166 - DNA, 213 bp, synthetic construct
  misc_feature 1..213: note = Description of Artificial Sequence: Synthetic coding sequence
  source 1..213: mol_type = other DNA
atgacagtcatgtctctcagccgggacctcaaagatgatttccactccgacaccgtgttgagcattctgaacgagcagcgcatcaggggaatcctgtgcgatgtcacaatcatcgtggaggataccaagttcaaggcacatagtaatgtcttagctgccagctccctgtatttcaagaacatcttctggagtcatactatttgcatttcatag

SEQ ID NO: 247167 - DNA, 3588 bp, synthetic construct
  misc_feature 1..3588: note = Description of Artificial Sequence: Synthetic coding sequence
  source 1..3588: mol_type = other DNA
atgactgttatgagcctgagtcgcgacctgaaggacgactttcactcagatacggtgctgagtatcctcaacgagcagcgcatccgcggaattctgtgcgatgtgacgatcattgtcgaggataccaagttcaaagcccactcaaacgttctcgccgcatcttcgctctacttcaaaaacattttctggtcccatactatctgcatatcatctcacgtgctggaactggacgatttgaaggccgaggtttttacagagatcttgaattatatctacagcagtactgttgtggtcaagcgtcaagagacagtgaccgacctggccgctgccggtaaaaaactggggatatcatttctcgaggacctgactgaccgcaacttctctaatagcccgggaccatacgtgttctgtatcacagagaagggagtggtgaaagaagaaaaaaacgagaaaagacacgaggagcccgcaatcactaatggcccacgaatcacaaacgcgtttagcattattgaaacagagaattccaataacatgtttagtcctttagatctccgagcttcattcaaaaaggtcagtgacagcatgagaacagccagcttgtgtcttgaaagaacagacgtatgccatgaggctgagcctgtgagaactcttgccgaacactcgtacgccgtgtcttccgtagcagaggcctataggtcacagccagttagggagcacgacggctcctcccccggtaacacgggcaaggaaaactgtgaggctctcgccgctaagccgaaaacctgccggaagccgaagacgttcagcattcctcaggactccgactccgctaccgagaacatcccccctccacccgtctcaaatctcgaggttaaccaggagagaagtccacagcccgcagccgtgctgaccagatccaagtccccaaataatgaaggggacgtccatttctcaagagaagacgagaaccagtcgtcagacgtgcccggacctccagctgcagaggtgccccctcttgtgtataattgttcctgttgctctaaagctttcgatagcagtactctcctgagcgcccacatgcagcttcacaagcctactcaggaacctctcgtctgcaaatactgtaataagcagttcaccacattgaacaggcttgatagacatgaacagatctgtatgcggagcagccatatgcctatcccgggtgggaaccagcgatttctggaaaactaccctacaatcggccaaaacggcggtagcttcactggccctgaaccattactatctgagaatagaatcggagagttttcttctaccgggagcactctcccagatacagaccatatggtaaagtttgtcaacggacagatgttgtactcttgtgtcgtgtgcaagcgatcctatgtgaccctgagtagccttcgacgtcatgccaacgtccattcatggcgaagaacttatccttgtcattactgcaataaagtcttcgccctggcagaatacagaacccgacatgaaatttggcacaccggtgaacgtaggtatcagtgcatattctgtttggagacattcatgacctactacatcctgaagaaccaccagaaatccttccatgctattgatcataggttgtccatatccaaaaagacagccaacggcggtctaaaaccatccgtatatccctataaactctatcggctcctgccgatgaaatgtaagcgggcaccctataaatcttaccgcaattcttcgtatgaaaacgccagagagaatagccaaatgaatgagtccgcaccaggcacatacgttgtacaaaatcctcactcctccgagctcccgaccttgaacttccaagataccgttaatacactgaccaattcacccgcaatcccattggagacttccgcctgtcaggatatccccactagcgcgaatgtgcaaaatgccgaggggactaaatggggggaagaggcccttaagatggatttagacaataacttctactctactgaagtgtccgtgagtagtacggagaacgcagtctcctcggacctgcgagccggagacgtcccagtgctttcattgagcaattctagtgaaaatgcagcatctgttatctcttattctggtagtgccccatctgtgatcgtgcatagctcccagttctcctccgtgataatgcacagtaatgctattgccgcaatgaccagcagtaaccatcgtgctttctccgacccggctgtgagccagagtctgaaagacgattccaagcctgaacccgataaagtggggagattcgctagcaggccaaaatcgattaaggagaaaaaaaagactactagtcatactagaggtgaaatcccagaggagtctaattacgttgctgatccaggcggttccctctcgaagacgactaacatagctgaagaaacctcgaaaattgagacttatattgctaagcctgctctacccggtacctccaccaacagtaatgttgcccctctctgtcagatcactgtaaagattgggaacgaggctatagtaaagaggcatatcctcggatccaagttgttctacaaacgcggtcgacgccctaaataccagatgcaagaagaaccactgccccagggcaacgaccccgaaccttcaggagatagcccactgggactctgtcagtcagaatgtatggaaatgtccgaagtcttcgacgacgcgtccgatcaggatagcacagataaaccttggagaccatactacaattacaaacccaagaagaaatcccgccaactgaaaaaaatgagaaaggtgaattggagaaaggagcatggtaatcgtagtccttctcacaaatgtaagtatcctgccgaattggattgtgccgtaggtaaggcacctcaggacaaaccctttgaggaagaggaaacgaaagaaatgcccaaactgcagtgcgagctatgcgatggagataaggccgtgggggcaggaaaccagggcaggcctcatagacacctcaccagcagaccttacgcctgcgagctgtgtgctaaacagttccaatcaccaagcacactgaagatgcatatgcggtgtcacaccggtgagaaaccttatcagtgcaagacctgtggaaggtgttttagcgtgcagggaaatctccagaagcacgagcgcattcacctcggccttaaggagtttgtgtgtcagtactgtaacaaagcctttacattaaacgagactctgaagattcatgagcgaatccatacaggtgagaaaagataccattgccagttttgtttccaacggtttctttacctaagcacaaagcggaatcatgagcaaagacacattcgggagcacaatggaaagggatatgcctgttttcaatgcccaaagatttgtaagaccgccgctgcattgggcatgcaccagaagaagcacttattcaaatcgccaagccagcaagagaaaattggggatgtctgccatgaaaattccaacccactcgagaatcagcacttcataggctctgaggacaacgatcagaaggataatatccaaacaggggttgaaaatgtggtcctttag

SEQ ID NO: 247168 - DNA, 3042 bp, synthetic construct
  misc_feature 1..3042: note = Description of Artificial Sequence: Synthetic coding sequence
  source 1..3042: mol_type = other DNA
atgcctcccccagcagaagtgacagacccctctcatgctcccgctgtgctgagacaactcaacgaacagaggctgcggggactgttttgcgacgtcacactgatcgctggagacaccaagtttcctgcacatcgtagtgtactggccgcaagtagtcccttcttccgagaagctctgctcaccagtgcgccactgccacttcccccagctactgggggtgccgctccgaatcccgctacaactacggcagccagttcttctagcagtagctccagttcaagttctagctctagcagctccgcctcttcatcctcatcaagctcatcgtctagcccacctcctgccagtccaccagcaagctctcccccaagggtgctggagctgccaggagtccccgctgctgctttcagcgacgtgttgaatttcatatattctgcacggttggcgttgcccggaggaggcggagatggggctgcggttgctgaaattggagctttaggcaggaggttaggcatttccaggctccaggggttgggagaagggggagacgcatgggtccctcccactcccgcacccatggctacatcgcagccagaggaagactccttcggccctgggcctcggcctgcaggcgaatgggaaggagacagagccgaggcccaggccccagatctgcaatgcagcctcccgagaaggccgttaccatgtccacagtgcggcaagagtttcatccacccgaagcgtcttcagacacacgaggcccaatgtcgcagaggagcctcaactaggggctctacaggactcggcgctggaggggcaggacctggcggtccagctggcgtggatgcgtccgctctgcctccacccgttggattcaggggcggacctgagcatgtagtcaaggtagtgggagggcacgttctgtatgtttgtgccgcatgtgaacgctcttatgttaccttgtctagtcttaaaagacactccaatgtgcatagttggagacgcaaatacccgtgccggtactgcgaaaaggtattcgccctagccgagtaccggactaagcatgaggtgtggcacaccggtgagcgcagatatcaatgcatcttctgttgggaaactttcgtgacatattataatctcaagactcaccaacgggctttccatgggatctctccaggcttgctggcctccgaaaaaacccctaatgggggttataagcctaaattgaatactctcaagctgtatcgacttctccctatgagggccgcaaagaggccctacaagacgtattcccagggagcccctgaggctcctttgtcgcctacccttaacacacccgctcctgtagccatgcccgcttcacctccaccgggtcctccccctgcgccagagcctggacctcccccatccgttattacattcgctcaccctgccccatccgttattgtccacggcggttcaagcagcgggggaggcggtagcggtacagccagcactgggggaagccaggcggcttcagtgattacttacacagctcctccacggcctcctaaaaaaagggagtatccacctcctccacccgaacctgccgcaacccccacatctccagctactgcggtaagtcccgctactgctgccggaccagcgatggcaacaaccacagaggaggccaaaggaagaaatccaagagcgggaaggacgcttacatataccgccaaacccgtaggaggtattggcggaggtggcggacctccaactggggcaggtagaggcccatcacagctgcaagcccctccccctctgtgtcagatcacagtgcgaataggcgaagaagctattgtcaaacggcgaatctcagagactgatcttcgccctggagagctgtctggagaagagatggaagaatcagaagaggacgaggaggaagaggatgaagaggaagaagaagaagatgaggaagagagcaaggccggtggggaggatcagctgtggagaccctactattcctataagccaaaacgaaaagccggtgccgcaggaggtgcttctgtcgggggatcaggtctccctaggggcaggagacctcccaggtggcgccagaaattggaaagacgcagctgggaggagacccctgccgctgaaagtcctgcaggcagagctcggacagagaggagacaccggtgtggggattgtgcgcagactttcaccaccctgcgcaagctccggaagcaccaggaagctcatggaggaggctctcatagctcaagggcaggtcgcagaccaagcaccaggtttacttgccctcactgtgcgaaggtgtgcaagaccgccgcagcactcagtagacacgggcagaggcacgccgcagaacgacccggtggaactcctacccctgttatcgcatatagtaagggttctgccggtacccgtccaggagacgttaaagaggaggctccccaggagatgcaagtaagttcctcctcaggcgaagccggtggtggctctacggctgccgaggaggcaagcgagaccgccagtctgcaagatcctatcatcagcggtggggaggagccccctgttgtcgctagcggcggaagctatgtgtatcctccagtccaggagtttccactcgccctgattgggggagggagggaacctgggggagggagggggaagtctggttccgagggacctgttggagcgggagagggagaccggatggaaggcattggagcggcaaaggtgaccttttatccagagccttaccctctggtgtatgggcctcaacttttggcggcttatccgtacaatttctcaaatttagctgcactgccggtggcacttaatatggtgctcccggatgagaagggcgctggcgctctcccttttctccccggagtatttggctacgccgtgaacccccaagctgccccacctgccccaccaactcccccaccccctactctcccacctcccatacctccaaagggggagggcgagcgagccggtgtggagcggactcagaagggcgatgtgggctag

SEQ ID NO: 247169 - DNA, 3042 bp, synthetic construct
  misc_feature 1..3042: note = Description of Artificial Sequence: Synthetic coding sequence
  source 1..3042: mol_type = other DNA
atgcccccaccagcagaggttactgatccttctcacgccccagccgtgctccgccaactgaacgaacaacgactgaggggcctgttttgcgatgtgactttgatagctggcgatactaagttccccgctcaccgcagcgtgctcgcagcctctagccctttctttcgggaagctcttctaacatcagcgccactgcccctgcccccagccaccggaggcgcagctcccaatcccgctacaactacggctgctagctcatcctcatcttcatcctcaagttccagtagtagctcctccagtgcgtcttctagttcgtcttccagctcctcttcccctccgccagccagcccccctgcctctagccctccaagggtgctagagctaccaggcgtcccggctgcggctttcagcgacgtccttaatttcatctatagcgcacggctggcactaccaggcggtgggggagatggagccgctgtggccgaaatcggtgcattaggcagaaggctgggcatctccagacttcagggcttaggtgagggaggtgacgcttgggtgcctcccactcccgcacccatggcgacaagtcagccagaagaagactcattcggtcctggtccaagaccagcaggtgaatgggaaggtgatcgcgctgaggctcaagcgccagaccttcagtgtagcctgcctcggagacctcttccctgcccacagtgtgggaaaagtttcatccacccgaagcgattacagacccatgaagcacagtgtcgacggggagctagtacaaggggctcaaccgggcttggggctggaggagccggacctggcggtcctgctggggtcgatgctagtgccctgccacccccagtcggtttccggggtggcccagaacatgtggtcaaggtggtcggaggccacgtgctttatgtctgcgctgcttgcgagcgttcttatgtgactctgtcttctctgaagcggcactctaacgtacattcttggcggagaaaatatccttgccgctactgcgagaaagttttcgctctagcagaatatcgaacaaagcatgaggtgtggcacaccggtgaacgcagatatcagtgtatcttttgctgggagactttcgttacctactacaaccttaagacccatcaaagagcattccatggcatttctccaggtcttttagctagtgagaagacaccaaacggcggatataagccaaaacttaacaccttgaaactttaccggctccttccgatgagagctgccaaaaggccttacaagacttatagtcaaggggcacctgaagctcccttgtctcccaccctgaatacacctgcacctgtggcgatgcccgcaagccccccacccggaccaccaccggctcctgaacctgggccacctccttccgtgataactttcgcgcatccagcacctagcgtcatcgtccatggtgggagctccagcgggggaggcggaagcgggacggcctcaactggtgggtcccaggccgcatccgtgataacatacactgctcctcctcggccacctaagaaacgagagtatcccccacctcctccagaaccagctgctaccccaacctcaccagcgacagccgtatcacctgccactgctgccggtcctgctatggccacaactaccgaggaagccaaagggcgtaaccctcgagcaggcaggacactcacatacacagctaagccagttgggggaattggcggaggaggtgggccacctacgggggcagggcgtgggccttctcaacttcaggcacctccgcctctctgccaaatcacagttcgcatcggagaggaggccatagtcaaaaggaggatatccgaaactgatctgcgtcctggagagttgtctggcgaggagatggaggaatccgaggaagatgaagaggaagaagacgaagaggaagaagaagaagatgaagaagagtcaaaggccggaggcgaagaccagctttggaggccttactactcctacaagccaaagaggaaggccggagcagccggtggcgctagcgtgggcggttccggcctcccccgaggtcgacgtcctcccaggtggcggcagaaactggaacgtcgcagctgggaggaaacccccgcagccgagtcaccagccggtcgagctaggaccgaacgtaggcatcgttgcggagactgcgcccagacgttcacgactttaaggaagctcagaaaacatcaagaggcccacggtggcggatcacatagcagccgcgctggtcggaggccttctaccaggtttacatgcccacactgtgccaaggtgtgcaagaccgcagcggctctttcacgccatggtcaacggcacgcagccgagaggcccggagggaccccgacccctgtgatcgcatactctaaaggtagcgccggaactaggccaggcgacgtgaaagaggaagctccacaagaaatgcaggtctctagttcgtccggggaagctgggggaggcagtactgctgccgaggaggccagcgaaaccgcgagcctgcaggacccgatcatcagcgggggtgaggagcctccagtcgttgcctccggcggttcttacgtttatcctcccgtgcaggagttccctctggctctcattggcggtggacgcgaacccggaggaggacgtggcaaatctggctctgaaggaccagtgggcgctggcgaaggggacagaatggaggggattggcgctgccaaagtgacgttctatcctgagccttatccattggtgtatggacctcagctcctggccgcatacccctacaactttagtaacctggcagccctccctgtggcacttaatatggtgcttccagatgagaagggggctggtgccctcccctttctgcccggagtattcggctacgccgtcaatccccaggcagctccacctgcccctcccacgccccctcctccaacactgccgccacctatcccccctaagggggagggggaacgcgctggggtagagagaacccagaagggagacgtgggttag

SEQ ID NO: 247170 - DNA, 708 bp, synthetic construct
  misc_feature 1..708: note = Description of Artificial Sequence: Synthetic coding sequence
  source 1..708: mol_type = other DNA
atggagctgcccaactactctaggcagcttctacaacagctgtataccctctgtaaggagcaacagttctgtgattgtaccatttctatcggcacgatctacttccgggctcataagctggttttggcagctgccagcctgctctttaagaccctcctggacaataccgacaccatctcaatcgacgcaagtgtcgtctctcccgaggagttcgcgctcctgttggagatgatgtacacgggcaagttgcctgtcggtaaacacaatttttccaaaattatctcactggcggacagcctgcagatgtttgatgtggccgtttcatgtaagaatcttcttacttcccttctagccgcaacacccggtggccctgtaaaggcagagaccgaggaagccgctcatagcgtgtcccaggagatgtcagtgaattcacctaccgcacaggaatcgcaaaggaatgctgagactccagcagagacaccaacaactgccgaagcttgttcgccttcccctgccgtccaaacattcagtgaggccaagaagacctctacggagccaggatgcgagagaaagcattaccaactaaatttcttgttagaaaatgagggcgtgtttagcgatgctctaatggttacccaggacgtcctgaaaaaacttgaaatgtgctccaactgctgcgtgcctgtggaagctgttcctattttttag

SEQ ID NO: 247171 - DNA, 3384 bp, synthetic construct
  misc_feature 1..3384: note = Description of Artificial Sequence: Synthetic coding sequence
  source 1..3384: mol_type = other DNA
atggagctgcctaattattccagacaactgctccagcaactttacactttatgcaaggaacaacagttctgcgactgcactatcagtattgggaccatctacttcagggctcataaactcgtgctagcggcagctagcttgttgtttaaaacgctgctggataacactgatacgataagtatcgatgcaagcgtcgtgtcccccgaagaatttgctctcctcctcgagatgatgtacacaggaaagctcccagtgggtaaacacaacttcagcaaaattatatcgctggcagatagtctgcagatgttcgacgtcgctgtgtcctgtaagaacctgttgacatccctggtgaattgctcggtccagggccaagtggtccgagatgtgagtgctccctcatccgagacttttcgaaaagaacctgaaaaaccacaggtggaaattctgagctcagaaggagcgggtgaaccccactcttctccagagctcgctgctaccccagggggtcctgttaaagcagagacagaagaagccgctcatagcgtttcccaggaaatgtcagtcaatagccccacagcgcaggagagtcagaggaacgcggagaccccagctgagacaccaactacagccgaagcatgcagcccatctccagctgtgcagacgttttcagaagcaaagaagacttcaacggagcctgggtgcgagagaaagcattatcagctgaacttcctcctggagaatgagggtgtgttcagcgatgcactgatggtaacgcaggacgtactgaaaaagttggaaatgtgctcagagattaagggacctcaaaaggaagtgatcctgaactgttgtgaaggtcgcactcccaaggagacaattgagaatctgcttcacaggatgacagaggagaaaacactgaccgccgagggtctcgttaaattactgcaggccgtaaaaactacattccctaatctggggttgcttctcgagaaactgcagaagtcagctacgctaccctcaacgactgtacaaccatctcccgatgactatggtacggaactcttacgaagatatcacgaaaatctatcggaaatcttcactgacaaccagatcctcctcaaaatgatatcacacatgaccagcctggctcctggggagagagaggttatggagaaactggtgaaacgtgactctgggagtggcggatttaacagcttgatctccgctgtgctggaaaaacagaccttgagcgccaccgcaatctggcagctgcttctggtcgtgcaggaaactaaaacctgcccactggatctgcttatggaagagattcgacgggaacccggtgctgatgcattctttagggctgtgacaacccccgaacatgctacactcgaaactattcttaggcataatcagctgattctagaagccatccagcagaagatcgagtacaaattattcacttctgaagaggaacatctcgcggaaactgtcaaggagattctgtcaatccccagtgagactgccagcccagaagcctctctcagggcagtcctaagccgtgcaatggaaaaatccgtcccagccattgagatctgccacctcttatgtagcgtgcataaatcttttcctggattgcagccagtaatgcaggagctggcatacatcggtgtcttgaccaaggaggacggcgagaaggagacttggaaggtgtcgaacaaattccacctggaggctaacaataaggaggatgaaaaggctgcgaaggaagattcacaacctggcgagcagaacgatcaaggtgaaacaggcagtctgcctggtcagcaggagaaagaggcaagtgcatctcccgaccctgcgaaaaaaagcttcatctgcaaagcatgcgacaagtcttttcacttctactgccgtttgaaggtgcacatgaaacgttgcagggtggcaaaatccaaacaggtgcagtgcaaagagtgttctgagactaaggatagtaaaaaggagctagacaaacatcagctggaggcccacggtgcgggtggggagccagatgcgcctaaaaagaagaaaaaacgcctaccagtgacttgtgacctgtgtggacgggaattcgcgcacgcaagcggcatgcagtatcataagctgaccgagcatttcgacgagaagcctttcagttgcgaggaatgcggggcaaagtttgcagccaacagtactttgaaaaatcacctccgcctccacacgggagatcgcccttttatgtgcaaacattgcttaatgacctttacgcaggcatccgccctggcataccacacgaagaagaagcactcggaaggtaaaatgtacgcatgccagtattgtgatgccgtatttgcgcaaagcattgagctgtccaggcacgttcggacgcataccggggataaaccgtacgtttgtagagactgtggtaaaggctttcggcaggcaaacggtcttagtatacatcttcatacattccacaatatcgaagacccatatgactgtaaaaaatgtagaatgtccttcccgaccctgcaggaccacagaaaacacattcatgaggttcattccaaggaataccatccatgccctacttgcggcaagatcttttcagccccttctatgttggaacgccacgtggtcacgcatgtcggtggcaagccattttcttgtgggatatgtaacaaggcttatcagcagctgtcaggtttatggtatcataatcgcacccaccaccctgatgttttcgcagcgcaaaaccataggtccagtaaattttcaagcttacaatgctcctcctgcgacaagacgtttcctaacactatagagcataagaagcacatcaaggccgagcatgccgacatgaaatttcatgaatgcgaccagtgtaaggagctgtttccaacgcctgcacttctacaggtgcacgtcaagtgccagcactccggctcccaaccatttcgttgcctctactgcgcagctacttttaggttccctggtgctcttcagcaccacgtaaccactgagcacttcaagcagtctgagacgaccttcccatgcgagctttgcggggagttgttcacaagccaagcccaactggatagtcaccttgagagcgagcatcctaaggtcatgagcaccgagacacaggccgctgcctcccagatggcgcaagtaatacagacccctgagcctgtggcgcctacagaacaagtaatcaccctggaagaaacacagctggccggatctcaagtgtttgtgactctgccagactctcaggcctctcaggcatcaagcgaactcgtggctgtgactgtcgaagatctcctcgacggcaccgtcaccctaatctgtggagaagcaaaatag

SEQ ID NO: 247172 - DNA, 3720 bp, synthetic construct
  misc_feature 1..3720: note = Description of Artificial Sequence: Synthetic coding sequence
  source 1..3720: mol_type = other DNA
atggaactcccaaactattcacgacagttactacaacagctgtataccctttgtaaggagcagcagttttgcgattgtaccatctccatcggcaccatttactttcgggcacataagctcgtactcgccgctgctagcctgctatttaagactctgttggacaacacggataccatcagcattgacgccagcgttgttagcccagaggagttcgccctgctgcttgaaatgatgtataccggcaagctgcccgtgggcaaacataactttagtaagatcattagcctggccgactctctgcaaatgtttgacgtggctgtcagttgcaagaatcttctgaccagtctggtaaactgttcggtccaagggcaggtggtaagggacgtcagcgctccctcctccgagacctttcgcaaggaacccgaaaagccgcaggtcgagattctttcgtccgaaggggctggcgaacctcactcttctcccgagctggccgcaacacctggcggaccagtaaaagccgaaaccgaggaggcagctcacagcgtgtcacaggaaatgtctgtgaattctcctacagcacaggaaagtcagcggaatgccgaaacccccgctgaaacacccacaactgctgaggcctgcagcccgtcacccgctgtccaaacattcagtgaagctaagaaaacgagcacagaacctggctgcgagcgcaaacactatcagctgaacttcctgctggaaaacgaaggcgtattctctgacgccctgatggtaacccaggatgtgctgaagaagctggagatgtgtagtgaaattaagggtccacagaaggagatgatagtgaaatgctttgaaggggaggggggacactccgcttttcaacggatcctcggaaaagtgagggaagagtccttagatgtgcagacagtagtctcccttctaagattataccaatatagcaatccagcagtaaagacggcccttcttgatcgaaagcccgaggatgtggatactgtgcaaccaaagggttccactgaggagggtaagaccttaagcgtgcttctcctcgaacacaaggaagatcttattcagtgcgtgactcaactccgcccaatcatggagtcccttgaaacagccaaagaggagttcctgaccgggaccgagaaacgggtaatccttaattgctgtgaaggccgaacaccaaaggaaacaatagagaatctgctgcaccgaatgaccgaggaaaagaccctgaccgcagagggtctggtgaaactacttcaagctgtgaaaacaacctttcctaaccttggcctcctgcttgaaaaactccagaagtccgctactctgccgtcaacgacggtccagccctcacccgacgactatggaacagagctgctgcgaaggtatcatgaaaatctgagtgaaatctttactgataatcagatccttttaaagatgatttcacacatgacctccctggccccaggtgagcgggaggtgatggagaagctggtcaagcgtgactctggctccggcggtttcaactcacttattagtgccgtgttggaaaagcaaacactgtccgccactgcaatttggcaactcctgctggtggtgcaagaaaccaaaacatgtcctctagatctgctaatggaggagatccgcagggaacctggcgcagacgcctttttccgcgctgtcacaactcccgaacacgccacattggagaccattctgaggcacaatcaacttatccttgaggctatccagcaaaaaattgagtataagctttttactagcgaggaggaacaccttgccgaaactgttaaggagattttgtcaattccttcggagacagcgtctcccgaagccagcctccgcgctgtcctgagcagagccatggagaagtcggtcccagcaattgaaatctgtcatttactctgctctgtgcacaagtctttccccggactgcagcctgtgatgcaagaacttgcttatatcggggttctgactaaagaggatggtgagaaggagacgtggaaggtgtccaacaagttccaccttgaagcgaataataaggaggacgagaaggccgcaaaagaggactctcaacctggtgagcagaatgatcagggcgagaccggatccctgcccggacagcaggagaaagaggcatccgccagccccgaccctgctaagaaatcattcatatgcaaagcctgcgataagagttttcacttttactgtcggctcaaggtgcacatgaaacgctgtcgagtggccaagtcaaaacaggtccagtgtaaagaatgtagcgagacaaaggatagtaagaaagaattggacaaacatcaactggaggcgcacggggcaggaggtgaacctgatgcccctaaaaagaaaaagaagagactgcccgtcacctgtgatctgtgtggacgggaattcgctcacgcgtccgggatgcagtatcataaattgactgagcattttgatgagaaacctttttcttgcgaagagtgtggcgcaaaattcgctgcaaattctaccctgaagaatcacttgagattgcataccggggatcgaccattcatgtgcaaacattgcctgatgacttttactcaggcttccgctctggcttatcacacaaaaaagaaacatagtgaaggtaagatgtacgcctgtcagtattgcgacgcggtgttcgcacaatccatcgagttgagcaggcatgttcgcacccacacgggcgacaagccctatgtctgccgtgattgtggcaagggctttcgccaagccaacggcctatcaattcacctccacacttttcataatattgaggatccctacgactgcaagaaatgccgtatgagtttcccaacactgcaagatcatcgaaaacacatccatgaagtgcacagtaaagagtaccacccctgcccaacttgcgggaagatattcagtgcgcctagcatgctcgaacgtcacgtagttacccatgtgggtggcaaacccttttcctgcggcatatgtaacaaggcgtatcaacaactgagtggcctgtggtaccacaatcggactcaccatccagatgtgtttgcggctcagaatcacagaagctctaagttttcctccctgcagtgcagcagttgtgacaaaacctttccaaataccatagagcataaaaagcatattaaggccgaacatgctgatatgaaatttcacgagtgcgatcagtgtaaagagctctttcctacccccgctctcttacaagtgcatgtcaagtgtcagcattccggcagccaacctttccggtgcctgtactgcgctgcgacattccgctttcccggagccctgcagcaccatgtgactacagaacactttaagcagagcgagacaacgttcccatgtgaactctgcggagaattgttcaccagccaggcgcagttggactctcacctagagagcgaacatcccaaagtaatgtcgacagaaactcaagctgcagcatctcagatggctcaggtcattcaaaccccggagcccgtggcgccaacagagcaagtcataactctggaggagactcaacttgcaggcagccaggtgttcgttactctccctgattcccaagcctcccaggccagctccgaactagtggctgtaactgtcgaggatcttctggacgggacggtgaccctcatttgcggggaagccaaatag

SEQ ID NO: 247173 - DNA, 1362 bp, synthetic construct
  misc_feature 1..1362: note = Description of Artificial Sequence: Synthetic coding sequence
  source 1..1362: mol_type = other DNA
atggagttgccgaactatagtcgacagctcctgcagcagctgtacaccctgtgcaaagagcagcagttttgtgattgcactatttctatcggaacaatttattttcgggcacataagctggtccttgccgctgcctcattgctatttaagacactgctggataacactgacaccatatcgatcgacgcctccgtggtgagtccagaggagtttgctctgcttctcgagatgatgtacacggggaaactgcctgtcggcaagcataatttttctaaaatcatttcactcgcagattcactccagatgttcgacgtcgcagtgagctgtaagaacctcctgacttctttggttaactgttccgtgcaaggtcaggtcgtgcgcgacgtgtccgctcccagctctgagaccttccgtaaagaaccagagaaaccccaggttgaaatcctgtcatccgaaggagcgggtgaaccgcacagttctccagaactggccgctacaccaggcggtcctgtgaaagccgagaccgaagaggctgcacacagcgtttcacaggagatgagcgtaaattcccccacggcccaggaatcccaaaggaacgccgaaaccccagccgagacccccacgaccgctgaagcttgctctccgtcaccagccgtccaaacgttttcagaagccaaaaagacatccaccgaacctggatgtgagcgaaaacactaccaactgaactttctcctggaaaatgagggggttttttcagacgccttaatggtgacccaggacgtcttgaaaaaactggaaatgtgctcagagatcaaaggccctcaaaaggaaatgatagtgaaatgctttgaaggtgaggggggacactcagcattccagagaatcctgggcaaggtcagggaagagtctcttgatgttcagaccgtcgtgtctctgctgcgactttatcagtactctaaccctgcggtaaagactgctctgctggatcgaaagcctgaagatgtggataccgtgcagcctaagggatccactgaagaagggaagaccttatcagtgctcctcctagagcacaaagaggacttgatccagtgcgtgacccagttaaggccaattatggagtcccttgaaactgcaaaggaggaatttctaacgggaactgagaagagggttattctcaattgttgtgagggacggacacctaaggagacgatcgagaacttactgcaccgtatgaccgaggaaaagactctgactgccgaaggattggtgaaactcctgcaggctgttaaaactacatttcctaatttagggctgttgcttgagaaactccagaaatcagccacactgcctagtaccacgtag

SEQ ID NO: 247174 - DNA, 3720 bp, synthetic construct
  misc_feature 1..3720: note = Description of Artificial Sequence: Synthetic coding sequence
  source 1..3720: mol_type = other DNA
atggagctcccaaattacagccggcaactgctccagcagttatatacactgtgcaaagagcagcagttttgtgattgcacaatctccatcgggaccatatattttagagcccacaagctcgttctggctgcagcaagtctgctgtttaagacactgctcgataacacagataccataagcatcgacgcgagcgtggtctcacctgaggagttcgctctgttgctggaaatgatgtatactggcaagctgccggtgggtaagcataatttctctaagatcatatcacttgctgacagtttacagatgtttgatgttgccgtcagttgcaaaaacctgcttaccagcttggtgaattgcagtgtacaagggcaggtggtgcgagatgtctccgctccatcatccgaaaccttccggaaagagcctgagaaaccacaggtcgagattctgtcatctgagggcgcaggcgaaccgcacagcagccctgagctcgcggcaacccctggaggacccgttaaggcagagactgaagaagccgctcattctgttagccaagaaatgtcagtgaatagtccaacagcccaggagagccaacgaaacgccgaaacacccgcagaaactccaaccacagctgaggcctgttcccctagtcccgcagtccagaccttttccgaagcaaagaaaactagcaccgagcctggttgcgaaaggaaacactatcaactcaatttcttactcgagaatgagggggtttttagtgatgcgctgatggttactcaggatgtcctcaaaaaactggagatgtgttctgaaatcaagggccctcagaaagagatgattgttaaatgcttcgaaggtgaggggggacactccgcatttcagcgaatcctaggtaaggtgagagaagaatccttagacgttcagacagtagtttccctgcttaggctttatcagtactctaatcccgctgtgaagactgccctgctggatcgcaagccagaggacgtggacactgtgcagcccaaggggtcaactgaagagggtaagaccttgagcgtcttacttctagagcacaaagaggatctcattcaatgcgtcacacagcttcggcctataatggagagcctagagaccgcgaaagaagagtttcttaccggcaccgagaagcgagtgatcctcaattgttgcgagggccgaactcctaaggagactattgaaaacttacttcatcgaatgactgaggaaaaaacattaaccgccgagggcctggtgaagctgttgcaggcggtgaagacaactttcccgaatctggggttactgttagagaagctgcagaagtccgccactctcccctcgaccactgttcagccaagtcctgacgactacggcacagaattattgagaagataccacgagaatctgtctgagatttttacagacaaccaaattctgctgaagatgatatcgcacatgacaagccttgctcctggagagagagaggtcatggagaaattggtcaagcgagatagcgggtcaggcggttttaacagtctgatcagcgcagtcctggagaagcagacactgtcggccacagctatttggcagcttctcctggttgtccaggagacaaagacatgtcctctcgatcttcttatggaggagatccggagagaacctggggcagacgcgttttttcgggctgtgaccacccctgagcacgcaaccctcgaaaccattctgagacacaatcagcttatattagaagccatccagcagaagatcgaatataagctttttacctctgaggaggagcacctcgcagaaacagtgaaggaaattctctctattccatccgaaaccgcctcacctgaggcgtctctgagggccgttctgtcccgtgcaatggagaaatcagtacctgccattgaaatttgtcacctgctatgctcagtgcataaatcattccccggtctccaacctgttatgcaagaactcgcctatatcggagtgctcactaaagaggacggagagaaagaaacttggaaagtctcaaataagtttcatctggaggcgaacaacaaagaagacgaaaaagcagcaaaggaggacagccaaccaggcgagcagaacgaccaaggtgagacggggtcactgcctgggcagcaggagaaggaagcatctgcaagcccagatccagctaagaaatcattcatctgtaaggcctgcgataagagctttcatttctattgtagattgaaggttcacatgaagcggtgtcgcgttgccaaatctaaacaggtccagtgcaaggagtgtagcgagacaaaggactccaagaaagaactcgataagcaccagttagaggcgcacggcgctgggggagagcccgacgcgccaaaaaaaaagaagaagcgcctgcccgtgacctgtgatctgtgcggacgtgagttcgcccatgctagcgggatgcagtatcacaagctgacagagcactttgacgagaagccctttagttgcgaggagtgcggcgcaaagtttgctgccaatagtacgctgaagaaccatttacggctgcatactggtgataggccatttatgtgcaagcactgcctgatgacttttacccaggcatccgcactggcataccacaccaagaagaaacatagtgagggtaagatgtacgcatgtcagtactgcgacgccgtctttgcccagtccatcgaattgtccaggcatgtacgcactcatacgggggacaaaccatatgtctgccgggattgtggcaagggttttcggcaagctaatggcctgtccatccatctgcatacctttcacaacatcgaggacccctacgattgcaagaaatgcagaatgtcctttccaaccttgcaagatcacaggaaacacattcatgaggtgcattctaaggagtaccacccttgtccaacctgtggaaagatcttcagcgcaccgagtatgctcgagaggcatgtggtgacacacgtggggggtaagcctttcagctgcgggatctgcaataaggcctaccagcagttgagcgggctctggtaccataaccgaacacatcatccagacgtatttgccgctcagaatcaccgaagttccaaatttagctcgctccagtgtagctcatgcgataagaccttccccaacacaatcgaacacaaaaagcacataaaagccgagcatgccgatatgaagtttcatgaatgcgatcagtgcaaagaactctttccaaccccagctttactgcaggtgcacgttaaatgccagcactcaggcagccagccatttaggtgtttgtactgcgctgccacattccgcttcccaggtgcccttcagcaccacgtgactaccgagcacttcaagcagtccgaaacaacattcccatgtgagctgtgtggggaactgtttacatctcaggcccagctcgacagtcacctcgagagtgagcatccaaaagtgatgtcaactgagacccaagctgcagcctctcagatggcccaagtcatacagaccccagagcctgtagctcccactgagcaagtcatcactcttgaagaaacccagctggctggctctcaggtctttgtcaccctgccggactcgcaggcatcccaagcctccagtgaactggtcgcagttaccgtagaggatttgctcgatgggacggtgactctcatctgtggagaagcaaaatag

SEQ ID NO: 247175 - DNA, 1269 bp, synthetic construct
  misc_feature 1..1269: note = Description of Artificial Sequence: Synthetic coding sequence
  source 1..1269: mol_type = other DNA
atggagttccctgaacacgggggaaggcttttgggtcgtctgcggcaacagcgggaactcggatttctgtgtgactgcaccgtgcttgtcggagacgcacgttttcccgcacacagggccgtgcttgcagcttgctcagtctactttcacctgttttacagggacagaccagccggatcacgggatacggtgcgtttgaatggtgacattgtcacagctcctgctttcggtaggcttctcgatttcatgtatgagggacgcttggacctgagaagtcttccagtggaggatgtcctcgccgctgccagctacctccacatgtatgacattgtgaaagtctgcaaagggcgtctgcaagagaaggaccgctctctggacccagggaaccccgctcccggtgcggagcctgcccagccaccttgtccatggcccgtgtggacagccgacctctgccctgcagctcggaaggccaaactgcctccgttcggcgtaaaggcagctctccccccacgagcgtcgggcccacctccctgtcaggtgccagaggagtcggaccaggccctggacctatcgctcaagagtggacccagacaagagagggtgcatccaccctgtgtgctccagacccctctatgctctcagcgacagcccggtgcacagccactcgtcaaggacgagcgggactctctcagtgaacaagaagagagctcatccagtcgcagccctcactcacctccgaagcctccacccgtccccgcagccaaaggactggtggtgggattgcaacccctccctctcagtggggaggggagtagagaactggaactgggcgctggacgtctggcgagtgaagacgagctgggtccaggcggtcctctgtgtatatgtccgctgtgcagtaaactattcccctcaagtcacgttcttcagctgcacctctcggcacattttcgggaacgggactcaacccgcgcaaggttgagtccggacggcgtggcccctacttgtccactgtgcggcaagacattctcttgtacctacactttgaagcgccacgaacgcacacacagcggtgagaaaccgtacacatgcgtacagtgcgggaagtcctttcagtacagtcacaatctgagtcgtcatacagtggtacacactagggagaaaccccatgcttgtcgctggtgtgagaggagattcacccagagcggagatctgtacagacacgtccgcaaattccactgtggacttgtaaaatcattgcttgtttag

SEQ ID NO: 247176 - DNA, 1269 bp, synthetic construct
  misc_feature 1..1269: note = Description of Artificial Sequence: Synthetic coding sequence
  source 1..1269: mol_type = other DNA
atggaatttcctgagcatggtggcagactgctgggccgtttgcgtcagcagagagagcttggctttctctgtgattgcacggtcctagtcggggacgcaagatttcccgctcatcgcgcagtgctcgcggcttgttcggtgtacttccacctcttttatcgagaccgcccagctggcagtagagataccgttaggcttaacggcgacatcgtgacagctccagcttttggtaggttgttggatttcatgtacgagggtagactcgatctccggagcctgcctgtggaggatgtgctcgcagctgcctcatatctgcatatgtatgacattgtgaaggtgtgtaaagggagactgcaagagaaggatagatctcttgacccagggaaccctgcacctggtgcggaacccgctcagcccccatgcccgtggccagtatggactgcggacctgtgtcccgcagccaggaaagctaaacttcctccctttggagtgaaggcagcactgccaccaagagctagcggccctcctccatgccaggtcccagaggaaagtgatcaggcactggatctctcgttgaagagtggaccgaggcaggaacgcgttcaccctccatgtgtattgcaaacacctctctgttcacagcgccagccaggagctcagcccctggtcaaagatgaaagagactcactcagtgaacaggaagaaagttctagttccagatccccacactccccaccgaagcccccacctgtgcctgccgctaaaggactcgtggtgggccttcaacctttaccactttcaggcgaaggctctagggagctcgaactgggggcagggaggctagctagcgaggatgaactggggcctgggggaccgctctgtatctgtccactctgtagtaaattgttcccctcttcccacgtcctccagctccacttatctgctcactttcgcgagagggatagtacacgcgcaagactttcacctgatggggtggcccctacttgcccgctgtgcggaaagaccttctcatgtacctataccttgaaacgacacgagaggacccacagtggggaaaaaccttatacctgcgtgcagtgcggtaaatcttttcagtattcacacaacctgtcccggcatactgtggtacacacccgggagaaaccacacgcctgccgttggtgtgagcggagatttacacaatcaggtgatttgtaccgccacgtaaggaagttccattgtggtctggtcaagtcactgctggtgtag

SEQ ID NO: 247177 - DNA, 1815 bp, synthetic construct
  misc_feature 1..1815: note = Description of Artificial Sequence: Synthetic coding sequence
  source 1..1815: mol_type = other DNA
atggccagtacatgggctattcaggcccacatggaccaggatgagcccctggaggtgaaaatcgaggaggaaaagtacacaactcgacaagattgggaccttcggaagaataatacacattcacgtgaggttttccgacagtactttaggcagttttgttatcaagagacctccgggcctagagaagcgttgtctcgcctacgcgagctgtgccaccaatggctgagacctgagacccataccaaggagcagattttggaactgctcgtgttagaacagttccttacgattctgccggaagaactgcaggcctgggtgcaagagcagcaccccgaatcaggggaggaggtggtcactgtactcgaagatctcgagagggagctggatgagcctggcgagcaggtgtctgttcatacaggtgagcaagaaatgtttctgcaggaaacggtgcggttgaggaaagaaggggaaccttccatgagcctgcagtctatgaaagcccagcctaaatacgagagccctgaactggagtcccagcaggagcaggtgttagatgtcgaaaccgggaacgaatatggcaatctgaaacaggaagtttctgaagagatggagccccacggtaagactagttcaaagtttgagaacgacatgtcaaagagcgcaaggtgcggagagacacgtgagccagaggaaatcacagaagagcctagtgcctgctcccgggaggataagcagcccacgtgtgacgaaaacggggtttcccttaccgaaaattccgaccataccgaacaccagcgtatctgccccggtgaggagtcatatgggtgcgatgactgcggcaaggccttttcacagcactcccaccttatcgagcatcaaagaattcataccggagatcgtccttataaatgtgaagagtgcggaaaggcttttagagggcgtaccgtgttaattcgacacaagatcattcatacaggagagaagccctacaaatgtaatgagtgcggaaaggcctttggacggtggagcgccctgaaccagcaccaacgcctgcacaccggggaaaagcattaccactgtaatgactgcggaaaagccttctcccaaaaggctggtctctttcaccacattaagattcacaccagagacaagccctaccagtgtactcagtgtaacaaatcctttagtcgaagatccatactgacgcaacatcagggagtgcacacaggggctaaaccctatgaatgtaatgaatgcggcaaggccttcgtgtacaattcatcacttgtgtcccaccaggaaattcaccacaaggagaagtgttaccagtgtaaggaatgtgggaagtccttttcccagtcaggcctgatccaacaccaaagaatccataccggcgagaagccatacaaatgcgacgtgtgtgaaaaagccttcatacagcgaaccagcctgacagaacaccaacggatacataccggcgagcgaccctataagtgtgataagtgcggaaaagccttcacccagcgatcagttttgactgaacatcaacgaatacacactggggaacgaccttacaagtgtgacgagtgtgggaacgcgtttcgagggataacttcactgatccagcatcagagaatccataccggagagaagccttaccaatgcgacgagtgcggaaaagcatttcggcagcggaaaaagaccagttacaaagagatcctactaaagaatcattccgagccccaggcgggtgtgaacctgctcctgtcgtccctcatcccagaatggcaaagctgtttccgaagagacctgtag

SEQ ID NO: 247178 - DNA, 1815 bp, synthetic construct
  misc_feature 1..1815: note = Description of Artificial Sequence: Synthetic coding sequence
  source 1..1815: mol_type = other DNA
atggcctccacttgggcgatccaggctcacatggatcaggacgagcccctggaagtgaagatcgaggaagagaaatatactacacgtcaggattgggatctccgcaaaaataacacacattctagggaagtctttcggcagtacttccggcaattttgctatcaggagacgtctgggccaagggaggcattgtcccggctaagggaactatgccatcaatggttaagacccgagacacacacaaaggagcagatcctcgaactcctggtgctggagcagtttttgacaatcttaccggaggagctgcaggcctgggtccaagagcagcatcctgaatcaggagaggaggttgtcactgtgctcgaggaccttgaacgcgagctcgatgagccgggagagcaggttagtgtgcataccggggagcaggagatgttcctgcaggaaacagtgcgccttaggaaagagggcgagccctcaatgagcctccagagcatgaaggctcagcccaaatatgaatctccagaactggagagccagcaagaacaggtcctggatgtagaaaccggaaatgagtatgggaatctcaaacaagaagtctcggaggaaatggaaccacatggtaagacctcatctaaattcgaaaacgacatgtccaaatcggccagatgcggggaaacacgtgagcccgaggagatcacagaagaacccagcgcatgttccagggaagataaacagcccacatgtgatgaaaacggggtatcccttaccgagaactcggaccatactgagcatcaaaggatctgtccgggtgaggagagttatgggtgcgacgattgtggcaaggccttctcccagcattctcacctgatcgaacatcagcgcattcacaccggcgataggccatacaagtgtgaggagtgtgggaaagctttccgcggacggacagtgttaatcaggcataagattatccacaccggggaaaaaccatataaatgcaacgaatgtggaaaggcctttggcagatggtccgcactgaatcaacatcagaggcttcatactggagaaaaacattaccattgcaatgactgtggaaaggccttttcccaaaaggcagggctcttccaccacattaaaattcatacccgcgacaagccctaccaatgtacgcaatgtaacaagtcgttctccaggagatccatcttgacgcagcaccaaggtgtgcataccggggcaaagccatacgaatgcaacgaatgcggtaaagcatttgtgtacaatagttctttggtttcgcatcaggagatccaccacaaggagaaatgctatcagtgcaaagaatgcgggaaaagctttagtcaatcagggctcatccagcaccaaagaatccataccggtgaaaaaccatataagtgtgacgtatgtgagaaggctttcatccagcgtacgagtctaacagagcaccaaaggattcacacgggcgaacgaccttacaaatgtgacaaatgtgggaaggctttcacccagagatcggtactgacagaacaccagagaatccacacaggtgagcgcccttataagtgcgatgagtgcggaaacgcattccgcggtattacatctcttattcagcatcagaggattcatactggcgagaagccataccaatgcgacgagtgtggtaaagctttccggcagaggaagaagacgtcttacaaagagattctccttaagaaccactcggagccgcaagccggagtgaacctgctcctcagcagccttataccagagtggcagtcctgtttccggcgtgatctgtag

SEQ ID NO: 247179 - DNA, 1476 bp, synthetic construct
  misc_feature 1..1476: note = Description of Artificial Sequence: Synthetic coding sequence
  source 1..1476: mol_type = other DNA
atggccattccaaagcactcactgtcccccgtcccctgggaagaggatagttttctgcaggttaaggtcgaggaagaggaagaggcttcgctatctcagggcggagagtcttcccatgaccacatcgctcacagcgaagcagctcgattgagatttaggcattttaggtacgaggaggcctccggcccacacgaggccctggcccatttgagagctctttgttgtcaatggctgcaacctgaagcgcacagcaaagagcaaatcctggaactcctcgtccttgagcagttcttgggcgcactgcctccagagattcaggcctgggtcggagcccagagtcccaagtctggagaggaggcagctgtgctggtcgaagacctgacccaggtcttggacaagcgtggctgggacccaggcgctgagccgacggaagccagctgcaagcagtcagacctgggagaatccgaaccttccaatgtaaccgagactctgatgggtggcgtgagcctggggccagcatttgtcaaagcatgtgaaccagaaggcagctctgaacgctccggcctgtccggcgaaatctggaccaagagcgtaactcagcagatacacttcaaaaagaccagcggcccttacaaggatgtcccaacagatcaacgcggacgggaaagcggggctagcaggaactcttcatctgcctggcctaatttaactagccaggaaaagccaccttccgaggacaaatttgatctggttgacgcctatggaactgagcccccttacacatacagcggcaagcggagctctaaatgccgggagtgtagaaaaatgttccagagtgctagcgctcttgaggcccatcagaaaactcacagccggaaaaccccctacgcatgcagtgaatgtgggaaggcatttagccgcagcacacacctggctcaacatcaagtcgtccacacaggggctaagccacatgagtgcaaagaatgcggcaaagcgttcagccgggtcactcatctgactcagcaccaacgtatccatacgggagagaagccttacaaatgtggcgaatgcggcaaaactttctcccgttcaacccacctcactcaacaccagagggttcataccggggagaggccctacgaatgtgacgcctgcggcaaggcttttagtcagtccactcacctgacccaacatcagaggattcacacgggcgagaagccctacaaatgtgacgcttgcggcagagccttctcagactgcagcgctctcattaggcaccttaggatacattccggcgaaaagccctaccagtgcaaagtgtgtcccaaggcatttgcccaaagttctagcttgatcgagcaccagagaattcataccggtgaaaagccttacaagtgtagcgactgcggaaaggcattttcccgcagctccgcactgatggtccatctaagaatacacataacggttctacagtag

SEQ ID NO: 247180 - DNA, 1302 bp, synthetic construct
  misc_feature 1..1302: note = Description of Artificial Sequence: Synthetic coding sequence
  source 1..1302: mol_type = other DNA
atggcgctggatctgcgaacgatattccaatgcgaaccctctgaaaataacctgggaagtgagaattccgcctttcaacagagccagggacccgctgttcagagggaggaggggatcagtgagttttcacggatggtactgaactcattccaggactctaacaattcatacgcccgtcaggaattgcagcggctttatcggatcttccattcttggctgcaaccagaaaagcatagcaaggacgaaataattagcctgctagtgctcgagcagttcatgataggcggtcattgtaacgacaaggcctccgtaaaagaaaaatggaagtcctccggaaaaaacttagaacggttcatcgaggacctgacggacgactcaattaatccacctgctttggttcacgtgcatatgcagggacaagaggcattgtttagcgaagatatgccccttcgtgatgtgatagtgcacctcaccaagcaggtgaacgcccagaccaccagggaggctaacatgggcacgcccagccagacatctcaggatacatccctcgaaacaggacaagggtatgaggacgagcaggacggctggaacagttcttccaagaccactcgggtcaatgaaaacattacgaatcaggggaaccaaatcgtatcccttattataattcaggaggaaaatggccctcggccagaggaaggcggtgtcagtagtgacaacccttataacagtaagagagcggagctggttaccgcccgttcccaagagggatccataaacgggattaccttccagggagtacccatggtgatgggggctggctgcatatcacagccggagcagtctagtccagaatcagccctgacgcaccaaagcaacgaaggcaactccacgtgtgaggtgcatcaaaagggatctcatggggtgcaaaagagttacaaatgtgaggagtgccccaaggtttttaagtatctgtgccacctgctggctcatcagcgcagacaccgaaacgagcgacctttcgtgtgccctgaatgccaaaaagggttcttccagatctccgacttacgagttcaccagattatccacaccgggaagaagcctttcacctgcagcatgtgcaagaagtcattttcccataagacgaaccttcgcagccatgagcgaattcacaccggggaaaaaccctacacctgtccattttgtaagacatcatatcggcagagctccacctaccaccgtcatatgagaacacacgaaaagatcacccttcctagcgtccccagcaccccagaggcctcgtag

SEQ ID NO: 247181 - DNA, 2433 bp, synthetic construct
  misc_feature 1..2433: note = Description of Artificial Sequence: Synthetic coding sequence
  source 1..2433: mol_type = other DNA
atgcccaaccaaggtgaggattgctatttcttcttctattctacttgcaccaagggcgatagctgtcccttcagacattgtgaggccgctatcggtaacgaaaccgtgtgtacattgtggcaggaaggcagatgctttagacaggtctgtcgatttagacacatggaaattgataagaaacggagcgaaatcccatgttactgggagaatcaacctaccggctgccagaaattgaattgcgcctttcatcacaatcgagggaggtatgtggatggcctcttccttccaccatccaagactgtgctgcccacggtgccagagtcccctgaagaggaggtaaaagctagccagctgtcagttcagcaaaacaagctgtccgtccagtccaacccttccccccagttgaggagtgtaatgaaagtggaaagctccgagaatgtgcccagccctactcacccaccagtagtcatcaatgccgcagacgacgatgaggatgatgatgaccagttcagcgaggagggagacgagaccaagaccccgacattacaaccgactccagaagttcacaatggcctgcgtgtcacaagtgtgagaaagccggctgtgaacattaagcagggagaatgcttgaatttcggtattaagactctggaggagattaagtctaagaaaatgaaagaaaaatctaaaaaacagggcgaggggtcctcgggagtctcgtcccttctactccaccccgaacccgtaccaggccctgaaaaagagaacgtgcggaccgttgtcagaaccgtgactctcagcactaaacagggagaggaacccctcgtccgtctgagcctaactgagcgcctcggtaaacggaaattttctgctggtggtgacagtgacccacccctgaagagaagcctcgcccaacgcctaggtaagaaggtggaagcccctgagaccaatatagataaaactccaaaaaaggcccaggtgagcaagtctctcaaggagcgtctggggatgagcgccgacccagacaacgaagacgccactgacaaggtcaataaggtgggcgaaatccacgtcaagaccctggaagaaatcctgctcgagagggcatcccaaaagaggggagaactccagacaaaactgaagaccgagggacctagtaaaaccgacgactctacctctggtgccaggtctagtagcactattagaattaaaactttctccgaggtgctggcagagaaaaaacataggcaacaagaggcagagcgccaaaaatccaagaaggacactacttgcattaagcttaaaattgacagcgagatcaaaaagaccgtggtattgcccccaatagttgcctcacggggtcagtctgaagagcccgctggtaaaactaagtcaatgcaggaagtccacatcaagactctggaggagatcaaactggagaaggccctgcgggttcaacaaagttccgagtcatctacaagctcaccatcccagcacgaagccacaccaggagctcgacgcctgttacgcataactaagaggaccggcatgaaggaggagaagaatctgcaagaaggaaacgaagtcgattcccagtcaagtatccggactgaggctaaggaggcaagtggcgagacaactggggtcgacattaccaagatccaagtcaagaggtgcgagactatgagagaaaaacacatgcagaaacagcaagagagagaaaaatctgtgctgacgccgctgagaggcgacgtagcctcctgcaatacgcaagtggccgagaaacccgttctgaccgctgtccccggaatcacccgacatctgaccaagagattacccacaaagtcttcacagaaggttgaggtggaaaccagtggaataggggattcactcctgaatgtgaagtgcgccgctcagactttagaaaagcggggaaaagccaagcctaaagtcaacgtgaagccttctgtcgttaaagttgtaagctctcctaagctagcaccgaaacgcaaagccgtggaaatgcatgctgcggtgatcgccgcagtcaagcctttaagctcctctagtgtactccaggaaccgccagccaaaaaggctgcagttgcggtagttccattagtatctgaagacaagtccgtgacagttccggaagcagaaaaccctcgcgactccctggtgctaccacctacccagtcgtcttccgattcaagcccgcctgaggtgtctgggccatcaagtagtcagatgagcatgaaaacaaggcgtttgtcttctgctagcactggaaaaccccctttatcggtcgaggacgatttcgagaagctaatctgggaaattagcgggggaaaactcgaggcagaaatagacttggatccaggcaaagacgaggatgacctcctgctggaactgagtgaaatgatcgattcttag

SEQ ID NO: 247182 - DNA, 2433 bp, synthetic construct
  misc_feature 1..2433: note = Description of Artificial Sequence: Synthetic coding sequence
  source 1..2433: mol_type = other DNA
atgccaaatcagggggaggactgttattttttcttttattcaacctgtacaaagggtgactcctgcccattcaggcactgtgaggcggcaatcggcaatgaaacggtgtgtacactgtggcaggagggccgttgcttcaggcaagtgtgtcgatttcgccatatggagatcgataaaaagaggtccgaaatcccctgttattgggaaaaccagcccaccggttgccagaagctgaactgtgcattccatcataatagaggacgctacgttgatggactgttcctgcctccctccaaaacggttctgcccacagtccccgaaagcccagaggaagaggttaaggcctctcagctaagcgtacagcaaaacaaactcagcgtacagtctaatcccagccctcagttaagaagtgtaatgaaggtggagagctccgagaacgtccccagccctacccatccccctgtcgttattaacgccgctgatgatgatgaagatgatgacgaccagttcagcgaagagggggacgagacaaagacgcccacactacagccaacacctgaggttcacaatggactgcgggtaaccagcgtcagaaagcctgccgttaatattaagcagggcgaatgtttaaacttcggcataaagactctcgaagaaatcaaaagtaagaagatgaaggaaaagagcaagaaacagggcgaagggtcctcaggcgtctcctcgctgctcctgcaccccgaaccagtgcctggcccagaaaaagaaaatgtccggaccgtcgttaggacggtcaccctttctactaagcaaggagaggagcccttggttcgcctctctctaacggagcgtcttggtaaaaggaagttctcagctggcggagatagcgatccacccctgaagcgcagcctcgcccagcggcttggcaagaaagttgaagctcctgagacgaatatcgataaaacaccaaagaaagcccaggtctcaaagtctctcaaagagcggctcggtatgagcgcagatcccgacaatgaggacgccacagataaggtgaacaaggtcggtgaaattcatgttaagaccctggaagaaattctgcttgagcgagccagtcagaagcggggagagctgcaaaccaaactgaagacagagggaccttctaaaaccgacgattctactagcggagcacgctcatcttccactattcgcataaagaccttttcagaggtgttggccgagaagaaacatcggcagcaggaggcagaacgacagaagagcaagaaagacaccacatgtataaaactgaagattgattcagagatcaagaaaacagtcgttctgccccctatagttgcttcccgtggacaatcagaagagccagctggcaagaccaagtccatgcaggaagttcacatcaaaaccctcgaagaaatcaagctcgagaaggctctgcgggtgcagcagagttctgaaagttccaccagcagtccatcgcagcacgaggcgacaccgggagccagacgactgctccggattacaaaacggacaggcatgaaagaagagaaaaacctgcaagagggcaacgaggttgacagccagtccagtatccgtacagaggcaaaggaggcttctggcgagacaacgggagtagatattactaagattcaggtgaagagatgcgagacgatgagagaaaaacatatgcaaaagcagcaagaacgcgagaaatcagtgctgactccactccggggagacgtcgcaagttgtaatacgcaggtggctgagaaacccgtacttaccgccgttcccggtattacacggcacctcacaaagaggttgccaacaaagtcatcgcaaaaggttgaagtcgaaaccagcgggatcggagacagtctcctgaacgtcaaatgtgctgcacagacactggaaaagagggggaaggccaagccaaaggtgaacgtcaagccttccgtggttaaagtcgtgagtagtcccaagttggctcccaagcgaaaggctgtcgaaatgcatgcggctgtcatcgccgctgtgaagcccctcagcagcagcagtgttttgcaagaaccacccgcaaagaaggcagctgtcgcagtcgtgccactagtgagcgaggacaagtcagtgaccgtccctgaggcggaaaatcccagggactctctggtgttacctcctacccagagctcttctgacagttccccacccgaagtttcagggccatccagctctcaaatgtctatgaaaacccggagactcagcagtgcgtctacgggcaagcctcctctgtctgtcgaggacgatttcgaaaagctgatttgggaaatcagtggtggcaagctcgaggctgagatcgatctggatccagggaaggacgaagacgacctcctgctggagctctcagagatgattgattcctag

SEQ ID NO: 247183 - DNA, 2433 bp, synthetic construct
  misc_feature 1..2433: note = Description of Artificial Sequence: Synthetic coding sequence
  source 1..2433: mol_type = other DNA
atgcctaatcagggtgaagattgctattttttcttttattcaacttgtactaaaggggattcctgccccttcaggcactgcgaggcggctatcggaaatgaaactgtgtgtacactgtggcaggagggaagatgcttcagacaggtctgtagattccggcacatggagattgacaagaagcgctctgagatcccatgttattgggagaaccagccgaccggctgccagaaactgaactgtgcattccaccataatcggggaaggtatgttgatggcctctttctgcccccatcgaaaacggtgttaccaaccgtgcctgagtctcccgaagaggaggtgaaggctagtcagctgagcgtgcagcaaaacaaattaagtgttcaatcaaatcctagccctcagctccgcagtgtgatgaaggttgagagtagtgaaaacgttccatccccaacgcaccctcctgttgtcattaacgccgcagatgacgacgaagatgatgatgaccagttcagcgaggagggggacgagactaagactccgacgttgcagcccaccccagaggtccataatggtctgcgagtgactagtgtgagaaagcccgcagtgaatatcaaacagggagagtgtctcaattttgggatcaaaacgctggaagagattaagtcgaaaaagatgaaagagaaatctaagaagcagggtgagggttcctcaggggtctcttccctcctgcttcaccctgagccagtccctgggcctgaaaaagaaaacgttcggaccgtcgttcgaaccgtgaccctcagtaccaagcagggagaggagccactcgttaggttgagccttacagaacgccttgggaagagaaagttcagcgcgggaggagactcagatccaccacttaagagatcgttggcccagcgactgggaaaaaaagtggaggcccctgaaacaaatatcgacaaaactcctaagaaagcccaggtctccaaatctctaaaggagaggcttggcatgtctgctgaccccgacaacgaggatgctaccgataaagtcaataaggtgggggagattcatgtgaaaactcttgaggagatcctgctggaacgcgcatcccagaaaagaggcgaactacagactaaacttaagacagaagggccatcaaagaccgatgatagtacctccggtgctaggtcaagtagtaccatacgaataaaaaccttcagtgaggttctcgccgaaaagaagcatcgacagcaggaggccgagaggcagaaaagcaagaaggataccacttgcattaaactgaaaatcgattccgagattaagaagacagtcgtgttgccacccattgtcgctagccggggtcagtccgaagagccagcaggtaagaccaaatctatgcaagaggtccacatcaaaaccctggaggaaataaagttagagaaagccctgcgggtgcaacaaagcagtgagagctccacgtcctccccatctcaacacgaggcaacacctggagcccgtcgccttttgcgcattacgaagcggaccggcatgaaagaagaaaagaatctacaagaaggcaatgaggtcgattcccagtcaagtatcagaactgaggcgaaagaggccagcggcgaaacaactggggtggatatcactaaaattcaagttaagaggtgtgagacaatgcgcgagaagcatatgcagaagcagcaggagcgagagaagagcgttcttacaccactgcggggtgatgttgcatcttgcaacacccaggtggctgagaagcctgtgctcactgcagttcccggaattacgcggcacctgactaagcggctccccacaaaatctagccagaaggtggaagtggaaacctccggcattggagattctctgctgaacgttaagtgtgccgctcagaccctcgaaaaacgcggaaaagccaaacccaaggtaaacgtgaaaccctccgtagtcaaggtggtttcaagccctaagctggcccctaaaagaaaggcggtggaaatgcacgcggcagttatagccgcagtgaaacctctatcctctagttccgtcttacaagagccgcctgccaaaaaggcagccgtggctgtcgtcccactggtttccgaggataaatctgttacggtgccagaggcagagaacccgagagattctctggtgttgcctccaacccagtccagttcagactcatctccacccgaggtcagcgggccatctagctcacagatgagtatgaaaaccagaagactgtcttctgcttctaccggtaagccgccactatctgtggaggatgacttcgaaaagctcatttgggaaatttctgggggaaaacttgaggcagagattgacctggatcctgggaaggatgaggatgatttacttctggaactgtcagaaatgatagattcttag

SEQ ID NO: 247184 - DNA, 2433 bp, synthetic construct
  misc_feature 1..2433: note = Description of Artificial Sequence: Synthetic coding sequence
  source 1..2433: mol_type = other DNA
atgcccaatcagggcgaggactgttactttttcttctacagtacctgtaccaaaggcgattcttgccccttccggcactgcgaggccgcaatcgggaacgagaccgtgtgcacactctggcaggaagggagatgttttcgccaggtctgtcgattccggcatatggaaattgacaaaaagaggagcgagatcccgtgttactgggaaaatcagcccacagggtgtcagaagttgaattgcgccttccaccataacaggggaaggtacgtggatggcttgtttctgcctcctagcaagaccgtcctcccgacggtcccggagtctcctgaagaggaggtgaaggcaagtcagctgtcagtccagcagaacaagctgtctgtacagagtaacccaagtcctcagcttcgaagcgtcatgaaagtcgagtcaagtgagaacgtcccctctcctacccaccctccagtggtcatcaacgctgctgatgatgacgaggatgacgatgaccagttcagcgaagagggagatgagaccaaaaccccgactctgcaacctaccccagaagttcataacgggttgcgagtgaccagtgtgaggaagcccgcagtcaacattaaacagggcgagtgtttgaattttggcattaaaacactcgaagagattaaaagtaaaaagatgaaagaaaagtcgaagaaacagggggaggggtcctctggtgttagttccctgctgctgcatcctgagccggtccctggccctgaaaaggagaacgtgcgaactgtggtacgcactgtgactctgtctacgaagcagggagaagagcctctggtccgcctgagtctaaccgagcggctgggcaagcgcaaattctccgctggtggagatagcgatcccccactcaagaggtcacttgcacagcgcctgggcaaaaaggtcgaggcccctgagaccaatatcgataaaacccccaaaaaggctcaggtatcgaagagtttgaaggagcgcctggggatgtccgcagaccccgacaacgaggatgcaacagataaggtgaacaaagtaggggagatccacgtgaaaacattggaagagatactgctggagcgggctagtcagaagcggggtgagctacaaacgaagctgaagaccgagggtccatccaagacggatgacagtacgtccggagccaggtcctcaagcaccataagaataaagactttcagtgaagttctcgctgaaaagaaacataggcagcaggaggccgaacgacaaaaatcaaaaaaggacactacctgcattaagctcaagatcgactcggaaatcaagaagaccgtcgttctgccccctattgtagcctccagaggacagtccgaggagccagccggtaagacgaaatccatgcaggaagtgcacatcaaaactctggaagaaatcaaactagagaaggccttacgtgtgcagcagagctccgaaagcagcacttccagtccaagtcagcatgaagcaacacccggtgcgaggcgcctgctcagaattaccaagagaactgggatgaaggaggagaaaaacttgcaggagggcaatgaagtggactcccagtcctccattaggacagaagctaaggaagcgtccggtgaaactactggggtggatataaccaaaattcaggtcaaacgctgcgagactatgcgggagaagcacatgcagaaacagcaggaacgggagaagagcgtactaactccacttcggggagatgttgcctcctgcaacactcaggttgccgagaagcctgttctgacagcggtgccgggaattactcgtcacctaaccaagaggttgccaacaaaaagctcgcaaaaggttgaagttgagacctctggtattggcgatagccttctcaacgtgaagtgcgctgcacagacacttgagaaacggggaaaagccaagcccaaagttaatgtcaagccatcggtggtgaaagtggttagcagtcccaagttggctcccaagcgcaaagccgttgaaatgcatgccgctgtaattgcggcagtgaaacctttgagttcttcctctgtattacaggagcctcctgccaaaaaagctgccgtcgcagttgttccactcgtatcagaagataaaagcgttaccgtcccagaagctgagaatcctcgggattccctcgttttgcctcctactcagtcttcttctgacagcagtccacctgaggtgagcggcccaagttccagtcagatgtctatgaaaacacgcaggctgagcagcgcctccaccgggaagccccctctgagcgtggaagacgattttgaaaagctgatctgggaaataagcggcggaaaacttgaggccgagatcgacctcgacccaggcaaagacgaagacgacctcctgctcgaactatcggaaatgattgactcatag

SEQ ID NO: 247185 - DNA, 153 bp, synthetic construct
  misc_feature 1..153: note = Description of Artificial Sequence: Synthetic coding sequence
  source 1..153: mol_type = other DNA
atgcccaatcagggagaagattgctatttctttttctattctacttgcacaaagggggattcctgtccgttccggcactgtgaagcagcaattggcaatgaaacggtgtgcaccctgtggcaggaaggcaggtgtttccgtcaggtttgttag

SEQ ID NO: 247186 - DNA, 1548 bp, synthetic construct
  misc_feature 1..1548: note = Description of Artificial Sequence: Synthetic coding sequence
  source 1..1548: mol_type = other DNA
atgccgaaccagggtgaagattgctatttcttcttttatagtacctgtaccaagggggactcctgcccattccggcactgtgaggcagcaattggaaacgagacggtctgtaccctttggcaggaaggaaggtgctttcggcaagtttgccgattccgccacatggaaatcgacaagaagcggtccgaaatcccgtgttactgggagaaccaacccactggatgtcagaagctgaattgtgcgtttcaccacaaccggggaagatacgtcgacggcttgttcctaccgccatctaagaccgtcttacccactgttcccgagtcaccagaagaagaggtcaaagcctcccagctgagcgtccaacagaacaagttatctgtacagtcaaatcctagcccacaactgagatccgtgatgaaagtcgagtccagcgaaaacgttccctcacctacgcacccaccagtggtgattaacgccgcagatgatgacgaggacgatgacgaccaattcagtgaggaaggagacgagaccaagacccccacactccagcctacacctgaagtgcacaatggcttgagagtgactagtgtccggaaacctgctgtgaacattaaacagggggagtgcctgaactttggaatcaaaacactggaggagataaaatccaagaagatgaaggaaaagtcaaagaagcagggtgaagggtcttcaggcgtatccagtctcctcctgcaccctgagcctgtgcctgggccagagaaagagaacgtgcgtaccgtagttcgcaccgtaacactttcaactaaacaaggagaagagccccttgtccgcttgtcgctgaccgaacggctgggtaaacggaaattcagcgccggaggagacagcgacccccctctgaaaaggagcctcgcccaacggctcggaaagaaggtggaggcgccagagacaaatattgataaaaccccaaaaaaggcacaggttagtaagagcctaaaagagagacttggaatgtcagctgaccctgacaacgaagacgcgaccgacaaagtgaacaaggtgggagagatccacgttaaaacactggaggagattttattagaacgcgcaagccagaagcgaggggaactgcaaacgaaactgaagaccgaaggcccatccaagacagacgatagtaccagtggcgctcgctcctccagcactatccggatcaagacatttagcgaggtcctggccgagaaaaagcaccgacagcaggaggccgaaaggcagaagagcaagaaagacacaacttgtatcaaacttaagattgacagcgaaataaagaagaccgttgtcctgccccctattgtagcatcccgcggtcaaagcgaagagccagcgggtaaaaccaaatccatgcaggaagtgcacattaagaccctagaggagatcaagctggagaaagcgttacgggtccagcagagcagtgagtcctccaccagctcaccaagccagcacgaagctactcccggagcacgcagacttctgcgcatcaccaagcgcacgtag

SEQ ID NO: 247187 - DNA, 2271 bp, synthetic construct
  misc_feature 1..2271: note = Description of Artificial Sequence: Synthetic coding sequence
  source 1..2271: mol_type = other DNA
atggaaatcgataaaaagcggtcagaaatcccctgttactgggagaatcagccaactggttgccagaagcttaactgtgcattccaccacaatcggggtcgctacgtggatgggctgttcctgccccctagcaagaccgtgctccccacagtgccagaaagccccgaagaggaggtaaaagcatcccagttgtcagtgcagcagaataaattaagcgtgcagtcaaacccatcgccccagcttaggagcgtgatgaaggtggaatctagtgagaacgtgccttcgcctacacacccgccagtggtgatcaacgccgcagatgacgacgaggatgatgacgatcagttcagcgaagaaggcgacgaaaccaagacacccaccctgcaaccaacacctgaagttcacaatggccttcgggtcacgagcgtaaggaaacccgcagtcaacattaaacagggtgagtgtctgaatttcggcatcaaaaccctggaagaaatcaaatctaagaaaatgaaagaaaaaagcaagaaacagggagaggggtccagcggggtgtcatcattgctgctgcaccccgagcccgtacccggtccagaaaaggaaaatgttagaacagtagtgaggacagtgaccctgtccactaaacagggtgaggagcccttggttcgtttatccctcacggagagacttgggaaacgaaaatttagcgccggaggggatagtgatcccccattgaaaagatctctcgcacagcgactgggaaagaaggtagaggcccctgaaaccaatatcgacaaaacccccaaaaaggcccaggtgagtaagtctttaaaggagcggctgggtatgtccgctgaccccgacaatgaggatgcgactgacaaggtgaataaggtgggagagattcacgtgaaaactctcgaagaaatactcttagaacgggcatcccagaaaagaggagagttgcagacgaagctgaagacagagggacccagcaagaccgacgattcaacgtccggcgcaaggagctcttccactatccggataaaaacattctctgaggtgttggccgagaaaaagcataggcagcaggaagcagaaaggcaaaagtccaaaaaggatactacatgtatcaagctgaagattgacagtgagataaaaaaaacggtggtgcttccgcctattgtggcttcgaggggccaatccgaagaacctgccggtaagacaaaatctatgcaagaggtgcacatcaagacacttgaggagataaagctggagaaagctcttcgagtacaacaatcttccgagtctagcacatcaagccctagccagcacgaggcaacaccaggagctcgtcggctgctgcggatcacaaagcgaaccgggatgaaagaagagaaaaatttgcaggaaggcaacgaagtggatagtcaatcttcgatccggacagaagctaaagaggcatccggagaaaccacgggagtcgacatcactaagattcaggtcaagcgttgtgaaacaatgagagagaagcacatgcaaaagcagcaggagcgggagaagtcagtcctgactccacttcgcggagacgtcgcatcctgcaacacacaggtagccgaaaaacctgtgctcactgccgttccaggaatcactagacaccttactaagcggctccctacaaaatcctctcagaaggtggaggtggaaacctccggcattggggatagcttgctgaacgtgaaatgtgctgcccagactctggagaaacgcggtaaggctaagcccaaggttaacgttaaaccttccgtggttaaggtggtcagctctccgaagttggcccctaagcggaaggcagtcgagatgcacgctgcagttatagctgccgtcaagccccttagctcttcttctgtcctccaggagcccccagcaaagaaggccgcagtggctgtggtaccactcgtgtccgaggataaatcagtcacggttcccgaagctgagaaccctcgagatagcttagtcctgccacccacccagtcatcctccgatagcagtccgcctgaagtgtccggcccatcttcctcccagatgtcgatgaagacaaggcggctttcctcagcgagcacaggaaagccaccactgagcgtagaggatgacttcgaaaaactgatctgggaaattagtggaggaaaactggaggccgagatcgatctggacccgggaaaggatgaggacgatctcctcttggaattatcagaaatgatcgatagttag

SEQ ID NO: 247188 - DNA, 2433 bp, synthetic construct
  misc_feature 1..2433: note = Description of Artificial Sequence: Synthetic coding sequence
  source 1..2433: mol_type = other DNA
atgcctaatcagggagaagactgttacttcttcttctattccacgtgcactaagggcgatagctgccccttccgacactgtgaggccgctattggtaacgaaaccgtatgtaccctgtggcaggaaggcagatgttttcggcaggtttgtcgcttcagacacatggagattgataaaaagcggagcgagatcccatgttactgggagaaccagccgaccgggtgtcaaaaactgaattgcgcattccaccataatcgcggtcggtacgtagacggcttgttcctccctcctagcaaaaccgtgctgcccaccgtacccgagtccccagaggaggaagttaaagcatcgcaattatctgtccagcagaacaaactgagcgtgcagtcaaatcctagtccgcagctgcgaagcgtgatgaaagtcgagagcagcgaaaacgttccaagcccaactcatccgccagtggtcatcaatgctgccgatgacgatgaggacgacgatgatcaatttagcgaggagggtgatgaaactaagactcctactctgcagcctacacccgaggtgcataatggtctgagagtgaccagcgtgaggaagccagcggtgaacatcaaacagggtgaatgtctgaacttcgggataaaaaccctggaagagataaagagcaagaaaatgaaggaaaagtcaaagaagcagggagaagggagtagcggtgttagcagcttattacttcatccagaacccgtccccggtcctgagaaagagaacgtcaggaccgtggttaggactgtaacactgagtaccaaacagggggaggagcccctggtgaggctatcactcaccgagcggctaggaaagcgaaaattctcagcagggggtgatagtgatcccccactcaagcggtctctggctcagagactgggaaaaaaggtggaagctccggagacaaacatagacaagactcctaagaaagctcaggtcagcaagtcactcaaagagcggttgggcatgtccgccgatcccgacaacgaggacgctaccgacaaagtgaacaaggtgggggagatccacgtaaagactcttgaggagattctgcttgaacgggcaagtcagaaaaggggtgagttgcagaccaaattaaagacagaaggcccatctaaaaccgatgactctacctccggtgccaggagcagctcgacgattaggatcaagactttcagcgaggtgctagccgaaaagaaacatcggcagcaggaggcggaacggcagaaatccaagaaggacaccacgtgcatcaaactcaagatagattctgaaatcaaaaagaccgtggtgcttccgcctatcgtggcctctagaggacagtccgaagaacctgcgggtaaaactaaaagtatgcaggaagtccacatcaaaacactggaagagattaagttagagaaggccctgagagtgcagcagtcttctgagagctctacgtcctctcccagtcagcatgaggccactccaggcgctcgacggctgcttaggatcactaaaagaaccgggatgaaagaggagaaaaatctgcaggagggcaacgaagtggattcgcagtcctccatcaggacagaggccaaagaggctagcggagagacaacaggtgtcgatattaccaaaattcaggtgaaacggtgcgaaacgatgcgggaaaagcatatgcagaaacagcaggagagagaaaaatccgtattgacgcccttacggggagacgtagcctcatgcaatactcaggtcgccgagaagcctgtactgaccgcggtcccaggcattaccagacacctgactaaaagacttcccaccaaaagttcccagaaagtggaggtggaaacatcaggaataggcgactctttgctaaacgtaaaatgtgctgcacagaccttggagaagcgaggtaaagctaagccaaaggtaaatgtgaaaccttccgtggtgaaggtggtgtcttcaccaaaattggctcctaagcgtaaggccgtcgaaatgcacgcagccgtgattgcagcagtgaagcctttaagctcttcctcagtgcttcaggagcccccagccaagaaggcagctgttgctgttgtgcccctcgtgagtgaggacaaatctgttactgtcccggaagcggagaacccaagggacagcctcgtcctgccgccaactcagtcctcttccgatagctcacctcccgaagtatcaggcccttcctcctctcagatgagtatgaagaccaggagactttcctcagcgagtactggcaagcctccactctctgtagaagatgacttcgagaaactaatatgggagatctcaggtggaaagcttgaagccgaaatcgatcttgaccctggcaaggatgaggatgacctgctgttagagctgtccgaaatgatagattcttag

SEQ ID NO: 247189 - DNA, 1584 bp, synthetic construct
  misc_feature 1..1584: note = Description of Artificial Sequence: Synthetic coding sequence
  source 1..1584: mol_type = other DNA
atggaacatccaagcaaaatggagtttttccaaaaattgggatatgatcgcgaagacgtgctgcgcgtgttgggcaagcttggcgagggagccttagttaatgacgtgttgcaggagctgatccggacaggtagtcgccctggggctcttgagcaccccgctgccccacgcctggtgccgcgtggctcatgcggagttccagactctgctcagcgaggcccaggtaccgccctggaagaggacttcaggactctggcttcttctttaagacctattgttattgacggcagtaatgtcgcaatgtcccacggaaacaaagaaaccttctcttgcagggggattaaactggccgttgattggtttagagataggggtcatacatacataaaagtattcgtgccctcctggcgcaaggacccaccaagggcagataccccaatccgggagcagcacgtactcgctgagctggagaggcaggcagtgctggtttacactccctctcggaaggtgcatggaaagcgcttagtttgctatgacgataggtacatagtgaaagtggcctacgagcaggacggcgtgatagtctccaatgacaattatcgagatttacaaagtgaaaacccagagtggaagtggttcatcgaacaacgactgctgatgttctcctttgtgaacgatagattcatgccaccggatgatcctctagggcgacacgggccttcactctctaactttctttctagaaagcctaaacccccagaaccaagctggcagcattgtccttatggaaagaagtgcacttacgggattaagtgtaaattctatcaccccgagaggccccaccatgcgcaacttgcagtcgccgacgaattacgagctaagaccggtgcccgaccgggtgcaggggcagaggagcagcgtccacctagagcaccgggtgggtccgcaggggctcgcgcagctcctagggagccttttgctcactctctcccccctgctcgcggatcacctgacctcgccgctctgcggggatccttttcacgacttgctttcagtgacgacttgggacctctcggaccaccattgcctgtccccgcatgtagtctgactccgaggctcggcggacccgattgggtctcagccggtggaagagtgccaggcccattatctctgccctcaccggagagccaattctcacctggggatctgccaccgccaccagggctacagctacagcccagaggcgagcaccggcctagggatctgcacggcgatttactgtccccacgtcgcccacctgacgatccgtgggcaagaccaccgcgaagcgataggttccccggacgcagtgtgtgggcagaacctgcatggggagacggcgcaacgggcggtctgtccgtgtacgcgacggaggacgacgaaggagatgctcgtgcacgggctcggatcgccctgtactcagtcttccccagggaccaagttgacagagtgatggcagctttccccgagctgtctgacctggcacgcctgattctgctggtgcagagatgccagtctgccggagcccctctaggcaagccctag

SEQ ID NO: 247190 - DNA, 1584 bp, synthetic construct
  misc_feature 1..1584: note = Description of Artificial Sequence: Synthetic coding sequence
  source 1..1584: mol_type = other DNA
atggaacacccatctaagatggagttcttccagaagcttggatatgatcgtgaagatgttctgagggtgcttggtaagctgggagaaggagccttggtgaacgatgtgctgcaagaactgattagaacaggatcccgccctggcgctttggaacatccggctgcaccccgactggtaccgaggggctcctgcggggtcccggacagtgctcagcgagggccaggcactgcactcgaggaggattttcgaaccctggcctccagtctccggcctatagtgattgatggtagtaacgtcgccatgtcgcacggcaacaaggagaccttctcgtgcaggggtatcaagttagccgtcgactggtttcgggataggggacatacctacatcaaggtctttgtgccctcctggagaaaggaccccccacgggctgatactcctataagagaacagcacgtgctagcagagctggagagacaggccgtgctggtgtatacaccaagcaggaaagtgcacggaaagaggctggtgtgctacgacgaccggtatattgttaaagtggcctatgagcaggacggggttatcgtgagcaatgacaactaccgtgacctacagagcgagaaccctgaatggaagtggtttattgagcagcggctcctcatgttttcatttgtcaacgaccggtttatgccccctgatgacccgctggggagacatggtccatctctgtctaattttttgtcacggaaaccaaaacctcccgaaccctcctggcaacactgtccgtacggaaagaaatgtacttatggaatcaagtgcaaattctaccaccccgagcgccctcatcacgctcaactggctgtcgccgatgagctgcgtgctaaaacgggggcaaggccgggagcaggggcagaagagcagaggccaccccgagctcctgggggtagcgctggggcaagagccgcaccacgcgaaccattcgctcattcactgccacccgcaagaggaagcccagatttggctgccctgaggggctccttcagtcgacttgccttcagcgatgacctcggacctttggggcctccattacctgttccagcctgcagtcttacgcctcggctaggcggtcccgattgggtatctgccggaggcagggtacccggacccctatcattgccttctccggagtcacagtttagcccaggggatctacctccaccgccaggtctacaactgcaacccagaggggagcatcgacccagagatctgcacggagacctgctatcccccaggagacctccagatgacccatgggccagaccacctaggagcgataggtttccaggccgatccgtttgggccgagcctgcttggggcgacggagccaccggtggcctctctgtctatgcaactgaggacgatgaaggagatgcacgggcaagagctcgtatcgcgctgtactccgtgtttcctagggaccaggtggaccgggttatggcggcatttcccgagttgagcgacctggctcggctgattctattagtgcaacgttgtcaatccgcaggggcaccgcttggcaaaccctag

SEQ ID NO: 247191 - DNA, 966 bp, synthetic construct
  misc_feature 1..966: note = Description of Artificial Sequence: Synthetic coding sequence
  source 1..966: mol_type = other DNA
atggagcacccctccaagatggagttttttcagaaactggggtacgacagggaagatgtgctccgcgtgctcggcaaactcggagagggagcgctcgtgaacgatgttctgcaagaattaataagaaccggctcgcggcctggtgctctcgagcacccagcagcacctaggttggtcccgagaggaagctgcggcgttcccgacagcgcgcagcgcggaccagggacagccctagaggaagattttcggactctggcttccagcctacggccaatcgtgattgacgggtcaaatgttgctatgtcccatggaaataaagaaaccttcagctgtagaggaatcaagctcgctgtcgactggttccgagataggggacatacctacatcaaagtttttgtcccctcttggaggaaagatcccccacgggctgacacccccatacgtgaacagcatgtgttggccgaactagagcgacaggctgttctcgtgtacaccccgagcagaaaggtgcacggaaagaggcttgtgtgctacgatgacaggtatatagtaaaagtcgcctatgagcaggatggagtgattgtgtcgaatgataactaccgggatctgcagagtgaaaatcctgagtggaagtggttcatagagcagcgactacttatgtttagcttcgtaaatgatcgtttcatgccaccggatgatccactagggaggcacgggcctagcctgagcaactttctctcaaggaagcctaagccacctgagccatcatggcagcactgcccttacggtaagaagtgtacttatggaatcaaatgtaagttctatcaccccgaaagaccccaccatgcccagttggccgtggcagacgagctcagagccaagactggcgctcgcttgggagtccgtggcagacctcccgcatcagcacgcccagctgccccagccgctgggaggactcccccatag

SEQ ID NO: 247192 - DNA, 966 bp, synthetic construct
  misc_feature 1..966: note = Description of Artificial Sequence: Synthetic coding sequence
  source 1..966: mol_type = other DNA
atggagcatccgtccaagatggagttttttcagaagcttgggtatgacagagaggacgtgttgcgcgtcttaggaaaattaggagaaggcgcactggtcaacgacgtcctgcaggagctgatccggactggctctcgtcctggtgcgctggagcatcctgccgcaccccgactggtgccaaggggttcttgtggagtgccggacagcgcacagcgcggacccggaactgccctggaggaagatttccggactctggccagctctctgcgccctattgtcatcgacggctctaacgtggcgatgtcacatggtaataaagaaacatttagctgtcggggaattaaactggcggtggactggtttagagacagagggcatacctacatcaaggtcttcgttccctcctggcgaaaagatcctcctcgagctgacactcccatacgagagcagcatgtgctggcagagttggagcgacaggctgtactcgtgtatacgccatctcgtaaagtccacggaaaaaggctcgtttgttatgatgaccgatatattgtgaaagttgcctatgaacaggatggcgtgatcgtgtccaatgacaattatcgggacctccaatctgaaaatccagaatggaagtggtttattgagcagcggttgcttatgtttagcttcgttaacgaccgctttatgccaccagatgatccactggggcgacatggaccatctctctccaatttcctgtcacggaagcctaagccaccagagccgtcttggcagcactgtccctatggcaagaagtgcacatatgggatcaagtgtaagttctatcatcctgagcgccctcatcacgctcagctagcagtggctgacgaactccgtgccaagactggggctcggcctgtactccccggtcgcccacctgcttcagccagacccgctgcacctgcagctggaaggacacccccatag

SEQ ID NO: 247193 - DNA, 2211 bp, synthetic construct
  misc_feature 1..2211: note = Description of Artificial Sequence: Synthetic coding sequence
  source 1..2211: mol_type = other DNA
atggagattgggaccgaaatttccaggaaaattagaagtgccattaaagggaagcttcaggagctgggcgcatatgttgacgaggagctgccagactatataatggtgatggtcgcaaataagaagagccaagatcagatgactgaggacctgtccttatttcttgggaataataccatcaggttcactgtatggctgcacggggtccttgataagctgagatctgtgaccacagagccatcgagcctcaaatcaagtgacaccaatatttttgatagcaatgtaccctccaacaaatcaaatttttccagaggagatgaaagacggcatgaggcagctgtacctcctctggctatcccttccgcgagaccagaaaaacgggattcccgggtgagcactagctcacaggaatcgaagacaactaatgtgcggcagacctacgacgacggcgctgcaaccaggcttatgtccaccgtcaaacccctgcgagagcccgctcctagcgaggatgtcattgacatcaagcctgagccggacgacttaattgatgaagatttgaacttcgtgcaggaaaatccactctcgcagaaaaagcccacagttaccttgacatacggaagctctagaccttccatcgagatctatcgtccgccagccagccggaacgccgattccggggtgcacctaaatcgcctgcagttccagcagcagcaaaattcgattcacgcagctaagcaactggatatgcagagtagctgggtctacgagaccggtaggctatgcgaacccgaagtgctgaacagcctggaggagacatattcgcctttttttagaaataattctgaaaagatgtcaatggaggacgagaacttcagaaagcgaaagctgccagtggtcagttccgtggttaaggttaagaaatttaaccatgatggtgaggaggaagaagaagacgatgactacggttcccgcaccggcagcatttcttcttccgtttccgttcctgcaaagcccgaacggagaccctctcttcctccgagcaagcaggccaataagaacctaatacttaaggcaatttctgaggctcaggaaagcgtgactaaaacaactaattacagtacggttccacagaaacagaccttgccggtggcccctagaactagaacctcacaggaggagctgctcgctgaggttgtccaggggcagtcaagaactccgaggatctctccacccatcaaggaagaagagactaagggcgacagcgtagagaagaatcagggcactcagcagagacagctgctctcccgcctgcagatcgatcctgtcatggccgagacactgcagatgtcacaggattattatgatatggagagtatggtccacgcagatacacgctcttttattcttaagaaaccaaagctcagcgaggaggtggtagtggccccaaatcaggaaagtgggatgaaaaccgctgactccctccgggtgttgagtggccacctgatgcagacaagggatctggttcagcctgacaaaccagcctcacctaaatttattgtaacactcgacggcgttccttcaccccctggatatatgtccgatcaggaggaggacatgtgtttcgagggcatgaagcctgtgaatcaaaccgctgcctcgaataaaggactgagagggctgctgcatccccagcaactgcacttgctatcccgccagcttgaagatcctaatgggagtttttctaacgcagagatgagcgagctgagtgtagcccagaaaccagagaaactgctggagcgctgcaagtattggcctgcttgtaagaatggtgatgaatgcgcctaccatcatcctatttcaccttgtaaagcttttcccaattgcaagtttgccgagaagtgcctcttcgtccatcctaactgcaagtacgacgcgaaatgtacaaaacctgactgtcctttcacccatgtcagtagaagaatacctgttctctccccaaaacccgctgtagctcctccagccccaccctccagcagtcagttgtgccgatatttccccgcttgtaaaaagatggagtgcccattttatcatcccaagcattgccggttcaatacccagtgtaccaggccagactgcactttttaccatcctaccatcaatgtgcctccgaggcatgctctgaaatggatccggcctcaaacgtccgagtag

SEQ ID NO: 247194 - DNA, 1740 bp, synthetic construct
  misc_feature 1..1740: note = Description of Artificial Sequence: Synthetic coding sequence
  source 1..1740: mol_type = other DNA
atggaaatcggcactgagatcagtcgtaagataagaagtgccataaagggtaaattgcaggagctgggggcatatgtggacgaggagctgcctgattatatcatggtgatggtcgctaataagaaaagccaagaccagatgacggaggacttgagtttattcctggggaacaataccatccgcttcaccgtgtggttacatggtgtgctcgacaagctcaggtcagtgaccacggagccatcaagcctcaaatcatctgatacaaatatcttcgactctaatgtcccgtctaataagtcgaactttagtcgcggtgacgagaggagacacgaggccgctgtgccaccgcttgcaatccccagcgccagaccagaaaagagggatagcagagtctccacgagtagccaggagtctaagacgaccaacgtgcgccagacttacgacgatggcgcagccacgagattgatgagtaccgttaaacccctccgagaacctgccccttccgaggatgtgattgatattaaaccggaacctgacgacttgatagatgaagatttaaatttcgtgcaagaaaatcctctgagccaaaaaaagcccaccgtcaccctcacatatggtagctctcgtccaagtatcgagatctacagaccccctgcatccagaaacgctgacagcggagtgcaccttaaccggcttcagtttcagcagcagcagaattccatccatgccgctaagcaactggatatgcagtcttcttgggtttatgagaccgggcgtctgtgcgaaccagaggtgctaaattccctcgaggagacctactcaccattcttcaggaacaacagtgaaaaaatgagcatggaggatgagaatttcaggaaaaggaaattaccagtagttagcagcgttgtgaaggtgaagaagttcaatcatgacggggaagaagaagaagaggacgacgactatggatccagaacaggaagtatcagtagcagtgtctcagttccggctaaacccgagaggcggccaagcctcccaccttccaagcaggccaataagaacctgattttgaaagcgatcagcgaggcccaggaaagcgtgaccaaaaccacaaactattccacagtcccacagaagcagacgctccctgtggcccctagaaccaggacatctcaggaggagctgctcgcggaggtggttcaggggcagtcacggaccccgcgtatctctcctccaatcaaggaggaggagactaagggagattctgtggagaaaaatcaggccgaaatgagcgagctttctgtggcccagaagcctgagaagctgctcgagaggtgcaagtactggccagcctgtaaaaacggagatgagtgtgcttaccaccaccctatttccccatgcaaggcctttcccaactgtaaattcgccgagaaatgcttgtttgttcatccaaactgtaaatacgatgccaaatgcacgaagccagattgtccatttactcatgtgagcagacggatacctgtgctcagtccaaagcccgtagctcccccagccccaccttcctcctcgcagctgtgtcgctatttccccgcttgtaagaagatggaatgtccattctatcacccaaaacattgcaggtttaatacccagtgtactcgccctgattgtaccttctatcacccaacaatcaacgtaccaccaaggcatgccctgaagtggatacggccacagacgtccgaatag

SEQ ID NO: 247195 - DNA, 921 bp, synthetic construct
  misc_feature 1..921: note = Description of Artificial Sequence: Synthetic coding sequence
  source 1..921: mol_type = other DNA
atgcgaatgagcagcaagtttccgagtcccccactccctattttccttcccccagagcccgtcgacctcggctctattacttctagcagttgcagcctgaacgagttggataacattagtcatctgttgcggaaaatatctgctgacattaacgaaatcaaaggaatgaaagctgccatcctcacggtcgaagctaatctcttcgacctgaacgtgagggtcagtaaaaatgaggctaagatctcgtcactggaagtgaaaatgaatgaatactctactacatatgaatgtaaccggcaattcgaagaccaagaggaggacaccgagtctcagtcgcgcaccaccgacgtgaaaatcatcggcttcctgcggaatgtcgaaaagggcacccagcagagacagctgctgtccagattgcaaattgacccagtgatggctgagaccctacagatgtctcaggccgagatgtccgagttatctgtggctcaaaagccggagaagctcctggaacgatgtaaatactggcctgcctgcaagaacggcgatgagtgcgcgtaccatcaccccatctccccgtgcaaggcctttcctaattgtaagttcgcagaaaaatgcttgtttgtgcaccctaactgcaagtatgatgctaaatgcacaaaacctgactgtccattcacacacgtgtcccgtagaatccccgttctgtccccaaagcctgttgcccctccggctccgccatcaagctcgcagctgtgtagatacttcccagcctgtaagaagatggagtgcccattttaccacccaaaacattgcaggttcaatactcagtgtacacgaccagactgcacattttatcacccaactatcaacgtaccccctaggcatgcactgaagtggattaggccacaaacatctgagtag

SEQ ID NO: 247196 - DNA, 1716 bp, synthetic construct
  misc_feature 1..1716: note = Description of Artificial Sequence: Synthetic coding sequence
  source 1..1716: mol_type = other DNA
atggtcatggtggcaaacaagaaatcacaggaccaaatgactgaggacctgagtctgttcctggggaacaacacgattcgattcacggtgtggctccatggagtgttggacaagctgagatctgttacgaccgagccctcaagtctcaagagtagtgacacaaacatcttcgacagtaacgtgccctcgaacaagtccaacttttctcgcggagacgagcggaggcatgaagcagccgtgcctcctttagccattccctccgccaggccagaaaagcgcgattctcgcgtctccacttcctcacaggagtctaaaaccactaacgttcggcagacttatgacgacggggcagccacaaggctcatgagtaccgtcaaaccccttcgtgagcccgcaccctccgaagacgtcatcgatatcaagcctgagcccgacgaccttatcgatgaggaccttaactttgtgcaggagaatccactgtcccagaaaaaacctacagtaactctgacttacgggtcttccagaccttccattgaaatatataggcccccagccagccggaacgctgatagtggagtgcacctcaataggcttcaattccagcaacagcaaaattctattcacgccgcaaaacagctggatatgcagtcatcttgggtatacgaaactggaaggctgtgcgagcccgaggtcttgaattccctggaggagacctacagcccattctttcgcaacaatagcgagaagatgtcgatggaggatgaaaatttcaggaaaagaaagctcccagtcgtaagctctgtagttaaagtgaagaaattcaaccatgatggagaggaagaagaggaggatgatgactatgggtctcgtacaggaagtatttctagcagcgtatctgtgcccgctaagcccgagcgccgtccctcgctccctccatcaaaacaggccaacaagaatctgatattgaaggcaattagcgaggcacaggagagtgtcactaaaactaccaactattccacagttccacaaaaacagacccttcccgtggccccaaggacaaggacctcgcaggaggagctgctggcagaagtcgtccagggtcagtccaggacacctaggatctccccacccattaaggaggaggaaaccaagggtgacagcgttgaaaaaaatcagggtacacagcaacggcagttactgtcccgacttcagatcgacccagtgatggcagagacactgcagatgagtcaggccgaaatgagcgaactgtcagttgcacagaaacctgagaagttactagagcgctgcaagtactggccagcgtgtaaaaacggtgatgagtgtgcatatcaccaccccatatcaccctgtaaggccttcccgaactgcaaattcgctgaaaagtgcctgttcgttcaccccaattgtaaatacgacgctaaatgcacaaagccggactgccctttcacgcatgtatctcggaggatacctgtcctcagcccaaagcccgctgtagctccacccgctcccccatctagctcacagctttgccgatatttcccagcctgtaagaaaatggagtgccccttctatcatccaaaacattgtcggtttaacacccaatgcacccgaccagattgtactttctaccaccctaccatcaacgtcccaccccgacatgcacttaagtggatcagacctcagacctcagaatag

SEQ ID NO: 247197 - DNA, 2022 bp, synthetic construct
  misc_feature 1..2022: note = Description of Artificial Sequence: Synthetic coding sequence
  source 1..2022: mol_type = other DNA
atggagattggcaccgagatcagtcgcaagattaggagcgctataaagggaaagttgcaggaactcggcgcatatattgacgaagaacttccggattatataatggtcatggtagccaataagaaaagccaagatcagatgactgaagacctctctttatttctgggcaataatacaatccgtttcacggtgtggctacacggcgtgctggacaaactgagatcggtcactacagaaccgtctagcctgaagtcatctgatactaatatcttcgattcaaacgtccctagtaacaaatccaattttagccgaggtgatgaacggagacacgaagcggctgtgccgcctctggctattccgagcgctagacctgagaagagagactctagggtgagcaccagctcgcaggaatccaagacgactaacgtgaggcaaacatacgacgatggagctgccacaaggctgatgagcacagtcaaaccattaagagagcctgcaccctctgaggatgtgatcgacattaagcctgaacctgatgacctgatcgacgaggaccttaattttgtgcaagaaaatcctcttagtcagaagaagcccaccgtgaccctaacctatggctcaagcagaccttccatcgagatttataggcccccagcatcgcgcaacgccgacagcggagtccacctaaaccgcctgcagttccagcaacaacagaacagtatccacgccgctaagcaactcgacatgcagagtagttgggtctatgaaactggcaggctgtgcgagcccgaggttcttaattcattggaggagacctactcgcctttctttcgaaataatagcgagaaaatgagcatggaggatgaaaacttcaggaaaagaaaactcccagtggtatcgagcgtggtgaaggttaagaaatttaaccatgatggggaagaggaggaggaagatgacgactacggttctagaacagggagcatctctagtagcgtgagtgtgccagccaagcccgaacgtcgcccatccttgccgccttccaaacaggcgaacaagaacttaattcttaaagccatcagcgaggcgcaggagagcgtgacaaagactacaaattattctaccgtcccgcaaaaacagactctccccgtggcccctaggacacggacgtcacaggaggagctgctggccgaggtggtacaaggtcagagtagaacgcccaggatcagtccacccataaaggaagaagagaccaagggcgactccgtggaaaaaaaccagggcacccagcagcggcagctcctcagtcgcttgcagatcgatcctgtgatggctgagacactccagatgagccaggattattatgacatggagtcaatggttcacgccgatactagatcattcatacttaagaagccaaagctgtctgaggaggtggtggtcgctccaaaccaggagtctgggatgaaaacagctgacagccttcgcgtgttgtctgggcatctcatgcagacgcgggatctggtgcaaccggacaagccagcaagtcccaaattcatcgttactttggatggcgtgccttctcctcctggctatatgtccgaccaggaggaagatatgtgtttcgagggcatgaagcccgtaaaccagacagcggcatctaataaggggctcaggggccttctccaccctcaacagctccatctgctcagcagacagcttgaagaccccaactgtaagtacgacgccaaatgcactaagcctgactgtccattcacacatgtgtccagacgcattcccgtcctgtcgccaaaaccagctgtggcgccacccgcacctccatcttcctctcagctctgtagatacttccctgcgtgcaagaagatggagtgtccgttctatcacccaaagcattgtcgctttaacacacagtgcactcgccctgactgtaccttctatcacccgacaattaacgtgcctcctcggcacgctttgaagtggatcagaccccagacctcagagtag

SEQ ID NO: 247198 - DNA, 1716 bp, synthetic construct
  misc_feature 1..1716: note = Description of Artificial Sequence: Synthetic coding sequence
  source 1..1716: mol_type = other DNA
atggttatggtggccaacaagaaatcccaggatcagatgaccgaggatctgagcctattcctcggcaataatactatccgatttaccgtgtggctccatggggttctcgataagctccggagcgtcaccaccgaaccttcatccctgaagagtagcgataccaacatttttgattcaaatgtgcctagcaataaaagcaacttttcaagaggcgatgagaggagacacgaggccgcagtcccacccctcgccatcccgagcgcacgacccgagaaacgggacagtagagtttccacaagttctcaagagagcaagaccaccaatgtgcgccagacgtacgacgacggagccgctactcggctgatgtccaccgtgaagcctctgcgcgaaccggctccatcagaagatgtgatcgatatcaagcccgagcccgatgacctgattgacgaggacctgaactttgtgcaggagaatcctctgagtcagaagaagcccactgttacgctcacatacggatcatccaggccttcaatcgaaatctataggcctccagcttccaggaatgctgacagcggagtccacctgaacagactgcagtttcagcaacagcaaaacagcatccatgccgcaaaacagctagacatgcagagctcatgggtatacgagacgggccgactgtgtgagcccgaagtgctgaattccttggaggagacatactcacccttctttaggaataactctgagaagatgagcatggaagacgagaacttccgcaagaggaagttgcccgtggtgtcaagcgtggtgaaggtaaaaaaattcaaccatgacggtgaggaagaggaggaagatgatgactatgggtcacgaacaggctctatttccagtagcgtttctgtgccggctaagcctgagcgacggccttccttgccgccaagcaaacaggcgaacaagaacttgattctgaaggctatatcagaagcacaggagtccgtcacgaagacaacaaactacagtacagtgccacagaagcagacattacctgtggcccctcggacaaggacaagtcaggaggagctgctcgccgaagtggttcagggccagagtaggacaccgaggattagtcccccaatcaaggaagaggagactaaaggggactcagttgagaaaaatcagggaacgcagcaaagacagctcctcagccgtcttcagattgaccccgtgatggcggaaactctccagatgtcacaggccgaaatgtccgaactaagcgtggcccagaaacccgagaaactgctcgaacgctgtaagtactggcctgcctgcaagaatggggacgaatgcgcctaccaccaccccatcagtccctgtaaggcgttcccgaactgtaaattcgcggagaaatgtttgtttgtacacccaaattgcaaatatgacgcgaagtgcactaagcctgactgtccatttacgcacgtgtcaaggcgcatccccgtcctgtctccaaaacctgcggtggctcctccggctcctccctctagttcgcagctatgtaggtactttcccgcttgtaaaaaaatggaatgccctttttaccacccaaagcactgcagattcaacactcaatgcacgcggcctgactgtacgttttatcaccccaccatcaatgtgcccccacgccacgcactgaaatggatccggccacagacaagcgagtag

SEQ ID NO: 247199 - DNA, 1758 bp, synthetic construct
  misc_feature 1..1758: note = Description of Artificial Sequence: Synthetic coding sequence
  source 1..1758: mol_type = other DNA
atggagattgggacagagatttccagaaagattaggagcgccattaaggggaagctgcaggagttaggggcttacgtcgacgaagagttgccggactacattatggtgatggttgctaacaagaagagccaggatcagatgactgaggatctcagcttatttctgggcaacaacaccatacgcttcaccgtttggttacacggtgtgctagataagctccgaagcgtaaccactgaacccagttcactgaaatctagtgacaccaatattttcgactcgaacgtgccccctcttgcaattccgtcggccaggccggaaaagcgcgattcaagggtctccacctcctcacaggagtctaaaacaactaatgtgaggcaaacctatgacgacggcgcagccaccagactaatgagtactgttaaaccattgagggagccggcaccatctgaggacgtcatcgacattaagcccgagccggatgatctgatagatgaagacctcaattttgttcaggaaaatcccctgagtcagaaaaaaccaacggtaacccttacgtatgggtcttctcgcccatccattgaaatttaccgcccaccagcaagccgtaatgctgactctggcgtccacctgaaccgtctgcaattccagcaacagcaaaacagcatccacgcagcaaaacagctcgatatgcagagctcctgggtttatgaaactggaaggctgtgtgaacctgaggtgcttaattccttagaggagacatatagccctttttttaggaacaactctgagaagatgagcatggaagacgagaacttccggaagaggaagctgcccgtggtgagcagcgtggtgaaagtgaaaaaattcaatcatgatggcgaggaggaagaggaagacgacgattatggttcacgtacaggatcaatttcctctagtgtgagcgtgccagctaaacctgagcgacggccttcccttcctccttccaaacaagcgaataaaaatctgatcctgaaagccattagcgaagctcaggagtcagttaccaagaccacaaactacagcacagtacctcaaaagcaaactctgccggtcgctccacgaactaggacaagccaagaggaattactcgcggaagttgtccagggacagagcagaactccacgcatctcgcctcctattaaggaggaggaaacaaaaggagactccgtggagaagaatcagggcacacagcagcggcaactgctcagccgtctgcagatcgacccagtgatggccgaaaccctgcagatgtctcaggccgaaatgtctgaactgtctgtggctcagaaacctgaaaaactgctggaacggtgcaagtactggcctgcttgtaaaaacggtgacgagtgtgcataccatcacccaatttccccatgcaaagcctttcctaactgtaagttcgcggaaaagtgtttgttcgtgcacccgaattgcaagtatgacgcaaaatgtaccaagcccgactgtccttttactcacgtgagtcgcaggatcccagtgctgagccctaaacctgtagcccctcctgccccaccgtccagctctcagctctgcaggtactttcccgcatgcaaaaaaatggagtgtccattttatcaccctaagcattgtaggtttaacactcagtgtacacgccctgactgtaccttctaccatccgacaattaatgtcccccctagacacgccttgaagtggatacgcccacagacaagcgagtag

SEQ ID NO: 247200 - DNA, 2136 bp, synthetic construct
  misc_feature 1..2136: note = Description of Artificial Sequence: Synthetic coding sequence
  source 1..2136: mol_type = other DNA
atggaaatcggaacagagatatctagaaaaattaggagtgctatcaagggcaagctgcaggagctgggcgcatacgtcgacgaggagctgcctgactatatcatggtgatggtggcaaataagaaaagtcaggaccagatgaccgaggatctgagcctgttcctcgggaacaatacaatccgattcacggtgtggctgcatggcgtccttgataaactgcgcagtgtcacaacggagccttcatccctgaagtcctccgacacaaatattttcgacagcaacgtgccttcgaataagagcaacttcagcagaggagatgagcgccgacatgaggccgcagtgccccctctcgccatccccagcgctcgccctgaaaaaagggactctagagtctctacaagttcacaggagagcaagacaaccaacgtgagacagacgtatgatgacggagccgcaacgagacttatgagcactgtgaagcccctcagagagcctgccccatctgaagacgtgatagacattaaaccggaacccgatgacttgatcgacgaagatctgaatttcgtgcaggaaaatccgctgtcacaaaagaagcctactgtgaccctgacttacgggagcagcaggccaagtatagagatctaccggccaccagcatccaggaatgcagactctggagtgcaccttaatcgccttcaattccagcagcagcagaactctattcacgcggcaaagcagctggacatgcagagctcttgggtctatgaaaccgggagattatgtgaacctgaggtgctgaactctctcgaagaaacgtattccccattcttcagaaataactcagaaaaaatgtccatggaggatgaaaactttagaaaacggaaattgcccgtggtgagttctgtggtgaaagtgaagaaatttaaccatgacggagaagaagaagaggaggacgacgactacggctcccggacaggttcaatcagcagttctgtatccgttcccgctaagcccgaaagaaggcccagcttacctccttcaaagcaagcaaacaagaatctcatcctaaaagctatcagtgaagcccaggaaagtgtcaccaaaacgaccaactattcgacagtcccccaaaagcaaacgctgccggtcgcgcctcggacgcggacttcacaagaagaactgctggctgaggtggtccaggggcagtcaaggactcccaggatctctccgcctatcaaagaggaagagactaaaggggatagcgttgagaaaaaccaggattactatgacatggaaagtatggttcacgctgacactcggtccttcatactgaagaagcccaaattatctgaggaggtggtggttgcccctaaccaagagagcggtatgaaaacagctgactcactcagggtgctgtcgggccacctcatgcagacacgcgacttagtgcaaccggataaaccggcttctcccaagtttatcgtgactctggatggtgttccctctcctccaggatacatgtccgatcaagaggaggatatgtgcttcgaagggatgaagcccgtgaatcagactgctgcatctaacaaaggcttacgaggccttcttcatcctcagcagctccacttgctctccaggcaattggaagaccccaatggttccttctcgaacgctgagatgtctgaactgtctgtggcccagaagccagagaaactgctggagcgttgtaaatattggcccgcatgtaagaacggagatgagtgtgcctatcatcatcccataagcccatgtaaagccttcccaaactgcaaattcgccgagaaatgtctgtttgtccatccaaattgtaaatacgatgctaagtgcacaaaacccgattgcccttttactcatgtgagccggaggatacctgtgctgagccctaagcccgctgtcgcccctccagcccctccaagttcttcacaattgtgccgctatttccctgcctgcaaaaagatggaatgtccattctatcaccctaaacactgccgatttaacacccagtgtactagaccagattgcaccttttaccaccctacaatcaacgttcccccacggcacgccctgaagtggataaggccccaaacaagtgaatag

SEQ ID NO: 247201 - DNA, 2136 bp, synthetic construct
  misc_feature 1..2136: note = Description of Artificial Sequence: Synthetic coding sequence
  source 1..2136: mol_type = other DNA
atggagatcggcaccgagattagtcgtaagatacgatctgctattaagggaaagctccaggagctgggcgcttacatagatgaggaattgcctgactatattatggttatggtggccaataagaaatcacaggatcaaatgacggaagatttatcactctttctcggtaacaacactatccggttcaccgtctggctccacggagttttggacaaacttcgttctgtgacaaccgagccctcttccttaaaatcgtctgatacgaatatttttgatagcaatgttccttcgaacaagtctaacttcagccggggagatgagcgtagacacgaggctgccgtgccgccacttgccatcccgagcgctcgccctgagaaaagagactctcgtgtgagcacatcatctcaagagtccaaaacaactaacgtgagacagacttacgacgacggtgcagcaacgaggcttatgagtaccgtcaagccactgcgcgaacccgctcctagcgaagacgtaattgacatcaaacctgaaccagatgacttaatcgacgaagacttaaattttgtacaggaaaatcctctatcgcaaaagaagcccactgtgacacttacatacggctcttcccgcccttccattgagatttataggcccccagcctcaaggaacgcggatagtggtgtccacctgaataggctgcaattccagcagcagcagaattcaatccatgctgccaagcaattggacatgcagagcagttgggtgtatgagacagggagactctgcgaacctgaggtgctcaactctctggaggaaacctattcaccttttttcaggaataactccgagaagatgtccatggaggatgagaacttcagaaaacgcaaattacctgtggtgagcagcgtggttaaggtgaagaaatttaatcacgacggggaagaggaagaggaggacgacgactacggctctaggacaggcagcatttcctcaagcgtctctgtgcccgcaaagcctgagaggagacctagtctgccaccgtccaagcaggccaacaagaatctgatactgaaggctatctccgaggcccaggaatctgttacgaagacaacaaactattcaacagtcccccagaaacagactctgcccgttgccccacgcactaggacgtcacaggaggagctcctggcagaagtggtccagggccagtcccggaccccgagaatcagccctcctattaaagaggaggagaccaagggagacagtgttgaaaagaatcaggattattatgacatggaatccatggtgcatgccgacaccagatcgttcatcctcaaaaaaccaaaattaagtgaggaggttgtggttgcaccaaatcaggaatctggtatgaagactgctgatagcttaagggtgctgtctggacatcttatgcagaccagggacctggttcagccagacaagcccgcaagccctaaattcatagttaccctcgatggggtaccctccccacctggctacatgtccgatcaggaagaggacatgtgcttcgagggaatgaagccggtgaatcaaactgccgcaagcaacaaaggtctccgcggactgctgcacccgcagcagctgcatcttttaagtagacagctggaagatccgaacggttccttcagcaacgccgagatgtctgaactgagtgtcgcgcagaagccagagaaactgctcgagcgctgcaagtattggcccgcatgcaagaacggggatgagtgcgcttaccatcaccctatttccccatgcaaggcctttcctaactgtaaattcgcggagaaatgtctctttgtccatcctaactgcaaatacgacgccaagtgtactaaacctgattgcccttttactcacgtaagtaggaggattcctgttctgtcacccaagcccgcagttgctccacctgctccacccagttcgtcccagctctgccgttacttccctgcctgcaagaaaatggaatgtcctttttatcatccaaagcactgcaggttcaacactcaatgcacacgcccagactgtaccttctaccatcctactattaacgtcccaccgaggcacgccttgaaatggatcagaccccagacctctgagtag

SEQ ID NO: 247202 - DNA, 849 bp, synthetic construct
  misc_feature 1..849: note = Description of Artificial Sequence: Synthetic coding sequence
  source 1..849: mol_type = other DNA
atgcgaatgagcagcaaatttccttcaccacccttgccaattttcttacctcccgaaccggttgacctgggatctattacttcttcctcttgctctttaaatgaactcgacaatatttcacacttgcttagaaaaataagcgccgacattaacgaaatcaaggggatgaaggccgcaatcctaacagttgaagctaatctgtttgatcttaatgtcagggtgtcaaaaaatgaggctaaaatcagctcgctggaagtcaaaatgaatgagtatagcactacctatgagtgcaaccgccaattcgaggaccaggaggaggacacagagtctcagtcgcgaacgacagatgtgaaaatcattggctttctgagaaacgtagagaaagccgagatgagtgagctgtccgtggcccagaagcccgagaagttacttgaacgatgcaaatactggcctgcctgcaaaaatggcgacgagtgcgcctatcaccatcctatttccccttgcaaagcatttcccaactgcaagtttgccgagaaatgcctcttcgttcatccaaactgcaagtacgacgctaaatgtacgaaacctgactgcccctttactcacgtctcccgtcggattcctgtgctgtcacccaagcctgctgttgctccccctgcacctccttccagctcacagctatgtcgatatttcccggcttgcaagaagatggaatgcccattctaccacccaaaacactgccggttcaatacacagtgcaccaggccggactgtacattttatcatccgacaatcaacgtgcccccacggcatgctctgaaatggattagaccccaaacaagcgagtag

SEQ ID NO: 247203 - DNA, 219 bp, synthetic construct
  misc_feature 1..219: note = Description of Artificial Sequence: Synthetic coding sequence
  source 1..219: mol_type = other DNA
atggtcatggtggccaacaaaaagtcccaagaccagatgacagaagacctgagcctctttctgggcaacaacactatccgctttacggtatggctgcacggagtgcttgataaactcagaagtgtgacaaccgagccatcttccctgaagagctcggatactaacatatttgactcaaacgtcccaagcaacaaaagcaacttcagccgcggtgactag

SEQ ID NO: 247204 - DNA, 285 bp, synthetic construct
  misc_feature 1..285: note = Description of Artificial Sequence: Synthetic coding sequence
  source 1..285: mol_type = other DNA
atggtaatggtggccaacaagaagtcacaggaccagatgacagaggacctgagcttgtttctcggaaacaacaccattagatttacggtgtggcttcatggcgtgctggacaaactcaggagtgtgaccaccgagccctcatcccttaagtccagcgacacaaacattttcgactctaacgtgccatcaaataaaagcaacttcagcagaggcgacgaacgacgccatgaggccgctgtccctccactggctattccctccgctaggccggagaagagggactag

SEQ ID NO: 247205 - DNA, 648 bp, synthetic construct
  misc_feature 1..648: note = Description of Artificial Sequence: Synthetic coding sequence
  source 1..648: mol_type = other DNA
atggtcatggtcgccaacaaaaaaagtcaagaccagatgaccgaagatctcagcctatttctcggaaataacaccataagatttacagtttggcttcatggagtcctcgataagctgcggtccgttaccaccgaaccctcctcactcaaatcctctgataccaatatttttgattctaacgtaccttctaacaaaagtaacttctcccgtggcgacgagcgcaggcatgaggctgctgttccaccgctggctataccgtctgctaggcccgagaaaagagattctcgggtctcaacatcatcacaagaaagcaagacaactaatgttcgacagacctatgacgacggggcagctactagattaatgtctacagtgaagccactccgggagccagccccaagtgaagacgtgattgatatcaaacctgagcccgacgacctgatcgacgaagatcttaattttgtacaggaaaatccacttagccaaaaaaagcctacggtaactctgacttacggtagcagcagacctagcatcgaaatttatcgccctccagccagccgcaatgccgactccggggttcacctcaacagactgcaatttcagcagcagcaaaatagtatccacgccgctaagcagctcgatatgtag

SEQ ID NO: 247206 - DNA, 1956 bp, synthetic construct
  misc_feature 1..1956: note = Description of Artificial Sequence: Synthetic coding sequence
  source 1..1956: mol_type = other DNA
tgatcagatactaacatatttgactccaacgtaccttcaaacaagtccaacttttctagaggagatgaaagaaggcatgaagccgcagtgccgccactggccatccccagcgccagaccggagaagagggacagccgggtgtcaacaagctcacaggaatccaagacaaccaatgttcgacagacatatgatgacggtgccgcaacaaggcttatgagtaccgtcaagcccctccgcgagcccgctccctcggaagatgtgatcgatattaaaccagagcctgacgatcttatcgacgaagacttgaactttgtgcaggaaaacccactgagccagaagaaaccaaccgtcactctaacgtatggctcatcacgtccgagtatagaaatctatcgccctcccgcatcgcgaaatgctgattctggcgtgcacctgaatcgtctgcagtttcagcagcagcagaacagcattcatgccgctaagcagctggatatgcagtctagctgggtctacgagactggtcgtttgtgcgaacctgaggtacttaattcattggaagaaacatatagcccattcttccgcaacaatagcgagaaaatgagcatggaggacgagaacttccgcaagcgcaagctgcccgtggtgagtagtgtggtaaaggttaaaaagttcaaccacgatggcgaggaggaggaggaggacgatgattacggctcaagaactgggtccataagttcaagcgtgtctgtgcccgctaagcccgagagacgaccctctctgcccccttctaaacaggcgaataagaaccttatcctgaaagcgattagtgaggcccaagaaagcgtgactaagactacaaattacagcacagtcccccagaagcagacactgccagttgccccacggacacggacttctcaggaggaactcctggctgaggtggtgcaggggcagagtaggacaccaaggatttcaccacctatcaaggaggaggaaaccaaaggggactccgtagagaagaatcagggcactcagcagcggcagctgctgtctagactgcagattgatcccgttatggccgagacgttgcagatgagccaggattactacgatatggaaagcatggtgcacgctgatactagaagctttattctcaagaaaccaaagctgtccgaggaggtagtcgtggcccctaatcaggagtccgggatgaagacggctgatagtcttagggtactctctggtcacctgatgcagactcgggaccttgttcaacccgataagcccgcatcccccaaattcatcgtcacactggatggcgtgcctagccctccgggatacatgtcagatcaggaggaggatatgtgttttgaaggcatgaagccagtgaatcagactgccgcttctaacaaaggactgagagggctgcttcacccccagcagctgcatttactcagcagacagttagaagacccaaacggttccttttcgaacgctgagatgtcggaactgtcggttgctcaaaaacctgaaaagctgcttgaacggtgcaagtattggcccgcatgtaaaaatggggatgagtgtgcctatcaccatccaatctccccatgcaaagccttcccaaactgtaagttcgcagaaaagtgcttgtttgtgcatcccaattgtaagtacgatgcaaagtgcaccaagccagactgcccgtttacacatgtatcaaggcggatccctgtcctgtcaccaaagccggtcgcacctcctgcccctccttcgagctcacagctgtgtcgctacttccctgcctgcaagaaaatggaatgtcccttttaccatccaaagcactgcaggttcaacactcagtgcactcgtcctgattgtactttctaccatcccacaatcaacgtgcccccacgccacgccctaaaatggatacgccctcagacaagcgaatag

SEQ ID NO: 247207 - DNA, 402 bp, synthetic construct
  misc_feature 1..402: note = Description of Artificial Sequence: Synthetic coding sequence
  source 1..402: mol_type = other DNA
atggtgatggtggcaaataaaaaatcgcaagatcaaatgactgaggatctgtctctctttttaggtaacaataccatccgcttcactgtctggttgcacggcgtgctggataagcttagatccgtgaccactgagcccagctccctgaagtcatctgatactaacatcttcgacagtaacgtaccctctaacaaatcaaatttctctagaggggacgagagacgccacgaagccgctgtgcctccactggccattccgtccgcaaggcccgagaaacgagactcccgtgtgtctacttctagtcaggagtcaaagactacaaacgtacgccagacgtacgatgatggcgctgctacgcgattaatgtctactgtgaagcctctccgggagcctgcgccatag

SEQ ID NO: 247208 - DNA, 2193 bp, synthetic construct
  misc_feature 1..2193: note = Description of Artificial Sequence: Synthetic coding sequence
  source 1..2193: mol_type = other DNA
atggaaatcgggaccgagatctctagaaaaatccgcagcgccattaaaggtaaactgcaagaactgggtgcttacgtagacgaggaattacccgactatatcatggtgatggtggctaacaaaaaatctcaggatcagatgactgaggacctgtcactctttctggggaacaacactattcgttttacggtgtggctgcatggagtgcttgacaaactcagatccgtgaccacagaaccctcaagtttgaagagctccgatacgaacatattcgactcaaacgttccaagcaataagagcaacttttcacgtggcgatgaacgcagacatgaagcggctgtgccccctttagccatcccttcagctaggccagaaaagagagattcacgagtttcaacttcttcccaagaaagtaagacaacaaacgtgaggcagacttatgacgacggcgcagccaccaggctcatgtcaacagtgaaacccctccgggagccggcaccttccgaagacgttatcgacatcaagcccgaacccgacgatctgatcgatgaggacctgaattttgtccaagaaaatccactatcacagaagaaaccaaccgttaccctgacctatggatcaagtaggccatcgatagaaatctatcggccaccggcatcacgaaacgccgattctggtgtgcacctgaatcgcttgcagtttcagcaacagcagaattccattcatgctgccaaacagctcgatatgcagagcagctgggtgtatgagacggggcgactctgtgagcccgaggtcctaaatagcttggaggagacctactcccctttcttcagaaataattctgagaaaatgtccatggaagatgagaacttcagaaagcgtaaactccccgtcgtaagctctgtcgttaaggtgaagaagtttaatcatgacggagaggaagaggaggaggatgacgattatgggtctaggacaggctcaataagcagcagtgtgtccgtgccggcaaagcctgagcgccgaccgtctcttcctccaagtaagcaggctaacaagaaccttatcttgaaagcaatctcggaggctcaggagtcagtcaccaagaccactaactatagcaccgtcccccagaagcagaccctgccagtcgcaccacggaccagaacttctcaagaggagctgctggccgaagtagtccaaggccaatctcgcacccctcggatcagtcctcctataaaagaggaagagacaaaaggggatagcgttgaaaaaaaccaggggacacagcagcggcagcttttatcacgactccagatcgatcctgtgatggcagaaaccctgcagatgagtcaggactattacgacatggaatcaatggtgcatgccgatactagatcattcattctaaaaaagccgaaattgtctgaagaggttgtcgtcgcgcctaaccaggagtcaggtatgaaaactgcggactcacttcgggttcttagcggacacctcatgcagacaagggacctggtgcagcccgacaagcccgcttccccaaagttcatcgtcactttggacggcgtgccatcacctcctggatacatgtctgaccaggaggaggatatgtgtttcgaaggaatgaagcccgtgaatcagaccgccgctagcaataaaggcctgcgcggtctgctccatccccagcagctacatctcctgtcacgccaacttgaggatccgaacgcagagatgagcgagctgagcgtggctcagaagccagagaaactcttagagagatgtaagtactggcccgcatgcaagaatggcgacgagtgcgcctaccaccatcctattagcccttgcaaagcctttcccaactgcaaattcgccgagaagtgtctcttcgtgcatccaaactgtaaatatgatgctaagtgtactaaacctgactgtccttttacccatgtctcacgcagaatccccgtgttaagtcctaaacccgtagctccccctgcccctccatcttcctcccaattgtgccgctattttccggcatgcaagaagatggagtgcccgttctatcaccccaagcactgtcgcttcaacacgcagtgtacaagacctgattgtaccttctaccatccgactataaacgttcctccacgccacgctctgaaatggatacggcctcagaccagcgagtag

SEQ ID NO: 247209 - DNA, 2709 bp, synthetic construct
  misc_feature 1..2709: note = Description of Artificial Sequence: Synthetic coding sequence
  source 1..2709: mol_type = other DNA
atggccgatccagaggtctgttgtttcataacgaagattttgtgtgcccatggcggacgtatggccttggacgctttgcttcaggagatcgctcttagtgagccacagctgtgtgaggtcctccaggtggcaggccctgatcggtttgttgtgctggagaccgggggtgaagcgggtatcactcgatcagttgtggcaacaacccgtgctagagtttgtaggagaaaatattgccaacgaccatgtgacaacttgcacctgtgcaagctgaatctgctgggcagatgtaattacagtcaaagcgagcggaacctgtgcaagtattcccatgaggtgctcagtgaagagaacttcaaagtccttaagaaccatgagctaagtggcctgaacaaggaggaattggccgttctgctgctccagtcagatcccttttttatgcccgaaatttgtaagagctacaagggtgagggaaggcaacaaatctgtaaccagcagccgccatgctcccggttacacatatgcgaccattttacccggggaaactgtagattccccaactgcttaagatctcacaacctgatggataggaaggtccttgccatcatgagagaacatggccttaatccagatgtggtgcaaaatattcaggatatttgcaacagtaaacatatgcagaaaaacccccctggccctagagcaccaagctcccatcgtcgaaacatggcataccgcgcaaggagtaaatcaagagatcgattcttccaaggctcacaggagtttctggcctccgcctctgcttctgcagagaggagttgcacaccatctcccgaccagatctcccatcgagcatccctggaagatgccccagttgatgatctgacacgtaagttcacatatctcggcagccaggacagggcccgtcctccatcagggtcttccaaagctaccgatctaggcggtacctcacaagccggaacttcacaacggttcctggagaacggaagccaggaagacctgctacacggcaaccctggatcaacttacctggcttcaaatagtacgtccgcccctaactggaagagcctcacatcctggacaaacgatcagggggcaaggcggaagaccgtgttcagccctaccctgccagcagcacggagtagcctgggctctctccagaccccggaggcggtgaccacacggaaaggcaccggtctcctaagcagcgactacaggattataaatgggaagtccggaacccaagatatccagccgggacctctgttcaacaacaatgccgacggggttgccacagacatcacttcgaccagatcccttaattataagagtaccagcagtggtcacagggaaatctcctccccaaggatacaggacgccggtccggctagtcgggacgtacaggctaccggcaggatcgcagacgacgccgacccacgcgtcgccttggtgaacgatagtctttcagatgtgacctcaacaacctcctcacgcgttgatgatcatgattcggaagaaatctgcctggaccacttatgcaaggggtgtcctttgaatggctcatgttcgaaagtacatttccatttgccctacagatggcagatgctaatcgggaaaacctggactgatttcgaacatatggaaacaatcgaaaaaggctactgcaaccctggcatccatctgtgctcagtaggcagctatactattaactttagggtcatgtcatgtgatagcttccccattcgccgtttatctactccctcttcagtgactaagcccgctaactcggtgttcactactaaatggatctggtactggaagaatgagtccggcacatggattcagtatggcgaggaaaaggacaagagaaaaaattctaacgtggattcttcctatctcgagtccctgtatcagagctgccctcgcggagtcgtgccttttcaggccggttcaagaaattatgagctttcatttcagggtatgatccagaccaacatagcctccaagacgcagaaagatgtcattagaagacccacttttgtgccccagtggtacgttcagcagatgaagcgtgggcctgaccatcagccagcaaaaacgtcttccgtaagcctgaccgcaacctttcgcccacaggaggacttctgctttctgtcgtctaagaagtacaagctgtcagaaatccaccacctgcatcccgagtatgtgagagtgagcgaacactttaaagcttctatgaagaactttaagatcgagaagatcaaaaaaatcgagaattccgaactgcttgataagtttacatggaagaagtcccagatgaaagaagagggaaagcttctcttctacgctaccagccgggcatacgtcgagtccatatgcagtaacaactttgactcattcctgcacgagacacacgagaacaaatatggtaagggaatctacttcgccaaggacgccatctattctcacaagaattgtccctacgatgccaagaacgtggtgatgtttgtggctcaagtcctggtaggaaagtttacagaagggaacataacctacacatctccccctccccagtttgatagttgcgtggatacaaggagcaacccgtctgtgttcgttatcttccaaaaggaccaggtctatccccagtatgttatagaatatacagaggataaggcctgcgtaatctcctag

SEQ ID NO: 247210 - DNA, 2100 bp, synthetic construct
  misc_feature 1..2100: note = Description of Artificial Sequence: Synthetic coding sequence
  source 1..2100: mol_type = other DNA
atggctgacccggaagtatgctgtttcataacaaaaattctctgtgcacacggcggtcgcatggccctggatgcactgctgcaggagattgctctgtcggagccacagttatgcgaagtcctgcaggtggctggaccggataggttcgtggttcttgaaacaggaggagaggccggaattaccaggtccgtagtggctactaccagggcgagagtgtgtagacgcaagtactgccaacgtccttgtgataacctacacctctgcaagttaaacctgctggggcgatgcaactatagccagagtgagagaaacttgtgtaagtactctcacgaggtgctctccgaggagaacttcaaggtcctgaaaaatcatgaactcagcggccttaacaaggaggaactagcagtgctgctgttgcaaagtgacccctttttcatgccagaaatttgcaaaagctataagggcgaaggtcgtcagcagatctgcaatcagcaaccaccatgttccagactacatatctgcgatcacttcaccaggggaaattgtcgcttcccaaactgcctgcggagccacaatctgatggatcgcaaagtgctcgctataatgcgggagcacgggctgaatcccgacgtggtccagaatattcaggatatttgtaattctaaacatatgcagaaaaacccgcctggacctcgggcaccatcttctcacagacgtaatatggcatatcgagccagaagcaaaagtcgcgaccggttctttcagggctcccaagagtttctggccagcgctagcgctagtgcagaaaggtcatgcacccccagccctgaccagatctcccaccgcgcttcccttgaggatgccccagtggacgatcttacgcgcaagttcacatatttaggttcgcaagacagggcgcgtcctcccagcggaagcagtaaagccactgaccttggaggaacaagtcaagcaggcaccagccaaagatttctggaaaatgggagtcaggaggacctccttcacggtaatcctggttctacatatctggcctctaactccacctccgcccctaactggaagtcactgactagctggacgaatgaccagggtgctcggcgaaagactgtgttttctccgactttaccagctgcaaggagctcgctgggctcactacagacccctgaggcggtgaccacacggaaaggaacaggcctactgtcatctgactaccgaatcatcaacggcaagtctggtactcaggatattcagcccggtcctctttttaacaataatgccgatggagtggcaacagatataacgtctacacggtcccttaattacaaaagcacctcctccggacatcgagaaatttcaagccctcggattcaagacgctggcccagcctccagagatgtccaagccacaggcaggattgctgacgacgctgaccctcgcgtcgcactcgtgaacgacagcctgagtgatgtgacttcgacaacaagttctcgggtcgatgatcacgacagcgaggagatctgtcttgatcacctctgtaagggctgcccattgaatggaagctgctccaaggtgcactttcatctgccttacagatggcagatgctaatcgggaagacttggacagattttgagcacatggagacaatcgagaagggctactgtaacccaggcatacacctctgcagcgtcggatcatacaccatcaatttcagggtgatgtcctgcgactcctttcccattaggaggttgagcacgccatccagcgtgaccaaaccagcaaattctgtgtttacaactaagtggatctggtattggaagaatgaaagtggcacctggatccaatacggggaggaaaaagataagagaaagaatagtaatgtagactcctcctacctggaatccctctaccaatcatgtccaaggggagtggtacctttccaggctggctctcggaattacgagctttcatttcaggggatgatacagactaacatcgcttctaagacccagaaagatgtgatccgtaggcctacctttgtgccccaatggtacgtgcaacaaatgaagcgaggacccgaatag

SEQ ID NO: 247211 - DNA, 1521 bp, synthetic construct
  misc_feature 1..1521: note = Description of Artificial Sequence: Synthetic coding sequence
  source 1..1521: mol_type = other DNA
atggcttacagagcacggagtaagtctcgtgatcgctttttccagggatctcaggaattcctagcttccgcctcggcctctgccgagaggtcctgtactcccagtccggatcagatttcgcatcgagcctcactggaggacgcccctgtggacgacctcacacgaaaattcacatatctgggctcacaggaccgcgctcgtcctcccagcggctctagcaaagctacagacctcggtggcaccagtcaggcgggtacttctcagcgcttcttggagaacgggagccaggaggaccttctccacggaaacccaggttccacctacctcgcctcgaacagtacttccgcccctaattggaagtcccttacgagctggactaatgatcaaggcgctagaagaaaaacagtctttagccctaccctccctgccgctagaagttctctgggatctctgcagaccccggaagccgtcactactcgtaagggcacaggacttctgagctctgactacagaatcatcaacggcaagagtggtacccaggacatccagcccggacccctcttcaataacaacgctgacggagttgccaccgacattacctctaccaggtctttaaactacaagtctacgtcttcaggccaccgtgaaatatcttctcctagaatacaggacgctggtcctgccagtcgggacgttcaagcaaccggacggatagccgatgatgcggatcccagagtggcactcgtgaatgattcattatcagacgtgacctcaactaccagctcacgagttgacgaccatgattctgaagaaatctgcctcgaccacctgtgcaaaggatgcccattgaacgggtcatgtagtaaggtacacttccacctaccctatcggtggcaaatgctcatcgggaaaacgtggaccgacttcgagcacatggagaccattgagaagggttattgcaatccaggcatacacctttgctctgtgggcagctacaccatcaatttccgcgtaatgtcctgtgattccttccccatcaggcgactctctacgccaagctcagtgacgaagcctgctaattccgtattcacaacgaaatggatctggtactggaaaaacgagagcgggacatggatacagtacggcgaggagaaagacaaacgcaagaactcaaatgtggattcctcttacctagaatcgctctaccagtcatgtcctaggggagtggtcccattccaggcaggatcccgcaactatgagctctccttccaagggatgattcagacaaatatcgcaagtaagacacagaaagacgttatcaggcgccctacatttgttccccagtggtacgtacaggaggagcgtgccagagtctctgtgctgaaacagttatttgctgaccgatgcctgagatgctcctgtcccggactgatcaagtccctggttaacctggagcccgtcttcttaaaaagctcttgtttacactactccgctgtcagtatttgtatcattgacgagtag

SEQ ID NO: 247212 - DNA, 654 bp, synthetic construct
  misc_feature 1..654: note = Description of Artificial Sequence: Synthetic coding sequence
  source 1..654: mol_type = other DNA
atgtccgggggattggccccaagcaaaagcacagtctatgtgtctaatttgcccttcagtctgactaataacgatctttaccgtattttctctaagtatggaaaagtggtaaaggtgacgattatgaaggacaaggatacgaggaaatccaagggtgttgcgttcatattgtttttagataaagacagtgcccagaattgcaccagggctattaataataaacagctatttggaagggttattaaagcatccattgcgattgacaacggcagagcagcagagttcatacgtagacgcaattattttgataaatcgaagtgttatgagtgcggagagagcggccatctctcttacgcttgcccaaagaacatgctaggcgagagagaacctccaaagaagaaggagaaaaagaaaaaaaaaaaagctccagagccggaagaggaaatagaagaagtggaagaatcggaggatgaaggagaagaccctgcgctcgatagtctaagtcaggcaatcgctttccagcaagcaaaaattgaagaagagcagaagaagtggaaacccagctcaggcgtcccttcaaccagcgatgattcccgcagaccaaggattaagaaaagcacctacttcagtgatgaggaggagctgtctgactag

SEQ ID NO: 247213 - DNA, 501 bp, synthetic construct
  misc_feature 1..501: note = Description of Artificial Sequence: Synthetic coding sequence
  source 1..501: mol_type = other DNA
atggctatgtctcaggaaagccttactttcaaagatgtgttcgttgacttcaccctggaggagtggcagcagctggattcagcacagaaaaatctctatcgcgatgtcatgttagagaattacagccacctagtttccgtgggttacttagtggctaaacccgatgtgatttttaggctgggtccgggtgaagaaagctggatggcagatggtgggacgccagtgcgcacctgcgcggaggtgtggcaggttgacgagcagatcgaccactacaaagagtcccaggacaaactcccgtggcaggcagcttttatcggaaaagagaccctgaaagacgaatccggacaggaaagtcgcacgtgccggaagtccatttatctatccactgaattcgatagtgtgcggcagagactgccaaagtactatagttgggaaaaagccttcaaaacttctttcaagttgtcctggagcaaatggaagctttgcaaaaaggagagatag

SEQ ID NO: 247214 - DNA, 516 bp, synthetic construct
  misc_feature 1..516: note = Description of Artificial Sequence: Synthetic coding sequence
  source 1..516: mol_type = other DNA
atggccatgagtcaggaatcattgactttcaaggacgtttttgtcgacttcacccttgaagaatggcagcagcttgacagcgcgcagaaaaatctgtacagggacgtgatgctggaaaattattcacaccttgtttccgtgggatatctcgtggccaagcctgacgttatctttaggcttggtcccggagaagaaagttggatggcagacggaggcacccctgtcaggacatgtgctggagaagatcgcccagaagtctggcaggtagatgaacaaattgatcactacaaagagagccaggataaactcccgtggcaggctgctttcatcggaaaggagaccttgaaggacgagagtggacaggagtcccgcacctgcaggaagagcatatacctcagtaccgagttcgacagtgttcgccagagattgcccaaatactatagctgggagaaggcttttaaaaccagctttaaattgtcatggagtaagtggaaactgtgcaaaaaagagcgctag

SEQ ID NO: 247215 - DNA, 297 bp, synthetic construct
  misc_feature 1..297: note = Description of Artificial Sequence: Synthetic coding sequence
  source 1..297: mol_type = other DNA
atggccatgagtcaagagtctctcacttttaaagatgtgttcgtcgattttaccctcgaagagtggcagcagctggactccgcacagaagaacttatatcgggacgtgatgcttgaaaactattcccacctggtgtccgtcggctatcttgttgcaaaacccgacgttatcttccgcctcggaccgggagaggagtcttggatggccgacggtggcacaccagtccggacgtgtgccggtgaagacagacctgacgtaagtatctttgcttcatgtattctgaagtgctgctattag

SEQ ID NO: 247216 - DNA, 297 bp, synthetic construct
  misc_feature 1..297: note = Description of Artificial Sequence: Synthetic coding sequence
  source 1..297: mol_type = other DNA
atggctatgtcccaagagtctcttacattcaaagacgtcttcgttgactttaccttagaagaatggcaacaactagacagcgcgcagaaaaacctctacagggacgtgatgttggaaaattactcacacctggtcagcgtgggttacctggtggcaaagccggacgtcattttccgcctgggaccgggagaggagtcatggatggccgacggtggcaccccagttaggacctgtgctggtgaggaccgtccagacgtgtcgatttttgcttcttgcattctgaagtgttgctactag

SEQ ID NO: 247217 - DNA, 516 bp, synthetic construct
  misc_feature 1..516: note = Description of Artificial Sequence: Synthetic coding sequence
  source 1..516: mol_type = other DNA
gttgccatgagccaggagtctctcacgttcaaagacgtgttcgtcgacttcacactggaggagtggcaacagctcgactccgcgcagaaaaatttataccgggatgttatgctagaaaactattcccatttagtcagcgtgggatatctagtggcaaagcctgacgtgatctttcgtctaggacccggtgaggagagttggatggctgacggaggcacaccagttcgcacttgcgccggagaagatcgaccagaggtttggcaggtggacgagcagattgaccattacaaggagagtcaagacaaactcccttggcaggccgcattcattggcaaggaaaccctgaaagatgagagcgggcaggagtctcgaacatgtaggaagtctatctaccttagcacggaatttgactcagttcgccagcgcctgcccaagtattattcttgggaaaaagcgttcaaaacatctttcaagctgtcgtggagcaagtggaagctgtgcaaaaaagaacggtag

SEQ ID NO: 247218 - DNA, 297 bp, synthetic construct
  misc_feature 1..297: note = Description of Artificial Sequence: Synthetic coding sequence
  source 1..297: mol_type = other DNA
atggccatgtctcaggaatcactcacatttaaagatgtctttgtggacttcactttggaggagtggcagcagctcgactcggcgcaaaagaacttgtatagagacgtgatgctggagaactattcccacctggtcagcgtggggtatttggtggccaagccagatgtgatctttcgtttaggtcctggagaagaaagctggatggctgatggcggtacacccgtgaggacttgcgctggggaagacaggcccgacgtgagcatctttgcaagttgcattctaaaatgctgttactag

SEQ ID NO: 247219 - DNA, 864 bp, synthetic construct
  misc_feature 1..864: note = Description of Artificial Sequence: Synthetic coding sequence
  source 1..864: mol_type = other DNA
atgatgaatcggttccgaaagtggctttataaaccaaagaggagcgatccgcagttgctcgcgaggttctactacgccgatgaagaactcaatcaggttgccgctgagcttgatagtcttgacggaaggaaggacccacagaggtgtacactgctggtgtcccagttccgaagctgtcaggataatgtgctgaatataattaatcaaatcatggacgagtgcatcccccaagatagggccccacgcgacttttgtgtgaagttccctgaggaaatccgacacgacaacttggccggacaactgtggtttggtgcagagtgcctggccgcaggttccattataatgaacagggaactcgagtctatggcaatgcgccctctggcaaaggagctcactcgcagccttgaggacgtcaggggcgcactgcgcgatcaagctctccgagacttaaatacctatacggaaaagatgagagaggccttacggcatttcgacgttctgttcgcagaattcgaactttcgtatgtgtcagccatggtgccagtgaaatcccctagggaatactacgtgcagcaggaggtgatcgtactgttctgtgagaccgtggagcgcgcactggatttcggttacctcactcaagacatgattgatgactacgaaccagccctaatgtttagcatacctcggctggccattgtgtgtcctttgctcccagcgcacccacggactcgagcaggggctaccgcccacgtcgcctgtaggatggtggctggctccagcagcggcgctttgacccatccgccagtgtcaaagcagggcgtcatttccgccctccttcgaccgctgcccgagttgcccccatag

SEQ ID NO: 247220 - DNA, 519 bp, synthetic construct
  misc_feature 1..519: note = Description of Artificial Sequence: Synthetic coding sequence
  source 1..519: mol_type = other DNA
atgatgaatcgctttagaaaatggctgtacaaaccaaaggacaacgtattgaacataatcaaccaaatcatggacgagtgcatcccacaagatagagctccgagagacttttgcgttaagttccctgaagagatacgccacgacaatctggcagggcagctttggtttggtgctgagtgcttagccgcagggtccatcattatgaacagagagttggagtctatggccatgaggcccctcgcaaaggaactgacccgctcccttgaggacgtgcgtggggcactccgtgatcaagctttgcgggacctgaacacctacaccgagaaaatgcgcgaagccctgagacacttcgacgttctctttgcagaatttgaactgagctacgtgtcagcaatggttcctgtcaaatcccctcgcgaatattatgtgcagcaggaggtgattgttctgttttgcgagacggttgaaagaaacggcaagggcgttcttaagtttatgtggaactgcaacggcccttag

SEQ ID NO: 247221 - DNA, 492 bp, synthetic construct
  misc_feature 1..492: note = Description of Artificial Sequence: Synthetic coding sequence
  source 1..492: mol_type = other DNA
atggacgagtgcattcctcaagacagggctccaagggatttctgcgtcaagtttccagaggagatcaggcacgataatcttgcgggtcagctgtggtttggggctgaatgcctagcggctgggtccattatcatgaaccgcgaactggagtctatggccatgagacccctggccaaagaattgacgagatcccttgaggacgttagaggggcactgagagaccaggcgctgagggacctgaatacatacacagaaaaaatgcgcgaagcactccgacattttgatgtgttgtttgccgagttcgaattgtcctatgtgtcagctatggtgcctgtcaagtcaccacgcgagtactatgtccaacaggaggtcatcgtcctgttctgtgagacggtggagcgagcactcgacttcggctacctaacacaggacatgatcgacgattatgagccggctctaatgttcagcattcctcgtcttgcaatagtgtag

SEQ ID NO: 247222 - DNA, 11112 bp, synthetic construct
  misc_feature 1..11112: note = Description of Artificial Sequence: Synthetic coding sequence
  source 1..11112: mol_type = other DNA
atggagggctgtgatagtcctgtagtgtcaggcaaagataatggttgcggcatcccccagcaccagcagtggacagagctcaacagcacacatctgcccgataaaccctcatcaatggaacagtcaaccggtgagagccacggtcctttggatagcctccgcgcaccatttaatgaacgcctggctgaaagtaccgcttctgctggtcccccttccgagcccgcaagcaaagaagtgacctgtaacgaatgcagtgcctcatttgcctccctgcagacttacatggaacaccattgtcctagtgctcgcccaccccctcccctgcgggaagagagcgcaagtgacacaggagaagagggggacgaagagtcggatgtcgaaaaccttgccggagagattgtttatcagcccgacggctctgcctacatcgtggaatctctgtctcaactgacccagggcggtggggcatgtggatctggctccggctcaggccctctcccatccctcttcctgaactcccttcctggagccggaggcaagcagggcgatccatcttgcgctgcccctgtctacccacaaattattaatactttccatatcgcaagcagcttcgggaaatggttcgaagggccagatcaggccttcccaaacacgtcagccctggcgggactgtctcccgtgctgcactcattcagagtctttgatgttcggcacaagtcaaataaagactatctcaatagcgacggaagtgcaaaatcatcctgcgtgtccaaagacgtgccgaacaatgtcgacttaagcaagtttgatggatttgtcctgtacggaaagaggaaaccaatattaatgtgcttcctatgtaagctcagcttcgggtatgttagaagctttgtgacacacgccgtgcacgatcatcgcatgaccttaagcgaagatgaaaggaaaattctgtccaacaaaaatataagcgctatcatacaggggattggaaaagataaagagcctctggtgtcttttctggagcctaagaataagaactttcagcacccactcgtctccaccgctaatttgatcggccctgggcacagcttttacggaaagttttctggcatcagaatggaaggagaagaggctctgccagcgggatctgccgcagggcctgaacagccccaggcaggactcctcacgccctccacactgctgaatcttggaggcctaacttcatctgttctgaagacccctatcacctcagttccactgggacctctggctagctcccctaccaaatcatcggagggcaaagattctggcgctgccgaaggcgagaaacaagaggtgggagatggtgattgcttttctgagaaggttgagcctgcagaggaagaagctgaagaggaggaagaggaagaggaagcggaggaggaggaggaggaggaagaagaggaagaagaggaagaagaagatgaaggatgtaagggattattcccctcagagttggacgaagagctggaggacaggccccacgaagagcctggtgccgctgcaggatcgtcaagtaaaaaagatctcgctctttctaaccagtccatatcgaacagcccgctcatgccaaatgtcttgcagacactgtcgcgcggtactgctagcaccagttccaattccgcctcgtcctttgtagtgttcgatggcgcaaaccggaggaatcgacttagttttaattctgaaggcgtgcgagctaacgtggccgaggggggtcgccgactggacttcgcggacgagagtgctaacaaagataacgcgactgcaccggagcccaatgagagtacagaaggagatgatggaggttttgtgcctcaccatcagcacgccggaagtctctgcgagttgggcgtgggtgagtgtccctccggatccggcgtggaatgtcccaagtgcgacacagtcctcggctcatctcggagcctcgggggtcacatgactatgatgcactcaagaaacagctgtaagaccttgaaatgtccaaagtgtaactggcactataagtatcagcaaacgttagaggcccacatgaaggagaaacaccctgaaccagggggtagttgtgtgtactgcaaatctggtcagcctcatcccaggctggccagaggagaatcatacacctgcggttataaaccctttagatgcgaagtctgcaactactcaactactactaagggcaacctgagcattcacatgcaatcggataagcaccttaacaacatgcagaacctgcagaacggaggaggcgaacaagtattttcacataccgcaggcgcagccgcagctgcagttgccgctgccgctgctgctgctaacatttctagcagttgcggggcaccttccccaaccaagcccaagactaagcctacttggcgatgtgaggtgtgtgattacgagacgaatgttgcacgaaacctgcgtatccatatgacctcagagaagcatatgcacaatatgatgctcctccagcagaatatgacgcaaattcagcacaatcggcacctcggcctcggatcattgccctcgcccgcagaagcggagctctaccagtactatctggcacagaatatgaatctgccaaacctgaaaatggactctgccgcatccgacgcccaattcatgatgagtggctttcagttggatccagccggacccatggccgctatgacaccagctctggttggtggcgagatcccattggatatgaggctgggcggaggccaactcgtgagcgaggaactgatgaacctcggcgaatcctttattcaaacgaacgacccatctctgaagctgtttcagtgcgcggtttgcaacaagtttaccactgacaacctggatatgctcggcctgcatatgaatgtagaacggagccttagtgaagatgagtggaaggcagtgatgggcgactcttatcaatgcaaactctgccgctacaacacacagttgaaagccaatttccagcttcattgtaaaaccgataagcatgtgcagaagtatcagcttgtcgcccacattaaggaggggggaaaagcaaacgagtggcgcctgaaatgcgtggctattggcaaccccgttcacctcaaatgcaacgcttgtgattactacacaaactctctggagaagctccgcctccataccgtgaatagccggcatgaagcaagtttgaaattgtataaacatctccagcagcacgagagcggcgttgaaggggagtcctgttattaccactgtgtgctctgtaactacagcaccaaggccaaactgaaccttatccagcacgtgagatccatgaagcatcagcggagtgaatcactccgaaagctgcagagactgcaaaaggggctgcccgaggaagatgaagacctcggtcagattttcaccatcagaagatgcccatccaccgatccagaggaggccatcgaggatgtggaaggcccttccgaaaccgccgcagatcccgaagagttggctaaggaccaggagggcggtgcatccagcagccaggcagaaaaagagctgactgacagcccagccaccagcaaacggatttctttcccaggatcaagcgagtctccactttcttcgaagcggcctaaaacagcagaagaaattaaaccggaacaaatgtatcagtgcccctactgcaaatactccaatgcagacgtcaaccgcctacgggttcatgctatgactcagcactccgtccaaccaatgctgcgctgtccactctgtcaggacatgctgaacaataagatccacctgcagctacatctgacacacctgcatagcgtagcccctgactgcgtggagaagttaattatgactgtcacaacaccagaaatggtaatgccatcttctatgttccttccagcagccgtacctgacagagatggcaattccaacttagaggaagccggtaaacaacccgaaactagcgaggatctgggcaagaatatcctgccttctgcctctactgagcagagcggcgatctcaaaccgagcccagccgaccctgggtctgtgcgagaggatagcggattcatctgttggaagaagggatgtaatcaggtgttcaaaacaagcgccgcacttcaaacacatttcaacgaggtccatgcaaaacgcccacagttgcccgtgtcagatcgacacgtgtataagtacagatgcaatcagtgctccctagcttttaagaccatagagaaactgcaacttcacagtcagtatcacgtgatcagggccgcaacaatgtgctgtctttgccaacggtccttccggacctttcaggctctaaaaaagcatctggaaacttctcaccttgagctctccgaagcggacatacagcagctctatgggggtctacttgcaaatggcgacctgctggcaatgggggatccgactctggcagaggaccacaccatcatcgtggaggaggataaggaggaggagtctgatctcgaagataaacagagtccgaccggatcggattcagggagcgtccaggaggatagtgggtcagagcccaagagagccctgccatttcgcaagggccctaactttactatggagaagttccttgatccctcccgaccttataagtgcaccgtgtgtaaggaatcgttcacccagaagaacattctgttggttcactacaactcggtgtcccaccttcacaagctcaagagagctctccaggaatccgccaccggccagcctgaaccaacgagctcacccgacaacaagccttttaagtgcaacacctgtaatgttgcttactctcagtcatccaccttggagatccatatgaggtctgtcctgcatcagaccaaggcccgagcggcaaaactggaggctgcctccgggtccagcaacggaacgggtaacagctctagcattagtctgtccagctcgaccccatcaccggtgagtaccagtgggagcaacacatttactacgtccaatccctctagcgcaggcatcgccccttcctcgaacttactgtcccaagtacccaccgagtccgttgggatgcctcctttaggaaaccctataggcgcaaacatcgcttcaccaagcgaacccaaggaggctaatagaaagaagctcgcagatatgatcgctagccggcaacagcagcaacagcaacagcaacagcaacagcagcaacagcagcagcagcagcaagcccagaccctggctcaggctcaagcgcaggttcaagctcatctgcagcaggagctgcagcagcaggcggctttaatccagagccagcttttcaacccgacactgttacctcactttcccatgaccacagagacactgctgcagctccagcaacagcagcacctgttgtttcccttttatatcccgagtgctgaatttcagctcaaccctgaggtgtccctgcctgtgacctccggcgcacttacgctcaccggtacaggacccggtctccttgaggacctgaaggcacaggtgcaggtaccacagcaaagccaccagcaaattctcccccagcagcagcaaaaccagctaagcatcgcgcagagccattccgccctgttgcagccgagccaacatcccgaaaagaaaaataaacttgttataaaagagaaggagaaagaatctcagagggagagagacagcgcggaaggaggcgaggggaacacgggccctaaggagaccctgcctgatgcgttaaaggcaaaggagaaaaaggagcttgcccctgggggtggtagcgaaccttccatgctgccccctcgcatagcttccgacgcacgtgggaatgctaccaaggctcttctcgagaacttcggattcgaactcgtcatacagtataatgagaataagcaaaaggtgcagaaaaaaaatggcaagacagaccagggcgaaaacctcgagaagctcgaatgcgactcctgtgggaagctttttagtaacattctgattctgaagtcgcaccaagaacacgtacaccaaaactacttcccctttaaacaactggagcgattcgccaaacaatacagggatcactacgacaagctctatcctctccggccacagacccctgagcccccaccaccccctcctccgcctcccccacctcctctgcctgctgctccccctcagcccgcatccactcctgctattcctgctagcgcaccacctattacaagccctaccatcgctcctgctcagccttctgtaccgctgactcagctctctatgccaatggagctgcctatctttagtcccctgatgatgcagacaatgcccctgcaaacactgccagcccagttgccaccccaactgggtccggtagagccgcttcccgctgatctggctcagctgtatcaacatcaacttaacccgaccctgctccagcagcagaacaagcgccctcgcactcgtatcaccgacgaccagttacgggtactcaggcagtattttgacataaataacagcccttcagaggagcagattaaggagatggcggacaaatccgggctcccccagaaagtgataaagcattggttccggaacaccttatttaaagaacggcaacgcaacaaggatagtccttataactttagcaatccgcctatcaccagcctcgaggaactgaagattgatagtagacccccatccccagagccaccgaaacaggaatattggggttccaaacgatcatctaggactagatttacggactaccaactgcgcgtgctgcaagatttctttgacgctaatgcctatcccaaggatgatgagtttgagcagcttagcaacttgttgaacctgccgaccagagtcatcgtggtctggttccagaacgccagacagaaggctcgcaagaattacgaaaatcagggtgagggtaaagatggcgaaagacgcgagctcactaacgatcggtacatcaggacttccaacttgaactaccagtgcaaaaaatgtagcctcgtcttccagagaattttcgatctcatcaaacaccagaagaagctctgctacaaggacgaagatgaggaggggcaggacgattcacagaacgaggatagtatggacgcaatggaaattctcacccctacttccagctcttgcagcaccccaatgccgtcccaggcatactccgctcccgctccaagcgccaataatacagcatccagcgctttcctacaattaactgcggaagccgaagaactcgctacgtttaattctaagacggaagcaggtgacgaaaagcctaaactcgccgaagccccttcagcacaacccaaccagacccaagagaagcaggggcaacccaagccagagctccagcaacaggaacagcccgaacagaagactaatacacctcaacagaaacttccgcagctagtgagcttacctagcctgcctcaaccccctccccaggcgccaccgccacagtgccctctgcctcagagcagccctagtcccagtcagctgagtcatctcccgcttaagcccctccacacatctacgccacagcaactggccaacctccctcctcagttgatcccctaccagtgcgaccagtgcaagcttgcttttcctagctttgagcactggcaggaacatcagcagctgcacttcttatctgctcaaaatcagtttattcacccgcagtttctggatcgctcattggacatgcccttcatgctctttgacccaagcaacccactcttagcatcccagctcctgtctggggctatccctcagattcctgctagctccgccacttccccaagcacacctacatctaccatgaacacacttaagcgcaaactggaggaaaaggcttcagcaagccctggagagaatgattctggcacgggcggtgaagagccccagcgggacaagcggctcaggaccaccattacacccgaacaactggaaatactgtaccagaaatatcttttagactccaatcccacgcggaagatgttggatcatatagctcacgaagtgggcctgaagaagcgcgtggtacaggtctggttccagaatacccgcgcacgggaacggaagggccagtttcgcgctgtagggccagctcaggctcataggcgctgtcctttttgccgagcactgttcaaagcaaaaacagctctggaggcacacatccgcagccgccattggcatgaggccaagagggccggatataatttaactttatctgcgatgctccttgactgtgacggcggtttacaaatgaagggagacatatttgacggaacgagcttctcacatctgccgccatcaagttccgacggccaaggagtgcccctttcacccgtctccaagaccatggaactgtcccctcggaccctgctctccccatcgagtattaaggtagaaggcatcgaagactttgagagcccatctatgtcatccgtgaatctcaacttcgaccagaccaagttggataatgatgattgttcgagtgtaaacaccgccatcaccgatactacaaccggggatgagggtaacgcagacaatgactccgctaccggcatcgctactgagaccaagtcatcttccgccccaaatgagggtctcacaaaggccgctatgatggcgatgagcgagtacgaagacagactgtccagcggccttgtttcgcccgctccgtccttttacagtaaagaatacgataacgagggcactgtcgactattcagaaacatcaagcctcgccgacccatgctcaccttcacctggagcttcggggtccgcaggcaagtctggcgatagtggcgatcgtcccggacagaagaggttccgaacccagatgacgaatctacaactcaaggtgctcaaatcttgcttcaacgattatagaactcccacaatgctagaatgcgaagtgcttggtaacgacatagggctccctaaaagagtcgtgcaggtctggttccagaatgcgagagccaaggagaaaaagtcaaagctgagtatggcgaaacatttcggcataaaccagacgtcctacgaaggccctaagacagagtgcacactttgcggcatcaaatatagtgcacgtctgtctgtgcgggaccatatcttctctcagcagcatatctcaaaggtgaaggacactattggtagtcagcttgataaggaaaaagagtattttgatcctgccacagtgaggcagctgatggctcagcaagagctcgaccgcataaaaaaggccaatgaagtgctcgggctggccgctcagcagcagggaatgttcgacaataccccactccaggcactcaacttgcctaccgcctatcccgctctccaaggtatccctcccgttttgcttcctggattgaacagtcccagtctgccagggtttacccccagtaataccgccttaacttccccaaaaccaaacttaatgggccttccctccactactgtaccatcaccgggattgccaacttccggcttgccaaataagcccagctctgcgagtttaagctccccaacgcctgctcaggccaccatggccatgggaccacagcagccgccacagcagcagcagcagcagcagcagcctcaggtccagcagccacctcctccgcctgcagctcaaccaccccctaccccccagctccctttacagcaacagcaacagcggaaggacaaagatagtgaaaaagtgaaagaaaaggaaaaagcacataagggcaagggcgagcctctaccagtcccaaaaaaggagaagggagaagctccgacagccacagccgctacaatcagcgctcctctccccactatggagtacgccgtagacccagcacaactacaggctctgcaagcggcactgacttcagatccaactgctttgctcacctcccagtttcttccctattttgtgcccggattttcaccttactacgcgcctcagatccctggagccctgcagtcggggtacctccagcctatgtatgggatggaagggttgttcccctactcgcctgccctgagtcaggcactcatgggactaagccctggatcactcctgcagcaataccagcagtaccagcagtcccttcaggaggccatccagcagcaacagcaacggcagctccaacaacagcaacagcagaaggttcagcagcagcaaccaaaagccagccagaccccggtccctccaggtgctccatcacccgacaaagaccccgcaaaggagagtccaaagccggaggaacaaaaaaacactcctcgcgaagttagccctctgttgcctaagcttcctgaagagcccgaggcggaaagcaagagcgctgatagcctgtatgacccattcatcgtgcctaaagtacagtataaacttgtgtgcaggaaatgtcaggctggtttctcggatgaggaggccgcacggagccaccttaaaagtctttgttttttcggacagtccgtggtcaacttacaggaaatggtattacatgtgcctacaggcggaggcggaggtggaagcgggggtggcggtggcggagggggtggtggtggcggtggtggctcctatcattgcctcgcatgtgaaagtgctctgtgtggtgaggaagccctgagccagcatctggagtccgctctgcataaacacaggacaatcacccgcgcagccaggaatgccaaggagcaccccagcctcctcccacactcggcatgctttcccgacccgtctacggcttccacttcccagtctgccgcacacagcaatgattctcctccacctccatctgccgctgcgccttcttctgcaagcccgcatgcttccagaaagagttggcctcaggtggtatctagggcgtctgcggctaagcctccctctttccctcctctgagttcgtctagcactgtgacaagtagctcttgttcaacctccggggtgcagccttcaatgccaacagacgattattccgaagagtccgacacagatcttagtcaaaagtccgacgggcctgcctctccagtggagggtccaaaggatccaagctgtcctaaggactccgggcttactagtgtgggcacagatacatttcgactgtag

SEQ ID NO: 247223 - DNA, 8369 bp, synthetic construct
  misc_feature 1..8369: note = Description of Artificial Sequence: Synthetic coding sequence
  source 1..8369: mol_type = other DNA
atgaggctgggtggagggcagttagtgagcgaggagctaatgaacctgggagagtcctttattcagacaaacgatccatcactcaaactcttccaatgcgcagtttgcaataagtttactaccgacaacttagacatgttggggctgcacatgaacgtggagaggagcctgagcgaagatgaatggaaagcagtcatgggagattcttaccagtgtaagctgtgcaggtataatacccagctcaaggccaattttcagctgcactgcaaaactgacaagcatgtccaaaagtatcagctggtggctcacattaaggagggaggcaaggcaaacgagtggcgtctgaaatgtgtggccatcggtaaccctgtgcaccttaaatgcaacgcttgcgactattatactaactctctggagaagctgcgcttgcacactgtcaacagccgccacgaggcctccttgaagttgtacaagcacctgcaacagcacgaaagtggcgttgagggcgaaagctgctattatcactgcgtcttgtgcaactatagtacaaaggcaaaactcaacctcattcagcacgtccgctccatgaaacatcagaggagtgagagtctgcgaaagctgcagcgtctccagaaagggctgccggaggaggacgaggacttgggtcagatttttacaattcgtagatgtcctagcacggatcccgaagaagccatagaggacgtggaggggccttctgaaacggctgccgatcccgaggagctggccaaggatcaggaggggggagcatccagctcccaggccgagaaggaactcaccgattctcctgcgacatcaaagagaatatcctttcccggaagttccgagtcccctctctcttcaaagcgccctaagacagcagaggaaatcaaaccagaacagatgtaccagtgcccatactgtaagtacagcaacgctgacgtaaatagactgagggtgcatgctatgactcagcactcagtgcagccaatgctgcggtgccccctctgtcaagacatgctcaacaacaagatccacctgcagttacatctgactcaccttcactcagtagctccagactgcgtggaaaagctgattatgaccgtgaccactcctgaaatggtgatgccttcttccatgttcctaccagccgcagtccctgatagggacggcaacagcaatcttgaggaagccggaaagcagcctgaaacttccgaagacttgggcaagaatatacttccttccgcctccacagagcagtctggcgatctcaagccatcccccgctgaccctggcagcgttcgcgaggatagcggattcatatgctggaagaaaggatgtaaccaggtgttcaaaactagcgccgctcttcaaacccattttaacgaggtacatgcaaagcgtccccaattaccagtctcagaccgccacgtgtataagtacaggtgtaaccagtgcagtctggcctttaaaactatcgagaagctgcagctccactcccagtatcacgttattcgagccgcaactatgtgttgcttatgccaacggagctttcggacattccaggccttaaagaagcacctggaaacaagccacctggagctttcagaagccgatatccagcagttgtatggaggcctgcttgcgaacggcgacctgttagccatgggtgatccaacgctggcagaggaccacaccataattgtggaagaggataaggaagaagaaagtgatctggaggataagcagtctccaaccggttcggattccggctcggtgcaggaagatagcggtagcgagccaaagcgcgcactgcctttccgcaagggtccaaacttcaccatggagaaattcttggacccttctcggccttacaagtgtactgtgtgtaaggaatcattcacccagaagaacattctactggtgcactataatagcgtatcgcacctacataaactgaaaagagccctgcaggaaagcgcaacaggacagccggagcccacaagctccccagacaataagcccttcaaatgtaacacttgcaacgttgcctattcccagtcatcaaccctggagatccacatgcggagtgtcttacaccaaacaaaggcgagagccgctaaacttgaagccgcatcgggctctagcaatggtactgggaacagtagctctatctctctctctagctcaacgccaagtccagtgtccacctccggctctaacacatttacgaccagcaaccctagctcagcaggaatcgccccaagtagcaaccttttgagccaggtcccaaccgaatccgtaggcatgcctccactcggcaaccctattggagctaatattgcttcaccctccgaaccgaaggaggccaacagaaaaaagttagccgatatgattgcctcaaggcagcagcagcaacagcagcagcaacagcagcagcaacaacagcagcaacagcaacaagcgcagaccctggcacaggcccaagcccaggtccaggctcacctgcagcaggagctccagcaacaggctgcactgattcagtcacagctttttaacccaacactgcttccccattttcctatgactacagagaccctgctacaactgcagcagcaacagcatctcttgttccccttctatataccctcggccgagttccagctgaatccggaggtctcgctgcccgtgaccagtggagcactaactctcacaggcaccggtcctggtttacttgaggatttaaaagcccaggtccaagtgccccagcagtcacaccaacaaattcttcctcagcaacaacagaaccagctgtcgattgctcagtcccactcagccctgcttcagccatctcaacacccggagaaaaagaacaagctggtcataaaggagaaagagaaggaaagtcaaagggagcgtgacagcgccgagggcggagagggaaatacgggtcctaaggagacactaccagacgcgctcaaagctaaggaaaagaaggagctggcgccaggaggcggtagtgagccgagtatgctgccccctaggatcgccagtgacgcgagaggtaatgccacaaaggctcttctggaaaacttcggctttgaactcgtcatacagtacaatgagaacaaacagaaagtgcagaagaaaaacggcaagacggaccaaggggaaaatctcgagaaactcgagtgcgactcttgcggcaagttgttctctaatatactcatcctgaagtctcaccaagagcacgtgcaccagaattatttcccattcaaacaacttgaacggttcgctaaacagtaccgggatcattacgataaactgtatcctctgcggcctcagacccctgaaccaccacctccaccaccaccaccacccccaccccctcttccagccgcacccccacagccagcgtctactccggctattcctgcgtcggccccaccaatcacttctcccaccatcgcaccagcgcagccaagcgtccccctgacacagttatcgatgccgatggaactccctatcttctctccactgatgatgcagacaatgcctttgcagaccctgcccgcacaactccctccgcaactagggccagtcgaacctctgccagctgacctggcacagttgtatcaacaccagctgaatcctaccctactccagcaacagaacaagaggcccaggaccaggataacggatgaccagctaagggtgctgaggcagtactttgacataaacaattcccccagcgaagagcagatcaaagaaatggcagacaagagtggcctgcctcaaaaagtaatcaagcattggtttcggaatactttgttcaaggagagacagcggaacaaagattcaccatacaatttctcaaatcctccaattaccagcttagaagagctaaaaatcgattctaggcctccttcccctgagccaccaaaacaagagtattgggggagtaaaaggtcgtctcgtaccaggtttaccgattatcagctaagagtgctccaagatttctttgacgctaatgcttatcctaaggacgatgagtttgagcagctgagcaatttgctcaacctgcccactcgtgtgatcgtggtgtggttccagaacgccaggcagaaggctcgcaagaactacgagaatcaaggggaagggaaggacggggaaaggcgtgagctgacaaacgaccgatacatccggacgagcaacctgaattaccagtgcaagaaatgttcccttgtcttccaacggatcttcgaccttatcaaacaccagaaaaagctctgttataaagacgaggatgaggaaggtcaggacgactctcaaaacgaagacagtatggatgccatggagatcctgacccccacatcctcgagctgctccacccccatgccgtcccaggcctattcagctcccgcacccagcgccaacaataccgcatcttccgccttcctgcagctgactgccgaagccgaggagttagcaacctttaactccaagaccgaggcgggagatgagaagcctaagctggccgaagcaccctctgcacaacccaatcaaacccaagaaaaacagggacagcctaagcccgaactgcagcagcaggaacagcccgaacagaagacaaacaccccgcagcagaaattaccgcagctagttagcctaccaagcctgccccagccgcctccacaagcccctccgccacagtgccctctcccgcagagctccccctcacctagtcagctctcacatctgccactgaagcccctccacactagcacgccacaacaattagcaaacctgcccccacagctgataccctaccaatgtgaccagtgtaaactggctttccctagtttcgaacactggcaggagcatcagcagctccacttcttgtcagcacagaatcagttcatccatccacaatttcttgatcgtagtttggatatgcccttcatgctctttgatccgtctaacccactcctggcttctcaattactgtcaggagccataccccagattcccgcatcatctgccacctccccttcaacccccacctcaaccatgaacacattgaagaggaagcttgaggagaaagcttcagcttccccaggagagaacgacagcgggaccgggggagaggagccccagcgggacaagagactccggacaactatcaccccagaacaactggaaatcttataccagaagtaccttctcgatagtaaccccacccgaaagatgcttgatcatattgcacacgaagtggggctgaaaaaacgtgtcgtacaggtttggttccagaacacccgtgccagggagagaaaaggacagttcagggcggtgggtcccgcacaggcccaccgtaggtgccccttctgccgcgcactatttaaggcaaaaactgccctcgaggctcacattcgaagccgccattggcatgaagctaagcgggcaggatacaacttgacgttgtccgcgatgcttctcgactgcgacggcggattgcaaatgaagggagacatcttcgacggaacatctttttcccatctgcctcccagctcctcagacgggcagggcgtgccactgagcccagtgtctaagaccatggaattgtctcccagaacgcttttgtcgccatcctccatcaaagttgaagggatcgaagactttgaatctccaagcatgtcgtctgtgaacctcaatttcgaccagactaaacttgataacgacgactgtagttcagtcaatacggccattaccgacactaccaccggcgatgagggcaatgcggataacgattccgccacaggcatagccacagaaacaaaatcttcatccgctccaaacgaagggttaaccaaagcagcgatgatggcgatgtccgaatatgaggaccgcctgtcaagcggattagtgagcccagcccctagtttttactctaaggagtacgacaatgaagggacagtagattactctgagacgtcttcactggctgacccgtgtagcccctcacctggagcttccggttcagcagggaaatctggggattctggtgataggccaggccagaagaggttcaggacccagatgaccaaccttcagttaaaggtgctgaagtcgtgtttcaacgattaccgcacacctacgatgctcgaatgtgaagtgctgggaaatgatatcgggttgcccaagcgggtagttcaggtttggtttcagaatgcaagagctaaggagaagaaatccaagctttctatggcaaaacacttcggtataaatcaaacctcctatgagggcccaaagaccgaatgtactctgtgtggcataaaatacagcgcacggctgagtgttagagatcatatcttctcccagcagcacataagtaaagtgaaagacaccatcggcagtcagctggataaggagaaagagtactttgatccggcaaccgtcagacagctgatggctcaacaggagctggatcgaatcaagaaggccaacgaggtgctgggcttggccgctcagcagcaaggaatgttcgataacacccccctacaggctctgaacctgcccacggcctatccggcactgcagggtatcccccctgtgctccttccgggtctcaactcaccctctctcccagggttcacccctagtaacaccgctctgacatccccgaagcccaatctcatgggcttgccgtcaactacagtgccgagtcccggactgccaacatcaggattgcctaacaagccgagttcggcatcgctgtcctcccctactcctgcacaagcgaccatggcaatgggtcctcagcagccccctcagcagcagcagcagcagcagcagccccaagtgcagcaacctcctccccctcctgccgctcagcccccacccactcctcaacttccactccagcagcagcagcagcgcaaagataaggactccgaaaaagtgaaggagaaagagaaagcccacaagggaaagggcgaacccctgccagtgcctaagaaggagaagggagaggcccctactgccacagcagccaccattagtgcacccctgccgaccatggaatacgcagttgacccagcacagctccaggcactccaggccgcattgacgtccgacccaaccgccttgctgacttctcagtttctgccatacttcgtcccagggttcagcccatactacgctcctcagattccaggcgctctccaaagtgggtacctacaaccaatgtatggtatggaagggctattcccttactcaccagctctgagccaagcgttgatggggctttcaccaggatccctcttacaacagtaccaacaatatcagcagtcactccaggaagcgatccagcagcaacaacagcgtcagcttcaacagcagcaacagcaaaaggtccagcaacagcagccaaaggcaagccagactcctgtcccgcctggcgctccctccccggacaaggatccggctaaagagagtcctaaacccgaggagcaaaaaaatactcctcgcgaggtgtcccctcttctgcccaagctcccagaggaaccagaagcagagagtaagagtgcggacagcctttacgaccccttcatcgtaccaaaagtccaatacaagcttgtgtgccgcaagtgtcaggccggatttagcgatgaggaggccgctcggagccatcttaagagcttatgctttttcggacagagtgtggtcaatctgcaagagatggtgctgcacgtccctacgggtggtggtggtggagggagcggaggcggaggcggtggtggtggtggaggtggcggagggggatcatatcactgtcttgcgtgcgaatctgccctttgcggcgaggaagccttgtcccagcacctcgagagcgctttgcataaacatcgtacaattactcgcgcagcccgtaatgccaaggagcacccgagcctgctcccccattccgcgtgcttccccgacccctcaactgcttcaacttcccagagcgcagctcactctaacgattctccccctccgcctagtgctgccgcaccatcttccgcatcaccccatgcctcaaggaagtcttggcctcaggtggtgtctagagcctccgccgctaaacccccaagcttccccccacttagttcgagttccaccgttacctcctcctcttgctccacatcgggtgtgcagccaagcatgccgaccgatgattactctgaagagtctgataccgatctcagtcagaagagcgatgggcctgcctctcctgtcgagggccctaaggacccatcctgtcctaaggatagcgggttgaccagtgttggtactgacacttttcggctgta

SEQ ID NO: 247224 - DNA, 10704 bp, synthetic construct
  misc_feature 1..10704: note = Description of Artificial Sequence: Synthetic coding sequence
  source 1..10704: mol_type = other DNA
atggaaacctgcgatagcccccctatctctcgacaggaaaacggccagtcgacttcaaagctgtgcgggaccacacagcttgataacgaggtgccggagaaggttgcaggcatggagcctgatagggagaactcttctaccgacgataacttgaagacagatgaacgaaagtcagaagcactgctgggcttttcagtcgaaaatgccgcagcaacccaggttaccagcgccaaggagatcccttgtaatgagtgcgccacatctttcccaagcctgcagaaatacatggagcaccactgccccaacgcacgcctccccgtgttgaaggacgacaatgagtctgaaatcagcgagctggaagattccgacgttgagaatcttactggggagattgtctaccagcctgatgggagtgcttatatcatagaagacagtaaggagagcggacagaatgctcagaccggtgccaactccaaactgttctccacagctatgtttctggactctctagcatccgccggtgaaaaatcagatcagtccgcctctgcccctatgtccttttatccacagattatcaatactttccacatcgccagctcactgggtaagcctttcacagccgatcaagcctttcctaacacttctgctctcgcaggggtggggcctgtgctacacagcttcagagtgtacgatctgagacacaagcgggaaaaggattatctcaccagtgatgggtccgccaaaaactcatgcgtcagcaaggatgtgcccaataatgtagacctttcaaaattcgatggctgcgtgagcgacggtaagcgcaaacctgtgctgatgtgtttcctttgcaagctgtcatttgggtatatccgatcatttgtgactcacgctgtgcacgatcacagaatgactctgaatgatgaagagcagaaattactgagcaataaatgtgttagcgctatcatacagggcatagggaaagacaaagagcctcttatctcattccttgagcctaagaagagcacctctgtgtatccacatttcagcacaaccaacttaataggaccagatcccacattccggggtctttggtcagctttccacgtcgagaacggtgattccctccccgctggattcgcgtttctgaagggctctgcttctactagcagctcagccgagcagcctctcgggattacacaaatgcccaaagctgaagtgaacttggggggactgagtagtttagtggtaaatacaccaattacctctgtctccctaagtcacagctctagcgagtcatccaagatgtccgagtcaaaagaccaggaaaataattgtgagagacctaaggaatccaatgttcttcaccccaacggtgaatgcccagtcaagagcgagcctacagagcctggcgacgaagacgaggaggacgcgtattctaacgaacttgatgacgaagaggtgcttggagaattgactgattctattggcaataaagacttccccctgttgaaccagtcgatctctccactgtccagctccgtgcttaagttcattgaaaagggaacaagcagcagtagtgcaactgtgagtgacgacaccgaaaaaaagaagcaaactgctgcagtgagggcatctggttctgtggccagcaattacgggatatcagggaaagatttcgccgatgcttccgcttccaaggactctgctaccgcggctcacccatccgagatcgccagaggggacgaggactcttccgccacccctcaccagcacggttttacccctagcacccccggaacgccagggccaggaggtgacgggtccccagggagcggcatcgagtgccccaaatgtgatacggtgcttggcagcagtagatctctgggcggtcacatgacgatgatgcacagtagaaatagctgcaaaaccctgaagtgccccaagtgtaactggcactacaaataccagcagactctggaggctcacatgaaggaaaagcatcccgaacctgggggtagctgcgtctactgcaaaaccggacagccccaccctaggctcgccaggggggaaagttacacctgcgggtataagcctttcaggtgcgaggtttgtaactacagtactactacgaagggcaacctcagtatacatatgcagtctgacaaacatctcaataatgtgcagaatctccagaacgggaatggagaacaggtgttcggccatagtgcacctgctccaaacacttctctctcgggttgtgggaccccctcccccagtaagccaaaacagaagcccacctggaggtgcgaagtgtgtgactacgagaccaatgtcgcaagaaacctcagaatccacatgacatccgagaagcacatgcacaacatgatgctcctccaacagaatatgaagcagattcagcataacctgcaccttggccttgccccagcggaggcagaactttaccaatactatctggcccagaatatcggacttactgggatgaagctagagaatccagctgacccccaattgatgatcaacccattccagctcgacccagccactgctgccgcacttgcccctggattgggtgagctgagcccctatatatccgacccagcgctgaagctcttccaatgtgccgtgtgtaataaatttacctccgattcactggaggcattgtctgtgcacgtctccagcgagcgaagcttaccagaggaggaatggcgagcggtgatcggggacatctatcagtgcaagttgtgcaactataacacacagctcaaggcaaactttcagttgcattgcaagaccgataaacacatgcagaagtatcaactggtggcacatattaaagagggcggtaaatcaaacgagtggcgactgaaatgcatcgctatcggaaacccagtacatctgaaatgtaacgcttgtgactactacacaaattccgtagataaactcagactgcacaccactaaccacagacacgaggctgccctgaaactgtacaagcacttgcagaaacaggagggcgctgtgaacccggaatcctgttattattattgcgcggtgtgtgactatacaaccaaggtaaaactgaacctggttcagcatgtgagaagtgtcaagcatcagcagaccgaggggctgagaaagctccagctgcaccagcagggactagcccctgaagaagataacctgtccgagattttcttcgtcaaagactgcccaccgaacgagctcgagactgccagtttgggtgcgcgtacctgtgatgatgatctgactgaacagcatgaggaggctgagggtgcgattaagcccaccgcggtcgcagaggacgatgaaaaagacacgtctgaaagagacaattcagagggtaagaacagcaacaaggacagcgtgtccgtggctgggggtacccagcctctccttttggccaaagaggaagacgtcgcgactaagcggtctaaacctaccgaggataacaaattttgccatgaacaattctaccagtgtccctattgtaactacaactcacgcgaccagtcccgaatccagatgcatgtgctgtcccagcatagtgtgcagccggtgatctgctgccctctctgccaggatgtgcttagtaataagatgcatctgcaattgcatctcacacatctgcattccgtgtcccctgactgcgtggagaaacttcttatgacggtccccgtccctgatgtcatgatgccaaactccatgctgttgcctgcggctgcttcggagaagtctgaacgcgacaccccagccgctgtaactgctgagggatctggcaaatacagcggtgagagtcccatggacgacaaatccatggcgggacttgaagactcaaaagcaaatgtggaggtaaagaatgaggagcagaaacccacaaaagagcctctggaagtaagcgagtggaataagaactccagtaaggatgttaaaatccctgatacattgcaggaccaactaaacgagcagcaaaagcgacaacccctttcggtcagcgatcgacatgtgtataaatacagatgcaatcactgcagtttggccttcaagacaatgcagaagttgcagatccactcccagtatcacgccatccgcgcagctaccatgtgcaacctttgtcagaggtccttccggactttccaggctcttaaaaaacatttagaagccggtcatccagaactgagtgaagcagagctgcaacagctgtacgcctcgttgcctgtgaatggcgagctttgggcagagagcgagacaatgtcccaggatgaccatgggcttgaacaggagatggaaagggagtatgaggtagatcacgaggggaaggcctcccccgttggatctgacagctcctccatccctgacgatatgggatctgaaccgaagcgtacactgccttttagaaaaggcccaaattttaccatggaaaaattcctggatccctctcggccatacaaatgcactgtgtgcaaggagagctttacccagaaaaatattctactcgtgcattataactcggtatcacatctgcacaagttaaagaaggtgctgcaagaggcaagctcacctgtgcctcaagaaacaaatagtaacacagataacaaaccatacaagtgcagcatttgtaacgtcgcttactctcagagctccactctagagatacatatgcgatccgtcttgcaccagaccaaggccagagccgcaaagcttgagccttcgggacacgtggccggtggccattctattgccgctaacgtaaactctcctgggcagggcatgctagatagcatgtcactcgccgcagtgaatagtaaggacacccatctcgatgctaaagaactaaacaaaaaacagacgccagacttaattagtgcacagccagcacatcatcctccacagagtccagcccagattcagatgcagctacagcacgagctgcaacaacaggctgcattctttcagcctcagttcctaaatccagcctttctcccgcacttcccgatgaccccagaagccttgctgcagtttcaacagccccaattcctgttcccattctatatcccaggtacagagttttctctaggacctgacctcggactgccaggatccgcgacattcggaatgcccggaatgacgggcatggctggatcacttctggaggaccttaagcagcagattcagacacagcaccatgttggtcaaacacagctgcagatactgcagcagcaagctcagcagtaccaggctacacagccgcagctgcagcctcagaagcagcagcagcagccaccccctccccagcaacagcagcagcagcaggcctctaagctgctgaagcaggaacagtccaacattgtttcagccgactgccaaattatgaaggacgtaccttcctataaagaagcagaggacatctcagagaagccagagaaacccaaacaggagtttatcagtgagggcgaaggacttaaggaaggcaaagacacaaagaaacagaagagcctggaacctagtatccctcctcctcgtattgcctccggcgctagagggaatgccgctaaagccttactggagaattttgggtttgagctcgtgatacagtacaatgagaatagacagaaggtgcagaaaaagggcaagtccggcgaaggtgaaaatacagacaaactcgaatgtggaacctgtgggaaacttttctctaatgtgctgatcctgaaatcccatcaggaacatgtccatggtcagttcttcccatacgccgcacttgagaaatttgccaggcaatacagagaggcgtacgacaagctgtacccaatctctccctccagtccggagacccctccacccccaccaccacctccccctctaccacctgcacctccacagccatcttctatgggccctgtgaagatccccaacaccgtgagtaccccactacaagcccctcctcctacacccccacctcctcctccgcctcctccccctccgccaccgccacccccaccacctcctccttccgccccaccacaagtgcagttgcctgtgtcactggacctgccactttttcctagtattatgatgcagcctgtgcaacatcccgcactgccgcctcagttagctcttcagctgccacagatggacgccttgagtgccgacctgacgcagttatgccagcagcagctgggacttgaccccaatttcctacgccactcccaattcaagcggcctaggactcggatcaccgacgatcagttaaagattctgcgtgcatatttcgacattaacaactctccctcggaggagcagatccaggaaatggccgaaaaatccgggctttcccaaaaagttatcaagcactggttccgaaataccctgtttaaagaacgccagagaaacaaggacagtccttataacttcagcaacccacccataaccgtgctggaggatataagaatcgacccacaacctacgtccctcgagcattacaaatcagatgcaagcttctctaagcgttcttcgcgcactcgttttacagactaccagctcagggtacttcaagactttttcgacaccaacgcctaccctaaggatgatgagatcgaacagctgagtaccgttctcaacttacccacacgagtgatcgtcgtttggtttcagaatgcccgtcagaaagcacgaaagagctatgagaatcaggcagagacgaaagacaatgagaagcgagaattgacaaacgagcgctatattagaacatctaacatgcagtaccagtgtaaaaaatgtaacgtcgtattcccaaggattttcgacctgattacacaccagaagaagcagtgctataaggacgaagacgacgacgctcaggacgaaagccaaacagaagattcaatggacgccacagaccaggttgtgtataaacactgtacagtcagtggtcagacggatgctgccaaaaacgccgcagctcccgcagctagcagcggctctggaacatctactcccttgatcccctctccaaaacccgaacctgagaagacaagcccaaaaccagagtatccggctgaaaagccaaaacagagtgaccctagccccccttcccagggcaccaagcctgcccttccactggcctctacaagctcagatccccctcaagccagtaccgcccagcctcagcctcagcctcaacctccaaaacagccccaacttatcggcaggcctccttccgctagtcaaacgccagtcccctcctcaccattgcaaatatctatgacatctttgcagaacagcctgccccctcagctcctgcagtaccagtgcgaccagtgtaccgtggcctttcccactctggagctatggcaggaacatcaacacatgcactttctggccgctcagaaccagtttcttcactctcccttcctagagcgacctatggatatgccttacatgattttcgacccgaacaatccgctgatgaccggtcagctgctgggtagctccctgactcagatgccacctcaagcctccagcagtcacaccaccgctcccaccaccgtggccgcaagcctcaaaaggaagctggacgacaaggaagacaacaactgttctgagaaggaaggcggaaacagcggagaagaccagcacagggacaaacgcctgcgaacaactatcactcccgagcagctcgaaatcctttatgaaaaatacctcctggatagcaacccgacacgcaaaatgctggaccacatcgcccgagaagtggggctgaaaaagagagttgtgcaggtgtggttccagaataccagagctcgcgaacgaaaggggcagttccgggctgtgggacccgcacagtcacacaaacgttgtccgttttgcagagcattgtttaaggccaagagcgcactggaaagccacatcagatctagacactggaatgaaggtaagcaggccggatacagcctgccgccaagcccgcttattagcaccgaggacggtggggagtcgcctcagaagtatatctacttcgactatccgtcactccccctcacaaaaatcgacctgagctccgaaaatgagctggcgagcaccgtgagcacaccggtatctaagactgctgagctcagtccaaagaatctgctttcgccatcatccttcaaggccgagtgctccgaagatgttgagaacttgaacgctccgccagcagaggctggatacgatcagaataaaactgatttcgatgaaacctcctccataaacactgcaatttccgatgccaccactggtgacgagggaaacacagagatggagagcacgaccggctcgtccggggacgtcaagccagcgctttccccgaaagagcccaaaacactcgacaccctgcccaaacccgcaacaactccaacaactgaggtgtgcgatgacaagtttctgttttccttaacgtctcccagcattcacttcaacgacaaagacggtgatcacgaccagtcgttttacattacagatgatcccgacgacaacgctgataggtcagagacgtcctctattgccgacccgagctcgccaaatccttttggctcaagtaatccattcaagagtaagagcaatgataggcctggacataaacgcttccgtacccagatgagcaatttacagctgaaagttttaaaggcgtgcttcagcgactatcgaacacccacaatgcaagagtgcgaaatgctggggaacgagataggtcttcctaagagagtcgtgcaggtctggtttcaaaatgcacgtgcgaaggagaaaaaattcaaaattaatataggcaaacctttcatgataaaccagggtggcaccgaaggcaccaaacctgaatgcaccctgtgtggcgtgaagtactctgcacggctgagtatcagggaccacatcttctccaaacagcatatctcaaaggtcagagagactgtaggttcccagttggatagagagaaggactacctggctcctaccacagtcagacagctaatggcacagcaggagttggacaggattaaaaaagcatctgacgtattggggcttaccgtgcagcagccgggaatgatggacagctcatctctccacgggatttccttgccgacagcctacccgggattaccaggcctgccccctgtgctcttaccaggtatgaacgggccttctagcttgcccggttttccgcagaactcgaacatcgcatccgggatgctcggtttccctacctctgcaaccagctccccggctctgtctttgtccagcgccccaactaaaccactgttgcagacaccaccaccgccaccccctcccccacccccaccgccttcatcatccctctctggtcagcaaaccgagcagcagaataaagagtctgagaagaagcagaccaagcccaacaaagtcaagaagatcaaggaagaggaactggaggctaccaaacctgagaagcatccaaagaaggaggaaaagatctcttctgccctctcagttctgggtaaagtcgtgggcgagacccatgtggacccaatacagctgcaggctctccagaatgcaatcgcaggcgacccagcctcctttattggcggtcagttcctcccatatttcatccctggttttgccagttactttacacctcagcttccaggcacagtacaggggggttacttccccccagtatgcggaatggagagcctctttccctatggccctactatgcctcaaacactagcagggctaagcccgggagcgctcctgcagcagtaccagcaataccaacagaatctgcaagaaagcctgcagaagcaacagaaacagcagcaggagcagcaacagaaaccagtgcaagctaagacttcaaaagtagaaagtgaccagccacagaattcgaacgatgcgagtgagacaaaagaagataaatcaacagcaactgagtccactaaagaagaacctcagttggaaagcaagtccgctgacttctcggacacgtatgtagtgccttttgtcaaatacgagttcatttgccggaagtgtcagatgatgttcacagatgaggacgcggctgtcaaccaccaaaagagcttttgttacttcggacagcctctgatagatccccaggaaacagttcttcgtgtacccgtctcaaagtaccagtgcctggcatgcgacgtcgcaataagcggaaatgaggccctgtctcagcacctacagagctctcttcataaagaaaagactatcaagcaagcaatgagaaatgccaaagagcacgtgcgcctccttccgcattccgtgtgctcccccaatccgaacacgacgagtacttcccaatcagccgcttcttctaacaatacttaccctcacctaagttgtttctccatgaaatcatggcctaacattcttttccaagcatcagccaggagagccgcatcccccccttccagcccaccctcactaagcttgccatcaaccgtgacctcctcgctgtgctctacctcgggggtgcagacatcccttcctaccgagtcttgctccgacgaatccgatagtgagctttcacagaaactcgaggatctcgataattcgcttgaggtgaaggcgaaaccagcttcagggctggatggaaattttaattccatacgaatggatatgttctccgtgtag

SEQ ID NO: 247225 - DNA, 10803 bp, synthetic construct
  misc_feature 1..10803: note = Description of Artificial Sequence: Synthetic coding sequence
  source 1..10803: mol_type = other DNA
atggagacctgtgattctcccccaatcagtcggcaggagaacggccaatcgacaagcaagttgtgcggaacaactcaactcgataatgaagtgccagaaaaagtggcaggcatggagcccgacagggaaaactcatctacagacgataatctgaaaacagacgagcgtaaaagcgaggccctgctcgggttcagcgtggagaatgccgcagctacacaagtcacctctgccaaagaaataccatgtaacgaatgtgccactagtttccctagcctgcagaagtacatggaacatcactgcccgaacgctcggctacctgtattgaaagacgataatgaatccgaaatcagtgagctggaggatagcgatgtggaaaatcttaccggtgagattgtatatcaaccagacggctcagcttatatcattgaagacagtaaagaatccgggcagaacgcccagacaggcgctaattcaaagctgtttagtacagctatgtttttggactcactggccagcgcaggcgagaaaagcgatcagtccgcatctgcccctatgtctttttacccccaaattattaacacctttcatatcgctagctccctcggaaagccatttacagccgaccaggcatttcccaatacctctgccctggcaggggtgggaccggttctgcattccttccgggtctatgacctgagacataaaagagagaaagattacctgacctccgatggcagcgccaagaattcatgtgtttctaaagatgtccctaacaatgtagacctcagtaagttcgatggttgtgtgtccgacggcaagaggaaacctgttttgatgtgttttctgtgtaagcttagctttgggtatataaggtcctttgtgacccacgcagtgcatgatcatcgaatgacgctcaatgacgaggaacagaaactgttaagtaacaaatgcgtgagcgcaattattcagggcatcggtaaggacaaggagccgcttataagttttctcgaaccaaaaaagtccacttctgtataccctcatttcagtacaacgaacctgattggacccgatcccacattccgtggactctggagtgcatttcacgtggagaacggagactcgctgccagccggattcgcttttctgaagggcagtgcttccacctcttcttctgctgaacagcctctgggcatcacacaaatgccaaaagccgaggtgaatctgggaggattatccagtctggtggtgaacactcctatcacttcagtcagcctgagtcactccagctccgaaagctcaaaaatgtctgagtctaaggaccaagaaaacaattgcgagcgcccaaaggagtccaacgttttgcaccccaacggagaatgtcctgtgaagtctgaacccacagagcccggagatgaagacgaagaggacgcttactccaatgagctcgacgacgaagaagtcctgggcgagctaacagacagcatcggaaataaggactttccactcctgaatcagtccatctctcccctgtcttcctctgttctaaaatttatcgagaaagggaccagctcaagcagtgccacagtatccgatgatacagagaaaaagaaacagacagcagccgtaagggctagcggctctgtcgcctcaaactacggaatttccggtaaggactttgcagatgcgagcgcctctaaagactcagccacagccgctcatccctcggaaatcgcccgaggggacgaggactccagtgctaccccacaccaacatggatttactccgagtacacctggcactcccggacctggaggggacggttctccagggagcggaatcgagtgcccaaagtgtgacactgtcttgggtagtagtcgtagcctggggggtcacatgactatgatgcattctcggaatagttgcaaaacgttgaaatgcccaaaatgcaactggcactacaagtaccagcaaaccctggaagcccacatgaaagagaagcaccccgagccaggtgggtcatgcgtgtattgcaaaacggggcaacctcaccctcgccttgccaggggcgagtcttacacttgcgggtataaacctttccgatgcgaggtgtgcaattactccaccaccaccaaggggaatctgtcgattcacatgcagagcgataagcacctaaacaacgtacaaaatctccagaatggcaatggtgagcaagtgttcggacatagcgcaccagcgcctaacaccagtctgagcggttgtgggacaccgtctcctagcaaacccaagcagaaacccacctggaggtgcgaggtgtgcgactacgaaacaaacgtagcacggaaccttcgaatccacatgactagcgagaaacacatgcacaacatgatgctgctgcagcagaatatgaagcagattcagcacaacctgcatctcggcctggctcccgcagaagctgaactgtatcaatactatctggcccagaacattgggctgactggcatgaagctggagaacccagctgaccctcagcttatgatcaatcccttccagcttgaccctgctactgctgcggctctggcacctggccttgtgaacaacgagctgccgcctgaaatcagactcgctagtggccagctcatgggcgatgacctctcccttctgacggcgggtgagctgtccccttatatcagtgacccagcactgaaactgtttcaatgcgcggtatgcaataagtttacgtctgattccctcgaggctctgtcggtgcacgtgtctagcgagaggagcctcccggaggaggagtggagagcagttatcggcgacatctaccagtgtaagctctgtaactataatacccaattaaaagcgaactttcagctgcactgtaagacagataagcacatgcagaaatatcaacttgtcgcccatattaaggagggaggaaagtctaatgagtggcggttaaagtgtatcgctattggaaatcctgtgcatcttaagtgcaacgcatgtgactattatacaaacagtgtagataagttgcgcctgcacacaaccaaccaccggcatgaagccgctcttaaactttacaagcacctccagaagcaagagggtgcggttaaccccgaaagctgttattattactgtgccgtgtgtgattacactacgaaagttaagctgaacctggtccagcatgtgaggagcgtcaagcaccagcagacggagggcctacgcaagctgcaactacaccagcaggggctggcaccggaagaggacaacctgagcgaaatcttcttcgtcaaagactgtccacccaacgagttggagaccgccagccttggcgcaagaacttgcgacgacgatctgacagagcaacagctgaggtcaacctccgaagagcagagcgaggaggccgagggcgctattaaacccacggccgtggccgaagacgatgaaaaggatacgtcagaacgggacaacagtgagggtaaaaactcgaacaaagactccgggatcatcacacctgagaaagagttaaaggttagtgtggccggaggtacccaacctctactgttggcgaaagaagaggacgtggccactaaaagaagcaaacctactgaggacaataaattttgtcacgaacagttttaccaatgtccgtattgtaactacaattcccgagaccagagtcggatccaaatgcacgtcttatcgcagcactccgtacaaccggttatctgctgtccactgtgtcaggacgtgttgagcaataagatgcaccttcagctgcacctcactcatctccactccgtgtctcccgattgcgtggaaaagctgttaatgaccgttcctgtcccggacgtaatgatgccgaatagtatgctcttgccagccgctgccagtgagaaaagcgaacgcgataccccggcagccgtgacagctgaggggagcggaaaatattctggagagagtcccatggatgataagtcaatggccggactggaggatagcaaagccaatgtggaggtgaagaatgaagagcaaaagccaactaaagaacccctcgaggttagtgagtggaacaaaaatagttctaaagacgtgaaaatcccagatacgctccaggaccagctgaatgaacagcaaaagcggcagccccttagcgtgtcggatcggcacgtctataaatatagatgtaatcattgttccctcgcatttaaaaccatgcagaagctccaaattcactcccagtatcatgctataagggcagcgactatgtgtaacttatgtcagcggagttttcgaaccttccaggctcttaaaaagcaccttgaagcaggacaccctgaattgagcgaggctgagctgcagcagttatacgccagcctccccgtcaacggagaactgtgggccgagtccgaaaccatgagtcaggatgaccacggacttgagcaggagatggagcgagaatacgaagtggatcatgagggcaaggctagtcctgtaggcagtgattcatcttccatccccgacgacatggggagcgaacctaagcggactcttcctttccgcaagggacccaattttactatggagaagttccttgatccgagccggccatacaagtgcacagtgtgtaaagagtcctttacacaaaaaaacatccttctggttcattataatagtgtttctcacctccacaaactcaaaaaagtccttcaagaggccagttctccagtgcctcaggagacaaattcaaacaccgacaacaagccctacaagtgcagcatctgtaacgtggcctactcacagtccagcaccctggaaatccatatgcggtccgtgctccaccagactaaggccagggccgctaaacttgagcccagcgggcatgtagctggtggtcattcaatcgccgctaacgtgaattctcccggtcaaggcatgctggacagcatgtctctggcggctgtgaatagcaaagacactcacttggacgctaaggagctgaataaaaagcagaccccggacctgatttcagcccagccggcacatcacccacctcagtcgccagcacagattcagatgcagcttcagcatgagttacagcagcaggcagcattcttccagccacagttcctgaacccagcttttctgccccacttccctatgacccctgaggccctacttcagtttcagcagccacagtttttgtttccattttacattccgggtaccgagttcagtctggggcctgacctgggattgcccggatccgccacgttcgggatgcccggaatgaccggtatggccggaagtctgctcgaagacctgaaacagcagattcagactcagcatcatgttggccagacacagctccagattctgcagcagcaggcccagcagtaccaggcaactcagccgcagctgcagccacagaagcagcagcagcagccaccaccccctcagcagcagcagcagcagcaagcaagcaagctcctcaagcaggaacagagtaatatcgtcagcgccgattgccagataatgaaagacgtaccgtcctacaaagaggcagaggatataagtgagaagcctgaaaagcccaagcaggaattcatcagcgaaggggaaggtttgaaagagggaaaagacaccaagaagcagaagtcactggagccctccattcccccaccccgaatcgccagtggagcccgtggcaatgctgccaaggctcttctcgagaatttcggattcgaacttgtaatccagtataacgagaaccggcaaaaggtgcagaaaaaagggaagagcggtgaaggcgaaaacactgacaagctggagtgtggcacatgcggaaaactattctccaatgtgttgatcctgaagagtcaccaggagcacgtgcacggccagttttttccgtacgccgcattagagaagttcgcaagacagtatcgggaggcatatgacaagctttatcccattagcccctcgtcccctgagactccgcctcctcccccaccccctccgcctctgccacccgctccaccgcaaccctcgagcatgggcccagtcaagattccaaacacagtgagtactccacttcaggccccacctcctaccccgcctccaccgagcgcccctccccaagtgcagctcccggtgagcttggatttaccgttgtttccctctattatgatgcagcctgtacagcacccagctctgcctcctcagctggccctgcagctgccacagatggacgctctttctgccgatcttacccagctgtgccaacagcagcttgggctggacccaaatttcctgcgacacagccaatttaaacgcccaagaaccaggattaccgacgaccaattgaaaatcctcagagcatatttcgacatcaacaatagcccttccgaggagcaaattcaggaaatggccgaaaagtccgggctgagccagaaagtgattaagcattggttcaggaacacactgttcaaggagaggcagaggaacaaagactcaccttacaacttctctaatcctcctattacggtccttgaggacattagaatagatccccagcccaccagtcttgagcactacaagtctgatgcttctttttccaaacggtcctcaagaaccaggtttaccgattatcagctgagggtgctccaggatttctttgacacaaacgcttacccaaaggatgatgagatagagcagctgtccactgtcctgaatttgccaacccgcgtgatcgtcgtttggttccaaaatgctagacaaaaggcacggaagtcttacgagaaccaagccgagactaaggataatgaaaagagggagctgacaaacgagagatacatcaggaccagcaacatgcagtatcagtgcaagaaatgcaacgtcgtttttccaagaatttttgacctcattactcaccagaagaaacagtgctacaaggacgaagacgatgatgcccaggatgaatcccagaccgaagattccatggatgcaaccgatcaagtggtatacaagcactgcacagtttctggacagaccgacgccgctaagaatgccgcagcacccgcagcgtcctcgggcagcggcaccagcacccccctcataccaagccctaagcctgagcctgagaagaccagccccaaacctgagtatccagcagaaaaacccaagcagagcgacccatctccaccatctcaagggactaaacccgcattgcccctagccagcacttcctccgaccctccacaggcaagcacagctcagccacagccccagccacaaccccctaaacagcctcagctgatcggacgccctcccagtgcctctcagacaccagtcccttcatctccgctccaaatatcaatgaccagcttgcagaactccctgccgcctcagttgctccagtaccagtgtgatcagtgcactgtggcctttcctacgcttgagttatggcaggagcatcagcacatgcactttctagccgcacagaatcagttcctccattccccgttccttgagaggccgatggacatgccctacatgatcttcgacccaaataacccattgatgacagggcaactactgggttcttccctgactcagatgccccctcaggcttccagttcgcatactacggctcctactacagtcgcggcatctttaaaacggaaactggacgataaggaggataataactgctccgagaaagagggaggcaatagcggagaggatcagcacagagataagcgcctacggactactatcactcccgagcagctggagatcctgtatgagaaatatctgttggattctaaccccacacgcaaaatgttagaccacatagcgcgtgaagtagggctgaaaaagcgggtggtgcaggtgtggttccagaatactagagcgagggaacggaaagggcagtttagagccgtggggcctgcgcagtcccacaagcgttgtcccttctgtcgagctcttttcaaagccaagtcagccctggagagccatatacgctcaaggcattggaatgagggaaagcaggcagggtactcattgccaccctcccccctgatctccacagaggatgggggagagagtccgcagaagtacatatattttgattatccttctctgccactaactaaaattgacctgagctctgaaaacgaattggctagcacggtctccaccccagtgtctaagaccgccgagctgagccctaaaaatttattgtcaccttccagttttaaagctgagtgtagcgaagatgtggaaaatctgaacgccccacccgctgaggccggttacgatcagaacaaaaccgactttgacgagactagcagtatcaacacagcaatttcggacgctacaaccggcgacgaggggaacaccgagatggagtctaccacagggtctagcggggatgtgaagccagccttgtccccaaaagagccaaagactttggatacactgcctaagcctgccactacccccactacggaagtgtgcgacgacaaatttctgttttccctcacttccccctctatacacttcaacgacaaggacggggatcacgaccagtccttttacatcaccgacgaccccgacgacaacgctgacaggagtgagacatcctcaattgctgatccgtcatctcccaacccctttggcagcagcaatccctttaagtcgaagagcaatgataggcccggtcataaacgttttcgaacgcagatgtccaaccttcagctcaaagtgctgaaggcttgtttctcagactacaggactccgacaatgcaagaatgcgagatgctgggcaacgagataggcctgccaaaaagggtggttcaggtatggtttcagaacgccagagcgaaggaaaagaagtttaagatcaatatcggaaaaccattcatgatcaaccaagggggaactgaggggaccaaacctgagtgcaccctgtgtggggtcaaatactctgcaagactttctataagagaccacatattttctaaacagcatatcagcaaggtgcgcgaaactgtgggatcgcagctcgatcgcgaaaaggactaccttgcacctactacagtgagacaactcatggcacaacaggaactggaccggattaagaaagcgagtgacgtcctaggccttaccgttcagcaaccaggtatgatggactcctctagcctccatggcatcagtctgccaaccgcctatcctggcctcccaggccttccaccggtgctgctgcccggaatgaacggacctagctccctgcctggattcccccagaactctaacaccttaaccccccctggtgctggcatgctaggattcccaacctccgcgacttcctctcctgctttaagcctgagctcagctcctacaaaacctctgcttcagactccgccaccccctcctcctcctccccctccacctccatcctcatcactgtctggacagcagaccgagcagcagaataaggaaagtgaaaagaaacagaccaagccgaacaaggttaaaaaaattaaggaagaggagctcgaagccacaaaaccagagaaacacccaaaaaaggaggaaaagatcagctctgcattgagtgtgctcggcaaggtggtgggcgagactcatgttgatcccatacagttgcaagctctacaaaacgcaatagccggtgatcccgcttcttttataggtgggcagttcttgccctactttatacccggattcgcgtcctacttcaccccgcaactccccggaaccgtgcaggggggttactttccacctgtctgcgggatggaaagcctgtttccttacggaccaacaatgcctcagaccctggccggactgagtcctggagccctcttgcaacagtaccagcagtaccagcagaacctgcaggaatctcttcagaaacagcagaagcagcagcaggaacagcagcaaaagccggtgcaggcgaagacaagcaaagtggagagcgaccagcctcagaattcgaatgatgcttctgagacaaaagaggataagtctaccgcaacagaatcaaccaaagaggaaccacaactggagagcaaatcagccgacttctctgatacttacgtggttccttttgtgaaatacgagttcatttgtcggaagtgtcaaatgatgtttacagatgaggacgccgctgtgaaccaccagaagagcttttgctattttggccagccgctgattgacccccaggagacggtgctgagggtgccagtatccaaataccagtgccttgcctgtgacgtggctatttcaggcaatgaggcgttaagtcagcatctccagtcatccctgcataaagaaaaaaccattaaacaggccatgagaaacgccaaagaacacgtacgactccttccccactcagtctgctctcctaatcctaacacaacctcaacttcccagagcgcagcctcctctaataatacttaccctcacttgagttgctttagtatgaagtcctggccgaatatcctctttcaggcatcagcgcgtagggctgccagtccaccgtcctctcctccatccctcagcctgccctccacagtcacctcaagcttgtgttctaccagcggggtccagacaagccttccgactgagagctgcagcgacgaatcagactccgagctgagccagaaattggaagacctggacaattcattagaggtgaaagcaaaacctgctagcgggttggacggcaatttcaatagcattcgcatggacatgttttcagtttaa

SEQ ID NO: 247226 - DNA, 10716 bp, synthetic construct
  misc_feature 1..10716: note = Description of Artificial Sequence: Synthetic coding sequence
  source 1..10716: mol_type = other DNA
atggagacatgcgactccccacctataagtagacaagaaaatggccagagtacatccaagttgtgcggcaccacccagctcgataacgaggtgcctgagaaggtggctggtatggaacctgaccgcgagaactccagtactgatgacaacctcaaaactgacgagcggaagtcagaggctctgttaggcttctctgtggaaaatgccgcagctacacaggtcacctccgctaaggagattccatgtaacgaatgtgccacgtcttttcctagccttcaaaaatacatggagcaccattgcccgaatgcaaggctgcccgtcctgaaagacgacaatgagtccgagatatccgagttagaagactcagacgtcgaaaaccttactggcgagattgtttatcagccggacgggtcggcgtatattatcgaggactccaaggaaagtggccagaatgcccagacgggcgctaattcaaagctgttctccaccgccatgtttttagacagtttggcgtcagccggagagaaatccgaccagagcgccagtgccccaatgagtttctacccccaaatcattaatacgtttcacattgccagtagtctcggtaagccatttacagctgatcaggcattcccgaatacctcagcactggccggtgtcggtcctgtgcttcactcctttagggtgtacgatctaaggcataaaagggaaaaagattacctgacatccgatggatcagccaagaatagctgtgtctctaaagatgtgcccaacaatgttgacctgagcaagttcgatggttgtgtctcagatggaaaaaggaagccagtcctgatgtgttttctgtgcaagctgagcttcggttacatccgctcattcgtgacacatgccgtgcacgatcatcggatgactcttaacgacgaagaacagaaactgctgagcaacaagtgtgtctcagcgataattcagggaatagggaaggacaaagaaccgctgatcagctttctggaacctaaaaagtcgacttctgtttaccctcactttagcaccaccaatctgattggcccagatcccacattcagggggctttggtccgcgtttcacgtggaaaatggagactcgctgcctgctggattcgcctttctgaagggatccgcaagtacgtcctccagcgctgagcagccgttgggtatcacccagatgcctaaggccgaagtgaacctgggtgggctaagtagcttggttgtgaacactcccatcacaagcgtcagcctgtcgcattccagcagcgaatccagcaagatgagtgagtctaaagatcaggaaaataactgcgaacgccctaaagaatcaaacgtgctgcatcccaatggcgaatgccctgtgaaatccgagcctacagaaccaggggacgaggatgaagaggatgcctatagcaatgaactcgacgatgaagaggtgctgggggaattgacagactccatcggaaataaggattttcccctgctgaaccagtctatcagcccactcagctcaagcgtccttaaattcatcgaaaaagggactagttcctctagtgccacagtttcagatgataccgagaagaagaagcagacagccgctgtgcgcgcaagtggtagcgtcgcatccaactatggcattagcggtaaagacttcgcagacgctagtgccagcaaagacagcgccaccgccgcacacccctcagaaatcgcaaggggtgatgaagacagttccgccaccccacatcagcacggcttcactcccagtaccccgggtacccccggtcccggaggagacggttcccccggatctggcatcgaatgtccaaaatgcgataccgtgctgggcagtagtcgcagtctggggggacacatgacaatgatgcacagccgaaacagttgcaaaacattgaagtgcccgaaatgcaattggcactacaaataccagcagaccctcgaggcccacatgaaggaaaaacaccctgagcccggtggaagttgtgtgtattgcaagaccgggcaaccgcaccccagactcgccagaggagagtcctacacctgcggatacaaaccttttcgttgtgaggtttgtaattacagtaccactacaaagggtaacctttctatccatatgcagagcgataagcaccttaacaacgttcagaatctgcagaatggcaatggcgaacaggtctttggccacagcgcaccggctccaaacacctcattgagtgggtgtggaacaccaagcccctctaagccgaagcagaagccaacatggagatgtgaagtctgcgattacgagacgaatgtggctcggaacctccgaatccacatgacctcagagaaacatatgcacaatatgatgctgctgcagcaaaatatgaagcagattcaacacaacttgcatctcgggctagcccctgctgaagcagagctttatcagtactacctggctcagaatatcgggctgacaggtatgaagctagaaaatccagcggatccccaactgatgatcaacccattccagcttgatccggcaacagccgctgcgttggccccaggattgggagaactctcgccatatatatcagatcccgctctgaaacttttccagtgcgctgtgtgtaacaaatttacgtcggactctctggaggccttgagcgtccacgtatcaagcgagaggagcctccctgaagaagagtggcgcgctgttatcggggatatctaccaatgtaaactgtgtaactataacacccagctgaaggctaacttccagctgcattgtaaaactgataagcacatgcagaaataccagctcgtggctcacattaaggagggaggtaagtccaatgaatggaggctaaaatgtatcgccattggaaacccagttcacctgaagtgcaacgcctgtgattactacacaaacagcgtcgataaactgcggttgcatactactaatcataggcacgaagccgcattaaagctttataagcacctgcaaaaacaggagggcgcagtgaatccggagtcttgttactattactgcgctgtgtgcgactacactaccaaagttaaactgaatcttgtgcagcacgtcagatcagtaaagcatcagcaaactgaaggcctgcgtaagttgcagcttcaccagcagggtctggccccagaagaagacaatttgtctgaaattttttttgttaaggactgccctcccaacgaactggagacggcatcccttggagcaagaacctgtgacgatgacttaacggagcaacacgaggaggctgaaggggctatcaagcctactgccgtagccgaagatgacgagaaggataccagtgaaagagataactcggagggaaagaactccaataaggatagcgtctccgtcgcagggggaactcagccgctgctcctggcaaaggaagaggacgtggctacaaaacggagtaagcctaccgaggacaataagttttgtcacgagcagttttaccagtgcccctactgcaattataactcccgggaccaaagccggattcagatgcacgtcctgtctcaacatagtgttcagcccgtaatctgttgcccactgtgtcaagacgttctgtctaacaagatgcaccttcaactgcatttgactcacctgcatagcgtgtctcccgactgtgtggagaaactcctgatgaccgtgcctgtcccggacgtgatgatgccaaacagtatgctgttacccgctgccgcttccgagaaaagcgagagagatacaccagccgctgtgacagccgagggctcaggcaaatactctggcgaatcccccatggacgataagtcaatggccggtcttgaagacagtaaggcaaatgtcgaagtcaaaaacgaagaacagaagccgaccaaagagccattggaggtttcagagtggaacaagaacagtagcaaggacgtgaagatcccggacactctgcaggatcagctgaatgaacagcagaagaggcaaccgctatctgtgagcgataggcatgtctataaatatagatgtaaccactgttcattggctttcaaaaccatgcagaaattacagattcactcacagtatcacgccattagagcagctaccatgtgcaacctatgccagcgatcatttaggacatttcaggctctgaagaagcacttggaggcagggcacccagaattaagcgaagccgaactgcagcagctgtatgcgagcctaccagtcaatggagagctctgggcggagagcgagactatgagccaagacgaccacgggttggagcaggagatggaacgggagtacgaggtggaccacgaagggaaagcatcccccgttgggtctgacagcagtagcatcccagatgacatgggcagtgagcccaaaagaacacttcccttcaggaaaggcccaaactttactatggagaaatttttggaccctagccgtccatataaatgtacagtgtgcaaggaatcatttacacagaagaacatccttttagtgcattataactccgtctcacatctgcataagctcaaaaaggtgttgcaggaagcaagctcacccgtgcctcaggagactaactcaaatacggacaacaaaccatacaagtgtagtatttgcaatgtggcatactctcagtcttcgacccttgagatccacatgaggtctgtcctgcatcaaactaaagccagggccgcaaaactcgaaccctccgggcacgttgccggtggccatagcatcgccgcaaacgtgaacagccctgggcagggaatgctggatagcatgtcgttagcagctgtaaattctaaagatactcaccttgacgctaaggagctcaacaagaaacaaacccccgatttgatatcggcccagcccgcacatcaccctccccagtctccggctcagattcagatgcagcttcaacacgagttgcaacagcaagcagcattctttcaacctcagttcctgaaccctgcgttcctgcctcactttcccatgactcccgaagctctcctgcagtttcaacagcctcagttcctgttccccttctatattcccggaactgagtttagcctgggtccagatctgggcctccccggatccgcgaccttcggcatgccaggaatgacagggatggccggaagcctcctggaggacctaaagcagcagattcagactcagcaccatgtgggacagacacaactgcagatactacaacagcaggcccagcagtaccaggctactcagccgcaactgcagccgcagaagcagcagcaacagcctcctcctccacagcagcagcagcaacagcaggcatctaagctgctgaaacaggaacagtctaatatcgtttccgcagactgccaaattatgaaggacgtgcctagctataaggaggcggaagacatcagcgagaagccagaaaaacctaagcaagaatttataagcgagggcgaaggtctgaaggagggcaaggatacaaagaaacagaaatccttggagccctcaatccctcctcctcggatcgcctcaggcgctagaggaaacgctgctaaggccctcctcgaaaacttcggctttgagctggttatacagtataacgagaacagacaaaaggtgcagaaaaagggtaaaagtggcgaaggtgagaacaccgacaaactggagtgtggcacatgtggtaagctgttttccaacgtgctcatcctcaaatcccatcaggaacatgttcatggtcaattcttcccctacgccgctctagaaaaatttgcaaggcagtacagggaagcgtacgacaaactatatccgatttcgccatcttcaccggagactccgcctccaccacccccacccccacccctgcccccagccccaccacaaccatccagcatgggccctgtcaagattccgaacactgtttccactccactgcaagcccctcctcctactcctcccccaccacctccaccacctcccccaccccctccaccccctcccccacccccaccatcagcgccaccccaagtgcagctgccagtgagcctggatctgccgctcttcccgtctatcatgatgcagcccgtccaacatcctgcactacctccgcagctggcgctgcagctccctcagatggacgcactcagtgctgacctgactcagctgtgtcaacagcagttgggtctggaccccaacttcctgcgccactcccaattcaaacgtcccaggacgagaatcaccgatgaccagctgaagatcctccgcgcatacttcgatatcaataatagtccctccgaggaacagattcaggagatggcagagaagtcaggactgtcgcagaaagtaataaaacactggttccggaatacgttgttcaaagagagacagaggaataaggactccccctataatttctcaaatccccctatcacagtactcgaggatatcagaattgatccacaaccaactagtctggaacattacaaatcagatgctagttttagcaaaaggtctagtcgcacccgctttactgattaccagctccgagtcttgcaggacttctttgacactaacgcctatcctaaggacgacgaaatcgagcagctgtctacagtgttgaacttgccgacccgggtcattgtggtgtggtttcagaacgcaagacaaaaggctagaaagagctacgaaaatcaggctgaaactaaagacaacgaaaagagggaactgacaaacgaaagatatatccgaaccagtaacatgcagtatcaatgcaagaagtgcaacgtcgtgtttccgagaattttcgatctgatcactcaccagaagaagcagtgctacaaggacgaggacgatgatgctcaggacgagtcccagactgaggattccatggatgccaccgaccaagtggtctacaaacactgtacagtttctggtcaaaccgatgcagcgaagaacgctgccgcaccggctgcgtccagcggatctgggacctccactcccctgattccgtcgcccaagcccgagcccgagaaaacatccccgaagcctgagtatccagcggagaagccaaaacagtccgacccatcacctccatcacagggtacgaaaccagcacttcccctcgcaagcacaagctcggaccctccccaggcttccactgcccagccgcagccgcagcctcagccccctaagcagccacagttgattggcaggccgccaagcgccagccagacaccagtgccttcatctcccctccagatttctatgacgagtcttcagaactctcttcccccacagttactgcagtatcaatgcgaccagtgcacagtggcttttcccaccctggagttgtggcaagagcaccagcacatgcacttccttgctgcacagaatcagtttctgcacagcccttttctggagaggcctatggacatgccatacatgatcttcgaccctaataacccattaatgactggacagctgttgggatctagcctgacgcagatgcctccacaggcctcttcatcccataccaccgcccctactactgttgcggcatccctcaagcggaaactcgacgataaggaagataacaattgctccgaaaaggagggcggtaactcaggcgaggatcagcaccgggacaaacgcttgcgcacaactataacaccggaacagcttgagatcctgtatgaaaagtatctgctggattccaatcccactcggaaaatgctcgatcacattgcacgggaggttggtttgaaaaagcgggtggtacaagtatggtttcagaacaccagggctcgtgaacggaaaggccagttccgggcagtgggaccagcacaatcccataagaggtgtcccttctgccgtgccttattcaaggcaaaaagtgccctggaaagccacatccgatcccgccactggaacgagggaaaacaggccggatatagtctgcccccaagccccttgattagtactgaggacgggggagaatctccacagaagtatatctacttcgattacccctcactccccctgactaagatagatctgtcatctgagaatgagcttgcgtctacagtgtcaacacccgtatcgaaaaccgccgagctgtcgcctaagaacctgctctctccgtcctccttcaaggccgaatgtagcgaggatgttgaaaatttgaatgctccccctgctgaggctgggtacgatcagaacaagactgacttcgacgaaaccagcagcatcaacaccgcaatatcagacgcgaccacaggagatgaggggaacacggagatggaaagcaccacaggcagctcaggggacgtgaagccagcgctctctcccaaagagcccaagaccctagatactctgcccaagccagctacgaccccaacaaccgaagtctgtgatgacaagttcttgttcagcctcacctcacccagcatacactttaatgacaaagacggagatcacgatcaaagcttctacattacggatgatccagatgacaatgccgaccggagcgaaacgtcgagcatcgctgaccctagcagtccaaacccgttcggctcatcaaacccctttaaaagtaaatctaacgatcgaccaggtcataaaagattccgcactcagatgagcaatctgcaattaaaagtccttaaagcttgcttcagtgactatagaacgccgaccatgcaggagtgcgagatgctcgggaatgaaatcggcttgcccaagcgggtggtgcaggtgtggtttcagaacgcgcgtgctaaggagaaaaagttcaagatcaacattgggaaaccttttatgatcaaccagggtggcaccgagggcaccaagcccgaatgtacactctgtggggtcaaatacagtgctagattatcgattcgcgaccatatcttttccaaacaacacatttcaaaggtccgggaaacggtcggctcacagctggacagggagaaggactatcttgcgcctactacagttcggcaactgatggcccaacaagaattggaccgcataaagaaggcatctgatgtgcttgggctcaccgtccagcagccgggaatgatggactccagcagtcttcatggcatttcactgccaacagcctatcccggtctgcccggactgccaccggtgctccttccaggaatgaatggcccatcatccctgcctggctttccccagaattctaacaccctcacgccaccaggcgcaggaatgctcggctttcctacttctgcgacctcatccccagccctttcactcagctctgcacctacaaagcctttgttacagacacccccacctcccccaccaccacccccaccccctcccagttcctccctgtcaggccagcaaactgagcagcagaacaaagaaagtgaaaagaagcagaccaaacctaacaaggtgaaaaagatcaaggaggaggagcttgaagctaccaagccagaaaagcaccccaaaaaagaggagaaaatctccagtgctctgagcgttcttgggaaagtggtaggagagactcacgtggatcccatacagctacaggctcttcaaaatgccatcgccggagaccctgcttcctttatcgggggacaatttttgccttatttcataccgggatttgccagttattttacgccgcagctgccgggtacagtgcaggggggttactttccacctgtgtgcggaatggagtccctcttcccctatggacccaccatgccacagacattggcaggcctctcccccggtgctttgcttcagcagtaccaacaataccagcagaatctgcaagagtcgctgcagaagcaacagaaacagcagcaggagcaacaacagaaacccgtgcaggcaaagactagcaaagttgaatcagaccagccgcagaattctaacgacgcctcggagaccaaggaggacaagtcaactgccacagagagtacaaaggaagagccacagctcgagagcaagtctgctgactttagcgacacatatgttgtcccctttgtgaagtatgaattcatatgccgtaaatgtcagatgatgtttaccgacgaggatgctgctgttaaccaccagaagagtttctgttactttgggcagcctttgatcgatcctcaggagacagtgctgcgtgttccggtctctaagtatcaatgtctagcatgcgacgttgctatcagcgggaacgaggccctcagccagcacttgcagtcttccttgcataaggaaaaaactattaagcaggcgatgcggaatgctaaggaacacgttcgcctcttaccccacagtgtatgttcccctaaccccaacaccacatcaacctcacagtcagctgccagctcaaataatacatatccacacctgagctgcttttctatgaaaagctggcccaacatcttgttccaggcttctgcgcgacgggcagcctcaccaccctcgtcaccccctagtctctcacttccatctactgtgacttcctctctttgctccacttcaggagtgcagacttctctccccacagagtcatgtagtgatgagtcagactctgagctttctcagaaactcgaggacttggataactctctggaagtcaaagccaagccagcatcgggcctggatggtaatttcaatagcattagaatggatatgttttctgtgtac

SEQ ID NO: 247227 - DNA, 468 bp, synthetic construct
  misc_feature 1..468: note = Description of Artificial Sequence: Synthetic coding sequence
  source 1..468: mol_type = other DNA
atggaaacctgcgatagtcctcctatttcaaggcaggagaatgggcagtccacgtcaaagctgtgcggcacgacacagttagataatgaggtcccagaaaaggtggccggtatggagcccgaccgcgaaaactcctctaccgatgacaaccttaagacggatgagcgcaagtctgaagctttgctggggttttctgtagaaaacgctgctgctactcaggtcactagtgcgaaggaaattccttgcaatgaatgtgccacctcttttccttcactgcagaaatacatggagcatcattgcccgaatgctcggttgcctgtgttgaaagacgacaatgagagtgaaatcagcgagctggaggattccgacgtggagaacctcacaggtgaaatagtctatcagcctgatgggtcagcctatattatcgaggattcaaaagagagcggccagaacgcgcagacagggtag

SEQ ID NO: 247228 - DNA, 10773 bp, synthetic construct
  misc_feature 1..10773: note = Description of Artificial Sequence: Synthetic coding sequence
  source 1..10773: mol_type = other DNA
atggaaacctgtgactcaccccctatctcacgtcaagagaatgggcagtccacctccaagctgtgcggcaccacccagctcgataacgaagttcctgagaaggtcgccggaatggaaccagatagggaaaattcttccaccgatgataacttgaagaccgatgagcgtaaaagcgaggctctactgggattctccgtggagaatgccgcagccacacaggtgacctccgcaaaggagattccctgtaacgaatgcgcgacctctttcccttctctacagaaatacatggagcatcattgtccgaacgcacgcttaccagtgctgaaggatgataatgaatccgagattagcgaactggaggactctgacgttgaaaacctcacaggtgagattgtgtatcagcctgacggcagtgcctatatcatcgaagacagcaaagaatccggccagaacgcccagacaggagccaacagtaaattgttctccaccgcaatgttcctggacagcttggcctcagcaggggagaagtctgatcagtctgctagcgcccctatgtcattttacccacagattatcaacacatttcacattgcatcatccttggggaagccgtttaccgctgaccaggccttccccaatacctctgcccttgcgggtgttggcccagtactccacagtttccgggtgtatgacctccgccataagcgcgagaaggattatctgacgagtgacggttccgcaaaaaactcctgtgtttcgaaggacgtgccaaacaacgtggatctgtctaagttcgacggatgtgtttcggatggaaagcgcaagcctgtgctgatgtgtttcctgtgtaagctgtcatttggctatattaggtcattcgtaactcacgctgtgcacgatcaccgtatgacacttaacgacgaagaacagaagttgctctccaacaaatgtgtctcagccataatccagggaatcggcaaagacaaagaacccctgatttctttcctcgagccaaagaaatccaccagcgtgtaccctcatttttccacaacaaacctcatcggccctgaccctacctttcgcggattgtggagcgcgttccacgtcgagaatggagattctctacccgctggctttgccttcctgaagggctctgccagcaccagttcatctgccgagcagccactggggatcacccaaatgcccaaagctgaggtcaatctaggaggtctttctagtctcgtcgtcaacactccaattacctctgtgagtctatcacattccagttctgagagcagcaaaatgagcgaatccaaagaccaggagaataattgcgaaagacccaaagaatcaaatgtcctgcaccccaatggagagtgtcctgtcaagtccgagcctacagagccaggtgacgaagacgaggaggacgcatattctaacgagctcgatgatgaggaggtgctcggcgaactcaccgattccatcgggaataaagactttcctttactgaatcagtccatttcaccattgtccagctctgttctcaaatttattgaaaagggaacctcttcatcttcagccactgtgtcagacgacacagaaaagaagaagcaaacagcggcagtgagagctagtggttccgttgcaagcaactacggcatttcaggcaaggacttcgcggatgcaagcgcgtcaaaggactcagctacagccgctcaccctagcgagatagccaggggcgatgaggatagctcagcaacgccacatcagcatggttttacaccatcgacacctggaacccctggacctggcggtgacggaagccccggatccggtattgaatgtcccaaatgtgacacagtgttagggtctagccggtcgctgggaggtcacatgacaatgatgcactcgcgaaactcttgtaaaacactgaagtgtccaaaatgtaattggcattataaatatcagcagacgcttgaggcacacatgaaagagaagcaccccgagcccggaggcagctgtgtgtattgcaagacaggacagccacatccacgtcttgcccgaggagagtcatacacatgcggatacaagcctttcagatgcgaggtgtgtaactactcaacaaccaccaaggggaatctcagcattcatatgcagagtgataagcacctgaacaatgttcagaatttgcagaatggcaatggcgagcaggtgtttgggcatagcgcacccgcaccgaacacctccttatctgggtgcggtacccctagtcctagtaagcctaagcaaaaaccgacatggcggtgtgaggtatgcgattacgagacaaatgtcgccaggaatctgaggatccacatgaccagcgagaaacatatgcacaatatgatgcttttgcagcagaacatgaaacagatacagcataacctgcatttgggtttggctccggcagaagctgaactgtatcaatattacctagctcagaacataggattaaccggcatgaaattagaaaaccctgccgatccgcaattgatgattaacccttttcagctcgacccagcaaccgccgcagccctggctccagggctgggcgagttgagcccctacatttcggatccagcgctcaagttgttccagtgtgcagtctgcaacaaatttacgtctgacagcctagaagctctttcagtccacgtgagttctgagcggtctcttcctgaggaggaatggcgcgcagttatcggggacatctaccagtgcaagctctgtaactataatactcagctgaaagctaatttccagctccactgtaaaaccgataagcacatgcagaagtaccagcttgtagcacatattaaggaaggcggaaagagcaacgaatggcggctcaaatgcatcgctatcgggaatccagtgcacctgaagtgcaatgcatgcgattactatacgaactcggtggataaactgaggcttcacacgacaaatcaccgccatgaagctgctttgaagttgtataaacatctccaaaagcaggagggagccgtgaatccggagagttgctactactactgcgccgtgtgtgactacaccaccaaggtcaagcttaatctggtgcagcatgtccggagtgtgaagcatcaacagacagaaggcttgcggaaattacagctgcaccagcagggcctcgctcctgaagaagacaacctgtccgagatattctttgttaaggactgtccaccaaatgagctggagacggcctcccttggtgccagaacttgcgacgatgatctgaccgagcaacagctccgcagtacctccgaggagcagtctgaagaggctgaaggagcgataaagcctaccgctgttgccgaggacgacgagaaggatactagcgaacgcgataactccgagggtaaaaactcaaacaaagatagcgggataattactcctgagaaggagctgaaggtgagcgtggctgggggtacccaaccgttgttacttgcaaaagaggaggatgttgccactaaaagatcaaaacccaccgaggacaataagttctgccacgagcagttctatcagtgcccatattgcaattacaactcccgggaccaaagccgcatccagatgcacgtgctgtctcagcactctgtgcagcccgtgatatgctgccctttgtgtcaggacgttctcagcaataagatgcacctacagcttcacttgacccaccttcacagtgttagccccgactgtgtggagaaactactcatgaccgtgcctgtccctgacgttatgatgcccaattcgatgctgcttcccgcagccgcatctgagaaatccgaacgcgacactcctgccgctgttactgccgaagggtctggaaagtatagtggagagtcacctatggacgacaaatccatggcagggctggaggattctaaagccaacgtggaagtgaagaacgaggagcaaaagcctacgaaggagcccctagaggtttcggaatggaataagaactcttccaaagatgtaaagatccccgataccttgcaggatcagctgaatgaacagcagaaacgccagcctttaagtgtgtcagaccgacacgtgtataagtatcggtgtaatcattgttccttagccttcaaaaccatgcagaagcttcagattcattctcaataccatgcgatccgagccgcaactatgtgtaatctatgtcaacgttccttccggacttttcaggcgctaaagaaacatctggaagcgggacatcctgagctttctgaggctgagttgcagcaactttatgcctcccttccggtgaacggcgaactgtgggcagaatccgagaccatgtcccaggacgatcacggactcgaacaggaaatggagagggagtatgaagtagaccacgaggggaaggcttcacccgtgggatctgacagctctagtattcctgacgacatgggttctgagcctaaacgcacccttccatttcgcaaaggccctaactttaccatggaaaaattcttggacccttctagaccttataagtgtactgtgtgcaaggaatcatttacccagaagaacattttattagtgcactacaattctgtctctcatctccacaaattaaagaaagtcctccaggaagcctcctcccctgtgccccaggagacgaattctaacactgacaacaagccgtacaagtgttctatttgcaatgttgcctactcccagtcgtccactctggagatccacatgcgctctgtgctgcaccagactaaggctagggcggctaaactcgagccgtcgggacatgtagctggaggccactccatcgcggctaatgtgaattcacctggacaggggatgctggactcaatgtcccttgccgctgtgaactcgaaggacacccacctcgacgctaaggagctgaataagaagcagaccccagatctgatctcagcccagcccgctcaccatccccctcagagccccgctcagatccagatgcaattgcagcacgagctccagcagcaggccgcattctttcagccccagttcctcaatcccgcttttctgccacattttccaatgactcccgaggctcttctgcagttccagcagccacagtttctgttcccattctacatccctggcactgagttcagtctgggccctgacctcggactgccagggtccgcaacttttggtatgcccggaatgaccgggatggccggatctttgctcgaggatttaaagcagcagattcagactcagcatcacgtgggacagactcagctccaaatccttcagcagcaggcgcaacagtatcaggccacacagcctcagcttcaaccacagaaacagcagcagcagcctccaccaccacagcagcaacagcagcagcaggccagcaagctcctaaagcaggaacagtctaatatcgtttctgctgattgtcaaattatgaaagacgtgccctcttacaaggaggctgaggatatctccgagaagccagaaaaacctaaacaggagttcatctccgagggggaggggttgaaagaaggcaaggacaccaagaagcaaaagagcctggaaccatccatccctcctccacgcatcgccagcggcgctcgtggtaatgctgcgaaggccctgctcgagaattttggcttcgagttagtgatccagtacaatgagaatcggcaaaaggttcagaagaagggaaaaagtggtgagggagaaaacactgacaaactcgaatgtggcacctgtgggaagctattctcaaacgttctgatccttaagtcccaccaggaacatgtgcatgggcagtttttcccgtatgccgctctggaaaagttcgcaaggcagtatcgcgaggcttatgataagttgtatcccatttctcccagctcccctgaaactcccccacctccaccccctcctccccctttgccaccggcacccccacagccaagctccatgggtccggtgaagattccgaacaccgtctcaacaccactgcaggcaccaccgcctactcccccacccccaccccctcctcctccaccacccccaccaccccctcctccacctccacctagcgcccctccccaggttcagcttcccgtttcactagacttgccactgttcccaagcattatgatgcagcctgttcagcaccccgctctgcccccacagctggccttgcagctcccccagatggatgctttaagcgccgatctcactcagttatgccagcagcagctgggactggaccctaattttttgcgccactcacagttcaagcgtccgagaacccggattactgatgaccagctgaagatactgcgggcttatttcgatattaataattccccttctgaggagcagatccaagagatggctgagaagtccggcttgtcccagaaagtgattaagcattggtttcgcaacaccctctttaaagagcgccaaaggaacaaagattcaccttataacttttccaatcctccaatcaccgtcctggaagacatcaggattgacccacagcccacttctctggaacactacaagagcgatgcctccttctctaaacggtcgtcaaggacacgattcacagactaccaactgagggtcctgcaggacttttttgatactaatgcgtaccctaaagacgatgagatagagcagcttagcacagtgcttaaccttcccacccgcgtgattgttgtgtggttccagaacgctagacagaaggccaggaagtcatacgagaaccaggccgagacaaaggacaacgagaagcgcgagttgacaaatgaacgctacattcgtacctctaacatgcaatatcagtgcaaaaagtgtaacgtcgtgtttcctcgaatatttgacctgattacacatcagaagaaacagtgttataaggacgaagacgatgacgcacaagatgaatcccaaactgaagattcgatggacgcaaccgatcaggtagtttacaagcattgcactgttagtggccagaccgacgccgctaagaatgccgctgcccctgctgcctcatctggcagcggtacgtcaactcccttgataccctctcccaaacccgagcctgaaaaaacatctcccaagcccgagtacccagccgagaagcctaaacaaagcgacccaagcccaccgtcccaggggacgaagccagcactgcctctggcttccacaagcagcgaccctccgcaggcatccacagcgcagccacagcctcagccgcagccccctaagcagcctcagctcatcggcagaccaccgagtgccagtcagacccccgttccttcctctccactacaaatctccatgactagccttcagaattcattgccccctcagctgctgcagtaccagtgcgaccagtgtacggtcgcattccctactctggagctttggcaggaacaccagcacatgcacttcctggccgctcagaaccagtttctccacagccctttcctggaacggcctatggatatgccctacatgatcttcgacccaaacaatcctttgatgacgggtcaactgctggggtcttcattgacccagatgccaccacaggctagcagtagccacaccaccgctcccacaacagtcgcggcttccttaaaacggaagctggatgataaagaagataacaattgttccgaaaaagaggggggaaactccggcgaagaccagcatcgggataagcgtctgcgcacgactataacgcccgaacaactggagatcctgtacgagaagtatcttttggactcaaatcccacaagaaaaatgcttgatcacatcgcgagggaagttggactgaagaagagagttgtgcaggtgtggtttcagaataccagagcacgtgaacgcaagggccagtttcgagccgtcggaccggcacagtctcacaaacgatgtcctttttgtagagcgttattcaaggctaaatcagcgttggaaagccatatcaggtcacggcactggaacgagggcaaacaggccggatatagtctgccaccttcaccactgatcagcaccgaagacggtggcgaatcgcctcagaagtacatttactttgattacccatccctaccactgacgaaaatcgacctgagctccgagaacgagctcgcgtcgaccgttagtacaccggtgagcaagacagccgagctctctcctaagaatctgctttctccttcttctttcaaggctgagtgttctgaggatgtggaaaatctcaatgcaccacctgccgaagccggatacgatcagaacaaaacagacttcgacgagaccagcagtattaatactgcaatcagcgacgcaactacgggggacgaaggaaacaccgagatggaaagtacgacaggtagctcaggcgacgtgaagcccgcactgtctccaaaagaaccgaaaacactagatactctgccgaaaccagctaccactccaaccaccgaggtttgcgacgacaaatttctgttttcgctgacttcaccctctattcattttaatgataaggatggtgatcacgaccagagcttttatatcacagacgacccagacgacaatgccgatcgcagcgagacttctagcatcgccgacccttcttccccgaaccctttcggatccagcaatccatttaaaagcaagtcaaacgacagaccaggccacaagcgattccgcacacagatgagcaatttacagttgaaagtgctcaaagcatgcttctccgattataggacccccacgatgcaagagtgtgaaatgttgggaaacgaaatagggctgccaaaacgggtggtgcaggtctggttccagaatgcccgagcgaaggaaaagaagttcaagattaacatcggtaaacccttcatgatcaatcagggtggcactgaaggcaccaaaccagaatgtaccctgtgtggagtgaaatactctgccagactcagcatacgcgaccacatcttcagcaagcagcatatttctaaagtaagggaaaccgtcggttcccagcttgatcgcgagaaggattacctggcaccaaccactgtgcggcagcttatggcacagcaagagctggacaggattaagaaggccagtgatgtgctgggactgactgttcagcagcctggcatgatggacagctctagtttacatggcatctctctcccgactgcttatcctggacttcctgggctccctccagttcttctgcccggaatgaacggcccttcttccctgcctggctttccccagaatagtaacactttgacgccaccaggcgctggaatgctaggctttccaacaagtgccacatcatcacctgcgctctccctgtcctctgcgcctacgaaacctctgttgcagacccccccacccccacctcctccccctccgcctccgccttccagcagtttatccggccagcaaactgagcagcagaacaaggagtcggagaagaagcagactaaaccaaacaaagtgaagaagattaaggaggaggagttagaggcgacgaagcccgagaaacatccaaaaaaggaagagaagatttcttccgcactgagcgtgttgggcaaggtcgtgggggaaacgcacgtcgaccctatccaattacaggccttgcaaaacgccattgccggagaccctgccagctttataggcggacagtttctgccctacttcatacctggctttgcatcatatttcaccccccagctccctggcacagtccagggcggttacttccctccagtgtgtggaatggaatctttgtttccatatggccctactatgccgcagacgctagcaggcctgtccccgggagcactcctgcaacagtaccagcagtatcaacagaatctgcaggagtccctgcagaagcagcagaaacagcaacaggaacagcaacagaaacctgtccaggctaagacttctaaagtcgaaagcgatcagccccaaaattccaacgacgcctccgagactaaggaagacaagtctaccgcaacagagagcacgaaggaggagcctcagctcgagtccaaatctgctgacttcagcgacacatacgtcgttccgtttgtgaagtacgagtttatctgccgcaaatgccagatgatgttcaccgatgaggacgcggcagtgaaccaccagaagagcttctgttattttgggcagcccctaatcgatcctcaagaaacagtcctcagggtgccagtgagcaaataccagtgtttagcctgcgacgtagcgatctctggaaacgaagctttgtcccagcatcttcagagttccttacataaggaaaaaacaatcaaacaggccatgaggaatgcaaaggagcacgtgcgtctacttccccacagcgtttgctccccaaacccgaacactacgtcgacttcacagtctgctgcatccagcaataatacttacccacacctctcctgctttagtatgaagagttggcctaacattttattccaggcctcggccagaagggccgcttctcctccctcctctcccccatccctgtccttgccgtcaaccgtcacatctagcctctgctccacaagtggggtacagactagcctgcccaccgagtcatgtagtgacgaaagtgacagcgaattgtcacaaaagctggaagatctggacaattcactagaggtaaaggccaaaccagcatcgggacttgacggcaattttaatagcatcagaatggatatgtttagtgtgtag

SEQ ID NO: 247229 - DNA, 468 bp, synthetic construct
  misc_feature 1..468: note = Description of Artificial Sequence: Synthetic coding sequence
  source 1..468: mol_type = other DNA
atggagacctgtgactccccacccatttcaagacaggagaatggccaaagcacatccaagctctgtggaacaacgcagctagacaacgaggttccagaaaaggtcgccggaatggagcccgatcgagaaaactcctccaccgatgacaatctgaagactgacgagaggaaatctgaagcactgcttggatttagtgtggaaaacgctgcggcaacccaggtgacaagtgctaaggagatcccttgtaatgaatgcgccacatccttcccctccttgcagaagtacatggagcatcattgccccaacgcaaggctgcccgtacttaaggacgacaacgagtccgaaatatcagaactagaagatagtgatgtagagaatctgacaggcgagatcgtgtaccagcccgacggaagcgcatacatcatagaagattcaaaagaaagtggacagaacgctcaaaccggatag

SEQ ID NO: 247230 - DNA, 10851 bp, synthetic construct
  misc_feature 1..10851: note = Description of Artificial Sequence: Synthetic coding sequence
  source 1..10851: mol_type = other DNA
atggaaacctgtgattctcctcctattagcagacaagagaacggtcaatccacatcaaagctgtgcgggacaacacagctggataatgaagtgcccgaaaaagtagcaggaatggaacccgaccgtgagaactctagtactgacgataatctcaagacggacgagaggaagtccgaggctctgttagggttcagtgtagaaaatgctgcagccactcaggtcacgtctgccaaagagataccttgtaacgaatgtgccacctcctttccttccttacagaaatacatggagcaccactgcccaaacgcacgcttaccagtgttaaaagacgacaatgagtcggaaatctcagagctggaagacagcgacgtcgaaaacttgacgggcgaaatagtgtaccaaccagatggcagtgcatatattatagaagactccaaagagtctggccaaaatgcccaaacgggtgcgaattctaaactgttctctaccgccatgtttctcgactccctggcttccgcaggcgagaaatcggatcagagcgcatccgcccctatgtcattctatccccagatcatcaacacattccacattgcttccagcctaggaaagccgttcactgcagatcaagccttccctaatacatctgctctggcgggagtgggccctgtactccactcgtttcgggtgtatgacctgagacacaagcgagagaaggactatctgactagcgacggcagtgctaagaactcatgtgttagcaaagatgtccccaataatgtcgacctgagcaagtttgacggttgcgtctccgacggtaagaggaaaccggtcctcatgtgcttcctttgtaaacttagcttcggctacatccgctcctttgttactcacgccgtccatgaccaccgtatgacactcaacgacgaagagcagaaactgctcagtaataagtgcgttagcgcaataatacaaggcatcggtaaagacaaagagcccctcatttcgtttctcgagccaaaaaaatccacgagcgtttatccccacttcagcaccacaaacctgattggcccagatcccacctttcgaggcctgtggtccgcttttcacgttgaaaacggggatagtctgcccgcaggctttgcctttctgaagggtagcgcttcaaccagctcttcagctgaacaaccattgggaatcactcagatgcctaaggctgaggtcaatctgggtggactcagcagtctggtggtcaacacccccataaccagcgtttctctcagccactccagtagcgagtcctcaaagatgagtgagtcaaaggatcaagaaaacaattgtgaacgcccaaaggagagcaacgtgctacacccaaatggtgaatgtccggtgaagagcgaaccaaccgaaccaggtgatgaggacgaagaagacgcttattccaatgagctggatgatgaagaggtcctgggtgaactgactgacagcataggtaataaagatttcccccttctgaatcaatctatctccccactgtcatcctcggtgttgaaattcatcgagaaaggtacctcaagcagctcagctaccgtgagtgatgataccgagaagaagaaacagactgccgctgtgcgggcatctggaagcgtggcatctaactacggaatatctggaaaagatttcgctgacgctagcgctagcaaggattctgcaacagcggctcatccctccgagatcgccaggggggatgaagacagttccgccactcctcaccagcacggcttcactccaagtacgccaggcacgcctgggcctggtggcgatggatcaccgggtagtggtatcgagtgtccgaagtgtgacaccgtgctgggcagttctcggagtttaggcggacacatgaccatgatgcactctagaaatagctgcaagaccctgaagtgcccaaagtgtaactggcactacaagtatcaacagacattagaggcccacatgaaagaaaaacatccagaaccaggcggtagctgtgtgtattgcaagacaggacagccacaccccagactggccagaggtgagagttatacctgcggctacaagcctttccgctgcgaggtgtgtaactattcgacgaccactaagggaaacctgagcatccacatgcaaagcgacaagcaccttaacaacgtccagaacctccagaacgggaacggcgagcaggtgttcgggcactctgccccagcccctaacacctctctgagcggttgtggtacacccagcccttctaagccaaagcagaagcccacctggcgctgcgaggtatgtgactatgagactaatgtcgccaggaatcttaggatacatatgacatctgagaagcatatgcataatatgatgctgttgcaacagaatatgaaacagattcaacacaatctgcatctgggactagccccagcagaagccgaattgtatcagtattatcttgcacagaacatcggcctgaccgggatgaaactggagaatcctgccgacccacagctgatgattaacccatttcaactcgacccggctactgcagctgccctggcacccggtctagtcaataatgagcttccccctgagataagactcgccagcgggcagctgatgggagacgacttgtcattactgactgccggagagctgagcccctacataagcgatcctgctctaaaactcttccagtgtgcagtgtgcaacaaattcacgagtgatagcttggaagctctgagtgtgcacgtctcttcagagcgctctttacccgaagaagaatggcgcgctgttatcggagatatctaccagtgcaaactgtgtaactataatacgcaattaaaggcaaatttccagctacattgtaagacagacaaacacatgcagaaatatcaactggtcgctcacataaaggagggcggtaaatccaacgagtggaggctgaagtgcatcgccatcgggaaccccgtacacttaaaatgcaatgcgtgcgattactacaccaacagtgtagataagctgcgcctacacactacaaatcatcggcacgaggccgcattgaagctgtataaacacctccaaaagcaggagggcgctgtcaaccccgagagttgctattattactgcgccgtgtgtgactatactaccaaagtgaaactgaatctggtccaacacgttcgtagcgtgaaacaccagcagaccgagggattgagaaagctacagcttcaccagcagggcttggcacccgaggaggataacctgtctgagatcttctttgttaaggattgtcctccgaatgaattggaaacagcgtccctcggcgctcgaacttgtgacgacgacttgaccgagcagcagctgaggtctacctccgaagagcaatctgaggaagctgagggagccatcaaacctactgccgttgccgaggatgatgaaaaggatacgtcggagagagacaattccgagggaaaaaattcgaataaggattctggcattatcacaccggaaaaggaactgaaggtctccgttgcgggaggcacccaaccgctgctgctcgctaaagaggaagatgtcgccactaagcggtctaagccaactgaagataataaattctgtcacgagcaattctaccagtgcccatactgcaattataactccagagaccagtctaggattcagatgcacgtactgagccagcattctgttcagcccgtaatttgttgcccattgtgtcaggatgtgctgtctaataagatgcatctgcagcttcatctgacacatcttcatagcgtctctccagattgcgtcgaaaaactgctcatgaccgttccggtacccgatgtcatgatgcctaattcaatgttgctgcctgccgctgcgagtgaaaaaagcgagagggatacccccgctgccgtgactgccgaaggctctgggaagtatagcggagaaagtccaatggacgacaagtctatggctggcctcgaggacagcaaggcgaatgtggaggttaaaaatgaggagcagaaaccaacaaaggaaccattggaggtgtctgaatggaacaaaaattctagcaaggacgtgaagataccagacacactacaggatcagctcaacgagcagcagaaacgccagcccttgagtgtctccgacagacatgtttataagtaccgctgtaaccactgctcattggcctttaaaaccatgcaaaagttgcagatccactctcagtatcatgcaatccgggctgccacaatgtgtaatctgtgccagagatcctttaggacgtttcaagctctgaaaaagcatctggaagctgggcatccagaacttagcgaagccgagcttcaacagttatacgcatcactgcccgtgaacggcgagttgtgggctgagagtgaaaccatgagtcaggacgaccacggcttggaacaagagatggagcgagagtatgaggttgatcacgaaggcaaggcatcacctgtcgggagtgactcttcctctattccagatgacatgggcagtgaacctaaacgaactctgcctttcagaaagggccctaacttcacgatggaaaaattccttgacccttctcgtccttataaatgcacagtgtgcaaagaaagctttacccagaagaacatcctgcttgtacattataattccgtttcacatcttcacaagctgaaaaaggtgcttcaagaagcatcttctcccgtgccccaggagactaacagcaacacagataacaaaccctataagtgttcaatctgcaatgtagcttattcgcaatcttcaactctcgagattcacatgcgctcagtcctgcaccaaaccaaggccagagcagctaaattagaaccctccgggcatgtagccggtgggcattccatagccgctaatgtaaactcccctgggcaggggatgctcgacagcatgagcctcgcagccgtgaattcgaaagatacacatttagacgccaaagaactgaacaagaaacaaacacctgacctgatttccgcacagccagcgcaccaccctccccaatcgcccgctcagatccagatgcagctccagcacgagctgcagcagcaggccgctttctttcagcctcagttcctgaatccagccttcctcccccacttccccatgacaccagaggcattgttgcaattccaacagccacaatttctgtttcccttctacatccccggaacagaattcagccttggtcctgacctcgggctccccggatcagcaacatttggcatgccgggaatgacaggaatggctggcagtctgctggaggacctgaaacaacagattcagactcaacatcatgtgggacagacacagttgcaaattctccaacagcaagcacagcagtatcaggcaactcaaccgcagctgcagccccagaagcagcagcaacaaccccctccgcctcaacagcagcagcagcagcaggcgagcaagttactgaagcaagaacagagtaatatcgtgtccgccgattgccaaattatgaaagacgtgccatcgtataaggaggccgaggacatctccgagaaaccggagaagcctaagcaggagtttatatctgaaggagaaggactcaaagagggcaaagacaccaagaagcagaagagtctcgaaccatccattccccctccaagaatagcttccggtgctcgcggaaacgctgccaaggctttactggaaaacttcggtttcgagctggttatacagtataacgagaatcgccaaaaggtgcagaaaaaaggcaaatccggcgagggcgaaaataccgacaagctggaatgcggtacgtgcggcaagctattttctaacgttcttattctcaagtcccaccaagagcacgtccatggtcaattctttccatatgctgctttagagaaattcgccaggcaatatcgggaagcttacgataaactgtaccctattagcccatcttcacctgagaccccacccccaccccctccaccccctccactaccacctgcccctccgcagcccagctctatggggccagtaaagattccgaacactgtgagcacaccgctgcaggcccctccccctacgcccccacctcctcccccaccaccccctccaccgcctccaccaccgccaccacccccaccatctgcgccacctcaggtgcaactgcccgtgtccctcgatttgccactgtttccatcaataatgatgcagccagttcaacacccggctcttccaccccagctggctcttcagttgccccagatggatgctctgtccgctgacctgacccaactgtgtcagcagcagctcggtctggatcccaactttctgcggcattcacagtttaaaagacctcggaccagaattacggatgaccagctgaaaatcctccgggcatactttgatattaataattcacctagtgaagagcagattcaagagatggcggaaaagtccggcctgagccagaaagtcattaagcattggtttcgtaataccttgtttaaggagcgccagagaaacaaggattctccctataatttcagcaatccccctattacagtcctcgaagatattcgtatagatccccagcctacatcacttgagcactacaagtcagacgcatccttctctaaacgcagctcgcggacgcgtttcaccgattaccagttaagagtcttgcaggatttttttgacacaaatgcctaccccaaagatgatgaaattgagcagttatccactgtgctcaacctgccgacccgggtgatcgtggtttggtttcagaacgctcggcaaaaagctcgtaagagctacgagaaccaggcagagactaaggacaacgagaaaagggagctgaccaatgagagatacattcgtaccagcaatatgcagtatcaatgtaagaagtgcaacgttgtcttcccaaggatctttgatctaatcacacaccaaaagaagcagtgttataaggacgaggatgacgatgcccaggacgaatctcagaccgaggactccatggacgccacagaccaggtggtttataaacattgtaccgtgtccggccagacagacgctgctaagaacgcagctgctccagccgcatcgagcgggtctggcacttccactcccttgatcccgtccccaaagcccgagcctgaaaaaacttctccgaagcccgaatatccggcagagaagccgaagcagtctgaccccagtccaccttctcagggaactaagccggctttgccgctggccagcacttcaagcgatccaccgcaggcaagtactgcccagcctcaaccacagccacagccccctaagcaacctcagctaattgggagacccccatcggccagtcaaactcctgttccgagctctccactccaaatctccatgacctccttgcaaaattccctcccaccacagctcttacagtatcaatgcgatcagtgcacggtagctttcccaacgctcgagctttggcaggagcaccaacacatgcactttctggccgctcaaaaccagtttctccatagtccttttttggagagaccgatggacatgccgtatatgatttttgaccccaacaatccacttatgactggccagctgctgggaagtagtctcacccagatgcccccacaggcttcatctagccatacaacggccccaactaccgtggcggcttcgctgaaacggaaacttgacgacaaagaagacaacaactgttccgaaaaggaggggggaaacagcggcgaagatcagcacagggataagaggcttaggactactattactccagagcagctggagattctgtacgaaaagtacctgctggacagcaaccctaccagaaagatgctcgaccacatagcacgggaggtcggtctgaaaaaaagggtggtgcaggtttggtttcagaacacacgcgcaagagaacggaagggacaatttagagcggtcggaccagcccagtctcataaacggtgcccgttttgtcgcgcactgtttaaagctaagtccgcccttgaaagccatatcagaagccgacattggaatgaaggtaaacaggccggatattctctcccaccatcccccctgattagtacggaggatggaggtgaatctccccagaaatacatttacttcgattatcccagccttccacttacaaagatcgatctgagtagtgagaacgaacttgcgtctacggtgagtacacccgtttccaaaaccgctgagctctccccaaagaatctcctcagccctagttctttcaaggccgaatgttctgaggacgtcgagaacctgaacgctccccctgctgaggctggatatgaccaaaataagaccgatttcgacgaaactagctctatcaacaccgctattagcgacgccacaaccggtgatgaaggcaataccgaaatggagagcacaactggaagtagtggggacgtgaaaccagcgctcagccccaaggagccaaaaactttagacacactccccaagccagcaacgactccaacaaccgaggtttgtgatgataaatttctgtttagtctcacaagtccgagtattcattttaatgataaggacggtgaccacgaccaatctttctacatcactgatgacccagatgataacgccgaccggagcgaaacctctagtatcgccgatccaagctccccaaatccctttgggtctagtaaccctttcaagagtaagagtaacgatcggccaggacataaacgctttaggacacagatgtcaaatcttcagttaaaggtgcttaaggcctgcttttccgactatagaactcctaccatgcaagagtgtgaaatgttgggaaatgaaatcgggcttcccaaacgagtggttcaggtttggttccagaacgcgagagccaaggaaaagaaatttaaaattaacattgggaagccatttatgattaaccagggcggtactgagggcacaaaacccgagtgcactctgtgtggcgtcaaatacagcgccagattgagtatcagagatcacatattctctaaacagcacatcagcaaggttcgagagacagtgggaagtcagttggaccgagagaaggactatctggccccaactaccgttaggcagcttatggcgcaacaggaactcgacagaattaagaaggcgtctgacgtactcggtctcacagtgcagcagccaggaatgatggatagctcctccttgcatggtatttctctgcctactgcctatcctggtctacccggactcccacccgtgctccttcccggaatgaatggtccatcatcacttccagggttcccacagaacagtaacacgctgactccaccaggagcagggatgctgggtttcccgacttccgcaacgagttctccagcccttagcctctcatccgctccgaccaagccacttttgcagaccccacccccaccaccacccccacctcctccacctccctcttctagcctgtcagggcagcaaacagaacaacagaacaaggagagcgagaagaagcaaacaaaacccaacaaggtgaaaaaaatcaaagaagaggaactcgaagcgaccaagccagaaaagcatcccaaaaaagaggagaagatctcaagcgctctgtccgtgttaggcaaggttgtgggggagacccatgtagatccgattcaactgcaagcactgcagaatgctatcgccggtgaccccgcatcttttatagggggacagtttctgccctacttcatccctggctttgccagctactttaccccacagctcccaggcaccgtccagggagggtattttcctccagtatgtggtatggaatcgcttttcccatacggaccaaccatgccccagacactggcaggccttagtcccggagcgctgcttcaacaataccagcagtaccagcaaaacctacaggaaagcctacagaagcagcaaaagcagcaacaggaacagcagcaaaaacccgtgcaggccaagacctccaaggtggagtcagaccagccacagaactctaatgatgcctcggagaccaaagaggataagtccactgccacagagtccactaaagaggaaccgcagctggaaagcaaatctgccgatttctcagatacttacgtggtcccatttgtcaaatatgagtttatttgtaggaaatgtcaaatgatgtttacagatgaagacgccgcagtcaaccaccagaagagtttctgttatttcggccagccccttatagatccgcaagaaacggttctgagggtgccagtctctaaataccagtgcctggcttgtgatgtggccatctcaggcaacgaagcgctgtcccagcatctgcagagctccctgcataaagagaagactattaaacaggcaatgcggaatgcaaaggagcacgtaagattgctaccccacagcgtttgcagtcccaatcccaacaccacaagtacgtctcaatccgccgcaagttccaataatacttacccccatctaagctgtttcagcatgaagtcatggccaaatatcctgtttcaggcatctgccaggagagccgcaagtcctccaagttcccctccaagtctgtcattgcccagtacggtcacatccagtctttgctctacatccggggtgcagacatccctgcctaccgaaagctgcagcgatgagagtgactccgaattgtctcagaaactggaggacttggataactcactcgaggtgaaggccaaacccgcaagcggcctcgatgggaatttcaattcaatccggatggacatgttcagcgtgtac

SEQ ID NO: 247231 - DNA, 423 bp, synthetic construct
  misc_feature 1..423: note = Description of Artificial Sequence: Synthetic coding sequence
  source 1..423: mol_type = other DNA
atggagacatgtgattctccacctatctctaggcaagagaatgggcaaagcacatcaaagctctgtgggacaactcaactggacaacgaagtgcccgagaaggtggctggaatggagcctgaccgggagaactcttctaccgacgataatctcaagaccgacgagaggaaaagtgaggcccttctgggctttagtgtggaaaatgccgcagccacccaagtgacttccgcaaaggaaatcccttgtaacgaatgtgccacgtccttccccagcttgcagaagtacatggaacaccattgcccgaacgcccgattgcctgtccttaaagacgacaacgaatctgagatcagtgagctcgaagacagcgacgtggagaacctaacaggagagatcgtgtaccaacctgatgggagcgcctactag

SEQ ID NO: 247232 - DNA, 306 bp, synthetic construct
  misc_feature 1..306: note = Description of Artificial Sequence: Synthetic coding sequence
  source 1..306: mol_type = other DNA
atggaaacctgcgatagtcccccaatttctcgacaggaaaacggacagtcaacctctaaactgtgcggcacgacgcagttggacaacgaagtacccgagaaggtcgcaggcatggaaccagaccgcgagaacagctccacggacgataaccttaaaaccgatgagcggaagtctgaggctcttcttggcttttccgtcgagaatgctgcagccactcaggtcactagcgccaaggagattccatgcaacgagtgtgctacttccttcccctctttgcagaaatacatggagcatcattgcccatag

SEQ ID NO: 247233 - DNA, 2253 bp, synthetic construct
  misc_feature 1..2253: note = Description of Artificial Sequence: Synthetic coding sequence
  source 1..2253: mol_type = other DNA
atggagtttgtctcgggttacagagatgaatttcttgactttacagccttgctctttggctggttcaggaaattcgtggctgagcgcggagcggtgggcacaagcctggagggacgctgcagacagttagaggcacagatccgaaggctgcctcaggatcctgcgctgtgggtactccacgttcttcccaatcacagcgtaggtatctccctaggacaaggtgcggaacctggacccggtcccggactcggcacagcttggctcctgggtgacaatccgcctttgcacctgcgggacctttcaccttacatcagttttgtgtctctcgaggatggggaagagggggaggaagaggaagaagaggacgaggaggaggagaagcgagaggacggcggagcgggatccaccgagaaggtcgaaccagaggaggaccgagagttagctcccacatctcgggagtctccccaagagaccaatcccccaggggaatctgaggaggccgctagagaggccggtgggggaaaggacggctgtcgtgaggatcgtgtggagaatgaaacgagaccacagaagcggaagggccagagaagcgaggcggcaccgctgcatgtgtcttgtctgctccttgttacagacgagcacggtacaattctcggcatcgacctgctggtagacggtgctcagggaacagcctcttggggatctgggaccaaggacctcgcgccttgggcctatgccctgttgtgtcactctatggcctgccctatgggctcgggcgacccacgaaaacctcggcagctgacagtgggagacgcacggctccaccgggagctggagagcctcgtgccaaggcttggtgtgaaactcgccaaaactccaatgcggacctggggccctagaccaggcttcacttttgcaagtctcagagcacgtacctgtcacgtctgccatcggcattcatttgaggcgaaactgaccccctgtccgcagtgttcggcggtgttgtattgcggagaggcctgtttgagggctgactggcagaggtgtcctgatgatgtttcacacagattttggtgccccagactggccgcattcatggagcgggcaggcgagttggcgaccctgcctttcacctataccgcggaagttactagcgaaacgttcaacaaggaagcttttctcgcgagtcgcggtctcacaaggggttattggactcagctgagcatgctcattccgggacccggatttagccgacaccctagaggtaatactcccagtctctccctgcttagaggcggagatccataccaacttcttcagggcgacggaacggccctgatgcccccagtgcctccccatccaccacggggagtctttggaagctggcaggactactatacatggaggggcctctcactcgatagcccgattgccgtccttctgacctaccctctcaccgtatattatgtcatcacacatttagttccacagtctttccctgaactgaacattcagaacaaacagtccctgaaaatacacgttgttgaagctggaaaagaattcgacctggtgatggtattttgggaactcctggtgctgctgccccatgtggccctggaactgcaatttgtcggcgacggtctgccacctgagagtgacgagcaacacttcaccttgcagcgagactcgctggaggtttcagtccgccctggatcagggatctccgcaagaccatcgagcgggacaaaggagaaaggcggtcggagagaccttcagatcaaagttagcgccagaccctaccacttgtttcaagggccaaagcccgatctcgtgatcgcgtccccttcatctctatcagctggcttcaacagtgggttcgcattgaaagatacttggctccggagcctgcctagactgcagagcctgcgcgtaccggcttttttcaccgagtcctctgagtacagctgtgtgatggacggacaaacaatggccgtggcgaccgggggtggtacctctccgcctcagccaaacccatttagatcccctttcagactaagggcagcggacaactgcatgagctggtattgtaatgccttcatcttccacctggtgtacaaacctgcccagggcagcggggcacgtcccgctcccggaccccctccaccctcacccaccccaagcgcccctcccgctcctacccggaggcggagaggagaaaagaagcctgggaggggcgcacgcagacggaaatag

SEQ ID NO: 247234 - DNA, 2112 bp, synthetic construct
  misc_feature 1..2112: note = Description of Artificial Sequence: Synthetic coding sequence
  source 1..2112: mol_type = other DNA
atggagttcgtgtctggctatcgggatgaattcctggactttacagccctgctctttgggtggttcaggaagttcgttgccgaacgaggcgctgtcggaacctcccttgagggaaggtgtcggcagctggaggcgcagatcagacggcttccgcaggatccagcgttgtgggtccttcatgtgctcccgaatcacagcgtcggcattagtctgggtcaaggggcagaaccaggcccaggcccaggactcggcactgcttggttgctgggcgacaatccacctctgcatctcagggatttaagcccgtacatttccttcgtcagtctggaggatggcgaggagggagaggaggaggaggaggaggatgaggaagaggaaaaaagagaagacgggggtgccggatctacagaaaaggttgagccagaggaagaccgcgaactggcaccgacctcgagagaatctccacaagagactaatcccccaggagagtccgaggaggccgctcgtgaagccggaggcggaaaagatggctgtagagaggatagggtggagaacgagacgcgccctcaaaagcggaaaggccagcggagcgaagctgcccctctccacgttagctgtctcctcctggtgaccgatgagcatggaacaatactgggcatcgacctcttagtggatggtgcacagggcacggcatcttggggctccggcaccaaagaccttgcgccttgggcctacgctctcctctgccacagtatggcatgccctatgggctcaggggaccccaggaagcctcggcagctgacagttggggacgcgagactccatagagaactggaatcgctggtcccccgattaggagtgaagctggcaaaaacccctatgcggacttggggccctaggccagggttcacattcgcatctcttcgggctcgaacttgccatgtatgtcacaggcattcctttgaagcaaagctgacaccatgccctcagtgcagcgcagttctgtattgcggggaggcctgtcttcgcgcagattggcagagatgccccgacgacgtatctcaccgcttttggtgcccacgcctcgcggcttttatggagcgagcgggagagctcgccactcttcccttcacctacaccgccgaggtaaccagcgagacttttaataaagaagcattcctggcgagccgaggtttgacacgaggctactggacacagctctccatgttgattccaggccctggcttctcccgacacccccgtggtaacactcccagtctgtcactcctccgaggcggagatccttatcaactgctgcagggtgacggcaccgctctcatgcctcccgtccccccacaccctcccagaggcgtttttgtgcccgaattgaacatccagaacaagcagtccttgaagatccacgtagtcgaggctgggaaggaattcgatctcgtgatggtgttctgggagctgttggttttgcttccacacgttgctctcgagctccagttcgtcggggatggactgccccctgaaagtgacgagcagcactttaccctgcagcgggattccctggaggtgtccgtccgccctggaagcggtatctctgccaggcccagtagcggtaccaaagagaaaggcggaagacgggatctccagattaaggttagcgctaggccttaccacctgtttcagggacccaagccggatctcgtgattggctttaactctggcttcgccctcaaggacacatggctgcgttcgctgcctcgcttgcagagtttgcgcgtccctgcgttcttcaccgagtcctcggaatattcgtgtgtgatggatggtcaaaccatggccgttgcaacaggaggtggaacctcacctcctcagcctaacccctttaggtcacccttcagactccgcgcagcggacaattgtatgtcatggtattgtaatgccttcatcttccacctcgtatacaagccggctcaggggtccggagccagacctgctccagggcctccgcctccttcacccactccctcagccccacctgcccctacacggagacggaggggtgagaaaaagcctggtcggggagctcgcaggcggaaatag

SEQ ID NO: 247235 - DNA, 1722 bp, synthetic construct
  misc_feature 1..1722: note = Description of Artificial Sequence: Synthetic coding sequence
  source 1..1722: mol_type = other DNA
atggacgccaagagccttaccgcttggtctagaacactggtcacatttaaagatgtgtttgttgacttcacccgcgaggaatggaaactacttgatactgcacagcagatcgtttacagaaacgtgatgttggaaaactacaagaaccttgtcagtcttggctaccagctgaccaagcccgacgtgatcctgaggcttgaaaagggagaagaaccatggttggtagagcgggagatacaccaggagacgcaccccgactcagaaacagcatttgaaatcaaatcctccgtgagttccagaagtattttcaaggataagcagtcttgcgacatcaagatggagggcatggccagaaatgacctgtggtatttaagcctggaggaagtatggaaatgccgagatcagctggacaaataccaggaaaacccagagcggcacctgcggcaggtcgcatttactcaaaaaaaggtcctcactcaagagcgggtcagcgaaagcgggaaatacggcggaaattgtctgctaccagcccaactagtcctgcgggaatactttcataagcgggatagccacaccaagagcctgaagcacgaccttgtcttaaacgggcaccaggactcatgcgcatcaaactccaacgaatgtggtcaaacattctgccaaaatattcatttgattcagtttgccagaacacacaccggagataaatcttacaagtgcccggacaatgataacagcctgacccacggaagcagtctggggataagcaaggggattcatcgggaaaagccctatgagtgcaaggagtgcggcaaattcttttcgtggcggagcaacttgacacgccaccagctcattcataccggtgaaaagccatatgagtgtaaagagtgtggcaaatcctttagccgctcatctcatcttataggacatcagaaaacccacactggagaggagccatatgaatgtaaagaatgcggcaaatccttctcctggttctctcacttggtgacccatcagagaactcacaccggagacaagttgtacacgtgcaaccagtgtggcaagagtttcgtgcactcctctagactgatcaggcaccagcgcacccatacaggcgaaaaaccttatgaatgtccagagtgcggcaagtcattccgacagagcacccacctgatcttgcatcagagaactcatgtgcgggtgcgaccctatgagtgcaatgaatgcgggaaaagctactctcagcgcagtcacctggtcgtgcatcaccggatacacacgggcctgaaaccattcgagtgcaaggattgtggaaagtgtttttcacggtccagccacctttattcccaccagcggacccacacaggagaaaaaccctacgagtgtcatgactgcggaaagagttttagccaatccagcgccctgatcgttcaccaacggattcatacaggggaaaagccctacgaatgttgccagtgcgggaaagcttttattcggaaaaacgatttgattaagcaccagcgcattcatgttggtgaggagacatataaatgcaatcaatgcggaatcattttctctcagaattcgccctttattgttcatcagattgcccacacgggcgaacaattcctgacttgtaaccagtgtggcacggccctggtgaatacaagtaatcttattgggtaccagactaatcacataagggaaaacgcctactag

SEQ ID NO: 247236 - DNA, 1722 bp, synthetic construct
  misc_feature 1..1722: note = Description of Artificial Sequence: Synthetic coding sequence
  source 1..1722: mol_type = other DNA
atggacgctaaatccctaacagcttggagccgcacccttgtgacctttaaagatgtgtttgtcgattttacaagagaagagtggaaactccttgacactgctcaacagattgtgtaccgaaacgttatgttagaaaattataaaaacttggtgtcacttggctatcagctaaccaaacccgatgtaattttgcgccttgagaagggggaagaaccttggctggtagaacgcgaaatccatcaagaaacccatccagatagcgaaacagctttcgagattaagtcttcggtctcatctcgatcgatctttaaagataagcagtcctgtgacattaagatggagggaatggccagaaatgacctttggtatttatctctggaggaggtgtggaagtgtcgggaccaactggacaagtaccaggaaaatccagagcgacacttgagacaggttgctttcactcagaaaaaggtgcttacgcaggaaagggtatccgaatccggaaaatacggcggaaactgtctcttgcccgcacagctggtcctccgggaatattttcacaaaagggatagccacactaagtcactgaagcatgacttggttctcaacgggcatcaggactcctgtgcatctaactctaatgaatgcggccagacgttctgccagaacatccacctgattcaatttgctcgcactcacacaggagataaatcctataagtgtcccgataatgataactctctgacccatggatcatcgcttgggatctctaaaggcatacacagggaaaagccttacgagtgtaaagagtgcggtaaattcttcagctggcgtagtaacttgacacgccatcagttgatccacaccggcgaaaaaccctacgaatgcaaagagtgcggcaagagttttagtcggtctagccacctcattggtcatcagaaaacccacacaggagaggaaccatacgagtgcaaggaatgcggcaagagcttcagctggttttcgcacctagtgacccatcaaaggacgcatacgggggacaagctgtatacttgcaatcagtgtggaaaatctttcgttcacagctccagactcattagacaccagcggactcacaccggcgagaagccttacgaatgtcccgagtgtggcaaaagttttaggcagtcaactcacctcatcttacaccagagaacgcacgtgcgcgttaggccctacgaatgtaacgagtgcggcaaatcctattctcagcgatcacacttggtagtccatcaccgaattcatactggtctgaagccatttgagtgtaaagactgcggtaaatgtttctctagaagctcacacttgtattcccaccagaggacacataccggcgaaaagccttacgaatgtcacgactgcggtaagagcttttctcagtccagtgccttaattgtgcaccagcggatccacacgggcgaaaagccttacgagtgctgccaatgtggtaaggcattcattcgcaaaaatgaccttattaaacaccagcgcatccacgtgggggaagagacatataaatgcaatcaatgcgggattatcttcagccaaaatagccccttcatagtgcatcaaatcgcccacactggtgagcagtttctcacttgcaaccagtgcggcaccgccctggttaacacttccaacttgatcgggtatcagaccaaccacattagggaaaatgcatattag

SEQ ID NO: 247237 - DNA, 219 bp, synthetic construct
  misc_feature 1..219: note = Description of Artificial Sequence: Synthetic coding sequence
  source 1..219: mol_type = other DNA
atggatgcaaaaagcttaactgcctggagcagaacgttggtcacattcaaggatgtgtttgtggacttcacaagggaagagtggaaactccttgacaccgcccagcagattgtctatcggaacgtgatgctggaaaattataagaatctggtctccctggggtatcagttgaccaagccagacgtaatccttcgactcgaaaaaggagaagagccgtag

SEQ ID NO: 247238 - DNA, 132 bp, synthetic construct
  misc_feature 1..132: note = Description of Artificial Sequence: Synthetic coding sequence
  source 1..132: mol_type = other DNA
atggacgccaagagcctgaccgcttggagccgtaccctagtcacctttaaggacgtgtttgtggattttaccagggaagaatggaagctcctcgatacagcgcagcagattgtgtaccggaacgttatgtag

SEQ ID NO: 247239 - DNA, 144 bp, synthetic construct
  misc_feature 1..144: note = Description of Artificial Sequence: Synthetic coding sequence
  source 1..144: mol_type = other DNA
atggacgccaaaagtctaacagcctggtcccgaacccttgtaacattcaaggacgtgttcgtcgacttcacccgggaggagtggaaactcctcgacactgcacagcagatcgtttatagaaatgtgatgctagagaactactag

SEQ ID NO: 247240 - DNA, 1629 bp, synthetic construct
  misc_feature 1..1629: note = Description of Artificial Sequence: Synthetic coding sequence
  source 1..1629: mol_type = other DNA
atggatgatccgcgatacgggatgtgccctttgaagggcgcaagcggctgcccgggtgctgaacgcagcctcttagttcagtcatatttcgagaagggaccactcacattccgggatgtagccatagagtttagtctcgaagagtggcaatgcctggactcagcccagcagggactgtaccgaaaggttatgttggaaaactacaggaaccttgtgtttctggcgggaatagcactgaccaagccagatctgatcacctgtctggaacagggcaaggagccctggaacatcaaacggcatgaaatggttgctaaaccacctgtgatctgctcccactttccccaggacctgtgggctgaacaggacattaaggacagcttccaggaggccattcttaagaagtacggaaaatatggccacgataacctgcagctgcagaagggatgtaagtcagttgacgagtgtaaagttcacaaggagcacgataataagctaaatcagtgtctgatcaccacacagagcaacatttttcagtgcgacccctctgccaaggtgtttcatacattttccaattccaacagacataaaatccggcatactcggaaaaagccattcaaatgcaagaagtgcgaaaagtcattctgtatgctcctgcatctgacccagcacaagaggttccacatcaccgagaattcctaccagtgtaaagattgtggtaaggcttttaactggtttagcacccttacaacacataggcgcatccacaccggcgaaaagccctacaagtgtgaagaatgtggcaaggcttttaatcgatcttctcacctcactacccacaagatcattcacaccggggaaaagccctacagatgtgaagagtgtgggaaagcctttaacagaagcagtcacttgactacacataagagaatccacacgggggtgaaaccatataagtgcacagaatgtggcaaggccttcaatagatctagccatctgacaacacataggattattcacactggggaaaaaccctataagtgtgaagagtgtggaaaagcattcaaccagtcttccaccctgacaacacataaaattacgcatgctggcgaaaaaccttacaagtgtgaagagtgcgggaaggctttctaccgattctcctacctaactaagcacaaaacaagtcacacaggcgaaaagttctacaagtgtgaggagtgcggcaaaggctttaactggtctagcgcccttacaaagcataagagaatccatacgggggaaaagccgtataagtgtgaagaatgcggaaaggcctttaatgagtcttccaatctcacgacccacaagatgatccatacaggcgaaaagccatataagtgcgatgagtgtggcaaggcctttaaccggagcagccaacttaccgcccataaaatgatccatacaggcgaaaaaccgtacaagtgtgaggaatgcggaaaggcttttaaccgctcttcaaccctgacaaagcacaaaataacacacacaggggagaagagctacaagtgggaagagtgcggcaaagacttcaaccagtcattgagcctgattaagcagaataactcgtactggcgcgagaccctgcagatgtag

SEQ ID NO: 247241 - DNA, 1311 bp, synthetic construct
  misc_feature 1..1311: note = Description of Artificial Sequence: Synthetic coding sequence
  source 1..1311: mol_type = other DNA
atggactccgtggcctttgaggacgtggcagtgaactttacacaggaggaatgggccttgcttagtccatcacaaaaaaacctctatagagatgtgactctcgaaacctttcgaaacctggcgtctgtgggcatccaatggaaggatcaagacatcgagaatttatatcagaatctggggatcaaactccgctccctggtcgagaggttgtgtggtaggaaagaggggaatgaacatcgtgagacattttctcagattcccgactgccacttgaataaaaagagccagacgggcgtaaaaccatgtaaatgtagtgtgtgtggcaaggtttttctgcggcacagctttctcgaccgtcacatgcgcgcacacgccggacataagcgatccgaatgcgggggagagtggcgggagacgccacggaagcagaagcagcacggcaaggcctcaatctctcctagctccggggcacgccgaaccgttacaccaactcggaagcggccttatgaatgcaaagtctgcggaaaggcattcaattctcctaacctcttccagatccaccagagaacccacactggaaaaaggagctacaagtgtcgcgagatcgtgagggcattcaccgtatcgagctttttccgaaaacacggtaagatgcacacaggggagaagagatacgagtgcaagtactgtggtaagcctattgattatcccagtctctttcagatccacgttcgtacccatactggcgagaagccttacaaatgcaagcagtgtggcaaggcttttatcagtgcagggtatttgcgcacccacgaaattcggtctcatgcattggaaaagagccatcagtgccaagagtgtggaaagaaattgtcctgttcttccagccttcatcggcatgaacggacccactctgggggaaaattatatgaatgccagaagtgtgcgaaggtatttcggtgtcctacttccctccaggctcatgagcgcgcacatactggagagcggccatacgaatgcaacaagtgcgggaaaacattcaattacccatcatgtttcagaaggcataagaagacccacagtggcgagaagccatacgagtgcacacgctgcggtaaggcctttggttggtgcagtagcctgagaaggcacgaaatgactcacacgggcgagaagcccttcgactgtaaacaatgtggtaaagtctttactttctctaattacctgcgcctgcacgagcgtacccacttagcgggacggtcccagtgctttggacgccgtcagggggaccatttgtcccctggcgtctag

SEQ ID NO: 247242 - DNA, 1311 bp, synthetic construct
  misc_feature 1..1311: note = Description of Artificial Sequence: Synthetic coding sequence
  source 1..1311: mol_type = other DNA
atggactcggtggcttttgaagacgtggccgtcaacttcacacaagaggaatgggccctgctttcaccttctcagaagaatctatacagagacgtcacccttgagacatttcggaatttagccagtgttggtattcaatggaaggaccaggatatcgagaacctgtaccagaatttgggaataaaattgaggagcctggtggaacggctctgcggcagaaaggagggtaatgaacatagggaaacattttctcaaattcctgattgtcatctgaacaagaagtcgcaaacgggcgtgaagccctgtaagtgttctgtttgtggaaaggtgttcttacgtcattccttcctggaccgccatatgagagctcacgcaggtcacaaaaggtctgagtgtgggggagagtggagagaaacgcctagaaagcagaagcagcatggtaaagcttccatctccccatcctcaggagcgagacgcaccgtcactcccaccagaaagaggccgtatgagtgcaaggtttgtgggaaggcgttcaatagccccaatctgttccagatacatcagagaactcataccggaaagcgcagttacaagtgtcgcgaaattgtccgcgcattcactgtatcctccttcttcagaaagcacgggaagatgcacacgggtgaaaagcgctacgagtgtaaatactgtggaaaaccgatcgactacccaagcttattccaaattcatgtacgtacacacaccggagaaaagccttataaatgcaaacagtgcggcaaggcgtttatcagtgcagggtacttgagaactcacgaaatcagaagccatgccctcgagaaatcacaccagtgtcaggagtgtgggaaaaagctgtcctgttcttcatccctgcacagacatgagcgcacccactcgggaggtaagctgtacgaatgccagaaatgcgctaaagtgttccgctgtcccactagtcttcaggcccatgagcgcgctcacacaggtgaacgcccttatgagtgtaataaatgcggcaaaacattcaattaccccagctgctttaggcgccacaagaaaacacattcaggcgaaaagccttacgagtgtacaaggtgcggaaaggccttcgggtggtgttcctcactcaggaggcatgagatgacccacactggtgaaaaacctttcgattgtaagcaatgtggcaaggtatttactttctctaattacctccggttgcacgaaaggacccatcttgccggtcgatcccagtgttttggaaggcgccagggcgaccacctgtcacctggcgtatag

SEQ ID NO: 247243 - DNA, 951 bp, synthetic construct
  misc_feature 1..951: note = Description of Artificial Sequence: Synthetic coding sequence
  source 1..951: mol_type = other DNA
atgcgagcccatgcaggccacaagagaagcgagtgtggaggtgagtggcgcgaaacgccaaggaaacagaagcagcatggcaaggccagcatttcaccttcgagcggtgcccgacggactgttacccctactcggaaacgcccatacgagtgcaaggtgtgcggtaaagccttcaactcacctaacttatttcagattcatcaacggacacataccggcaaacgcagctacaaatgcagagaaattgtgagggccttcacagttagctctttctttagaaaacacgggaaaatgcacaccggagaaaaacggtatgagtgcaaatattgtggtaaacctattgactacccctccctgtttcagatccatgtgcgtacccacactggagaaaagccctataaatgcaaacagtgcggcaaagcgtttatatcagccggttacctccggacacacgagattcgcagccacgccctggagaagtcccatcaatgccaagagtgcggcaaaaagctttcttgctcatcctcactgcatcgtcacgaaagaactcactctgggggaaaactgtatgagtgtcagaagtgtgcaaaggttttcaggtgtccaaccagtcttcaggcccacgaaagagcccacaccggcgagcggccttatgagtgtaacaaatgcggtaagacattcaactacccaagctgtttccgcagacataagaaaacgcattccggcgagaaaccatacgagtgtactcgttgcgggaaagcctttggatggtgtagctccctccggaggcacgaaatgacccacacaggcgaaaagccatttgactgcaaacaatgcgggaaggtgtttaccttttctaattacctgaggctacacgaacggacccaccttgctggcaggagccagtgctttggccgaaggcagggagatcatctgtcaccaggtgtttag

SEQ ID NO: 247244 - DNA, 1311 bp, synthetic construct
  misc_feature 1..1311: note = Description of Artificial Sequence: Synthetic coding sequence
  source 1..1311: mol_type = other DNA
atggacagcgtggcatttgaagacgtggccgtgaattttactcaggaggagtgggctttgttgagcccaagtcagaagaacttgtaccgcgacgtgactttggagacattcaggaatttagcaagtgtcggaattcagtggaaggaccaggatatcgaaaatctctaccagaacctaggcatcaaactacgatctctcgtggagagattatgtggacgtaaagaagggaacgagcacagagagaccttctcgcaaatcccggactgccatctgaacaaaaaatcccaaaccggggtgaagccttgtaaatgcagcgtgtgcggaaaagtgtttttgcgtcattcttttctagacagacacatgcgtgcacacgccggtcataaaaggtcagagtgtggtggcgaatggcgggagactccgcgaaagcaaaagcaacatgggaaggcgtcaatcagcccatccagcggagctcgacgaactgtgaccccaacacgcaagcggccatacgaatgtaaggtttgtggaaaggccttcaattcaccaaacctgtttcagattcaccagcgaacccatacgggcaagaggtcatataaatgccgagagatcgttcgagcgttcaccgtttcttcattcttccgtaaacatgggaagatgcatacgggagagaagcggtatgaatgtaaatattgcggcaagcccattgattatccaagcttgtttcaaatccatgtgcgcactcatacaggtgaaaaaccatacaagtgcaagcagtgtggaaaagcgttcatcagcgcagggtatctgaggactcacgaaatccgatcccatgctttggagaagtctcaccagtgccaggagtgcggcaaaaaacttagctgtagctcctccctgcataggcacgagcggacccacagcggaggaaagctgtacgagtgccaaaagtgcgccaaggtcttcagatgccccacgtctctgcaggcacacgagagggctcacactggtgagaggccatatgagtgtaacaagtgcggtaagacctttaactatccaagttgtttccggcgtcacaagaagactcactctggcgagaagccctacgaatgtactcggtgtggcaaagcttttggatggtgtagctctttacgaagacatgagatgacccatacaggtgaaaagccttttgactgtaagcagtgcggcaaggtgtttacattcagcaattatcttcgactgcacgagagaacccacctggctggcagatcccagtgcttcggccgaaggcagggcgatcatctgtcccctggtgtgtag

SEQ ID NO: 247245 - DNA, 2352 bp, synthetic construct
  misc_feature 1..2352: note = Description of Artificial Sequence: Synthetic coding sequence
  source 1..2352: mol_type = other DNA
atggtagctaaacctccagttatgtcatttcatttcgcccaggacctatggccggagcagaacataaaggactcattccagaaggttactctgcggcgttacggaaaatgcgagtatgaaaatctgcagctccggaaaggttgcaaacatgtcgatgagtgcaccggccacaaaggtggccataatacagtgaatcagtgcctgaccgcgaccccatcaaaaatatttcagtgtaataagtatgttaaggtgttcgataagttttccaactctaacagatacaagagaaggcatactgggaataaacacttcaagtgtaaggaatgtagtaagagcttttgtgtcctatcacaactgacccagcaccgcaggatacacaccagagtcaactcatataagtgtgaagaatgtggcaaagccttcaattggttttctaccctcactaaacataagcggattcataccggggagaaaccctacaaatgcgaggaatgtggaaaggctttcaaccaatcttcccagctgaccaggcacaagattatccacaccgaggagaagcctaataaatgtgaggagtgcgggaaggcgttcaagcaggcctcccatcttactatccacaagatcattcacaccggcgaaaagccctataaatacgaagagtgcggtaaagtattcagccagtcatcgcacctgacaacgcaaaaaattttgcacaccggcgaaaatctttacaaatgcaaggagtgcggcaaggcattcaatctgttctctaaccttaccaaccataagaggatccacgccggagaaaagccctacaagtgtaaagaatgtggtagagcttttaatatttcttccaatctcaataagcaagagaaaatccacaccggagggaaactcaacaagtgcgaggagtgcgacaaggctttcaaccgctcccttaaattgacagctcacaaaaagattctgatggaagagaagccatataagtgtgaagagtgcggaaaggtgtttaatcagttctctaccctcacgcgtcacaaaatcatccataccggagaaaaaccatataaatgcaaagagtgcggaaaggctttcaaccagtcctccaatctgaccgagcataagaaaatccacacagccgaaaaatcatacaaatgcgaagagtgcggtaaggcgtttaatcaacacagcaatctgatcaatcacaggaaaatctactccggggagaaaccttacaaatgcgaagagtgcggtaaagcgtttaatcgaagctctacattgaccaggcataagaaaattcacaccggcgaaaagccctacaaatgcgaagaatgtgaccgggctttttcacagagctctaacttaaccgagcacaagaaaatccataccggggagaagccctacaagtgcgaagagtgtggaaaagcatttaaccggttcagcaccttgaccaaacacaagagaatccacaccggagaaaaaccctacaaatgtgaggaatgtggcaaggcctttaatcagtcctatcagctcacccgccacaaaatcgttcatacaaaggaaaagctgaataagtgcgaggagtttggcaaggcattcaagcagtcaagccaccggaccattcataaaattatccacacaggcgaaaaaccttacaagtgcgaagagcatggcaaagtattcaatcaaagcagcaatctaaccacccaaaagatcatacacacaggtgagaacctttataagtttgaggaacacggtaaggcctttaacctgtttagtaatataacaaaccataaaatcatatatactggcgagaagccccacaaatgcgaagagtgtggcaaggcttacaaccggttctcaaaccttacgatccacaaaaggatccataccggggagaaaccctaccaatgtgctgaatgcggtaaggctttcaactgctccagcacactaaatcggcacaaaatcatccacacaggggagaagccttacaagtgtaaagaatgtggaaaggcattcaatctgtcttccacactcactgcacataagaaaattcacacaggcgaaaagccgtacaagtgtgaagaatgcgggaaagcattcaatcaaagtagcaatctcactactcacaaaaagattcatacgagtgagaaaccatataagtgcgaggaatgcgggaaatcttttaatcagttcagctcattgaatatccacaagattatccacacaggggagaaaccctacaagtgtggagattatggtagagctttcaacctatcatccaatttaacaacccacaagaaaatccacacgggcgagaagccctataaatgtgagtatggcaagacgtag

SEQ ID NO: 247246 - DNA, 276 bp, synthetic construct
  misc_feature 1..276: note = Description of Artificial Sequence: Synthetic coding sequence
  source 1..276: mol_type = other DNA
atggtcgctaagccaccagtgatgagtttccacttcgctcaggacctgtggccagagcagaatatcaaagactcattccagaaagtgactctacggaggtatggtaagtgtgaatacgagaacctgcagctgagaaaaggctgcaaacacgtggatgagtgtaccgggcacaaggggggacacaacaccgtaaaccagtgcctgactgccactcccagcaaaatctttcagtgtaacaaatacgtaaaggtgtttgacaagttctcaaacagttag

SEQ ID NO: 247247 - DNA, 2352 bp, synthetic construct
  misc_feature 1..2352: note = Description of Artificial Sequence: Synthetic coding sequence
  source 1..2352: mol_type = other DNA
atggttgcgaagcctcctgtgatgagctttcacttcgcccaagatctttggcccgaacagaatatcaaagatagttttcaaaaagtcacactccggagatacggaaagtgtgagtatgaaaacctccaactccgtaagggctgcaagcacgttgacgagtgcaccggtcataagggcggacataacaccgtcaaccagtgtcttacagcaactcccagcaaaatcttccagtgtaataagtatgtgaaagttttcgacaagttctcgaactcaaaccggtacaagaggaggcatacgggcaacaagcactttaaatgcaaggagtgctctaagtcattctgtgtgctgagccagctcacccagcatcggaggattcacacccgggtaaattcgtataagtgcgaagagtgtgggaaagccttcaactggtttagcacattaactaagcacaaacggattcataccggggagaagccctataagtgtgaggagtgcggcaaagctttcaaccagtcttctcagctcactaggcataagataatccacaccgaagagaagccaaataagtgcgaagagtgcggaaaggcgtttaaacaggcctcacacctcacaatccataagataattcatactggcgagaagccctataaatacgaggagtgcggaaaggtgttcagccagtcgagtcaccttaccacgcagaagatactccatacgggcgagaacctttacaaatgtaaggaatgcgggaaggccttcaatctattcagcaaccttacaaatcacaaacgaatccacgcgggagaaaagccttataagtgcaaagaatgtggtagagcattcaatatttcctccaacttgaacaagcaagaaaaaattcacactgggggaaaacttaacaagtgtgaagagtgcgataaagcattcaatcggtctcttaaactgactgctcacaagaagatactgatggaagagaaaccgtataaatgtgaggagtgcggcaaggtatttaaccagttctctacccttacacggcacaaaattattcatactggtgagaagccctacaaatgcaaagagtgtggcaaggcgttcaaccagtcttccaatctgacggaacataagaagatacacactgctgagaaatcctacaaatgcgaggagtgcggtaaagcattcaatcagcactcaaatctgattaaccatcggaaaatctattccggagaaaagccttataagtgtgaggaatgtggtaaggcctttaatcgctcaagcacactcactagacacaagaagatacataccggcgagaagccctacaaatgtgaagaatgtgatcgggctttcagtcaaagctccaatctgactgaacataaaaagattcatactggggaaaaaccctacaaatgcgaggaatgtgggaaagcctttaaccgcttcagcacacttacaaagcacaaaaggattcacaccggggaaaaaccgtataaatgtgaggagtgcgggaaagcttttaaccagtcatatcagctaaccaggcacaagatcgtgcacacaaaggagaaactcaacaaatgcgaagagtttgggaaagcattcaaacagagttcccaccgcaccatccacaagattatccacaccggagagaagccatacaaatgtgaggagcatggcaaagtcttcaaccagtcttcaaatctcacaactcaaaagatcatccataccggagagaatctgtacaagttcgaggagcacggaaaagcttttaacctctttagcaacattacaaaccacaagatcatttataccggcgagaagcctcataagtgcgaagaatgtggcaaggcctacaatcgcttttcaaatctgactattcacaagaggatccacacaggagagaagccttatcagtgtgcagaatgtggaaaagcttttaactgctccagcaccttgaacagacataagatcatacatacaggtgaaaaaccctacaaatgtaaggaatgcggaaaagcattcaatctcagtagtactctcacagctcacaagaagatacacaccggggaaaagccttacaaatgtgaagagtgtggcaaagcattcaatcagtcctccaaccttacaacccacaaaaagatccacactagtgaaaaaccctacaagtgcgaagagtgtggcaagtccttcaaccagttttcttcgttgaacatccacaaaattatacacacaggcgaaaagccgtataagtgcggagactatggcagagcctttaacctgagctcaaacttgacaactcacaaaaaaatccataccggggaaaaaccctacaaatgtgaatatggtaagacctag

SEQ ID NO: 247248 - DNA, 2352 bp, synthetic construct
  misc_feature 1..2352: note = Description of Artificial Sequence: Synthetic coding sequence
  source 1..2352: mol_type = other DNA
atggtcgccaaaccacctgtcatgtcgtttcattttgcccaagacctgtggccggaacagaacattaaggactccttccaaaaggtgacacttcgcaggtacggcaagtgtgagtacgagaacttgcaactcagaaaaggctgcaaacatgtggacgaatgtactgggcacaagggaggacataataccgtgaatcagtgtctgaccgctaccccgtcgaagatctttcagtgcaataagtatgtgaaggtgtttgataagttctcaaattcgaacaggtacaagcgcagacacacaggcaataagcatttcaaatgtaaggagtgcagtaagtccttctgcgtgctgagtcaactgactcagcacagacgtatccacacacgcgtgaatagttacaaatgcgaggaatgcggtaaggcattcaattggttctccacactgaccaagcacaaaaggatccacaccggagaaaaaccatataagtgtgaagagtgcggaaaagcctttaatcagagcagccagctgactcgtcacaagattattcatactgaagaaaagccaaacaaatgcgaagagtgcggtaaagcttttaaacaggccagccatctgactattcataaaatcattcacacaggggaaaagccatacaaatatgaagagtgcggcaaggttttcagccaatcttcgcacttaacaacccaaaaaatccttcacaccggggagaacctgtataagtgcaaggaatgcggaaaagcctttaatctgttctctaacctgactaaccataagcgaatccacgccggtgaaaagccctataaatgtaaggagtgcgggagggcattcaacatttctagcaaccttaataaacaggagaagatacacaccggaggtaaacttaataagtgtgaagagtgtgacaaagccttcaatcgttcactaaagcttacagcccacaaaaaaatactgatggaagagaagccatataagtgcgaggagtgcgggaaggtgtttaaccagtttagcacgctgacacggcataaaattatccacactggtgaaaaaccctataagtgtaaagagtgcgggaaggcgtttaaccaaagttcgaacctgacagagcataaaaaaatccatacggccgagaagagttacaaatgtgaagagtgcggcaaggccttcaaccagcactcaaatcttataaatcataggaagatctattccggagagaagccatacaaatgcgaagagtgcggcaaggcctttaataggtcttcgactttgacacggcataagaagattcacacaggcgagaaaccatacaagtgtgaggagtgcgatcgagcattttcgcagtcttcaaacttgaccgaacacaaaaaaatccatactggcgagaagccctacaagtgtgaggaatgtggtaaagcgttcaatcgtttctccacactgacaaagcataagcgaattcatacgggggaaaagccatacaagtgcgaagaatgtggcaaggcattcaatcaatcttaccagctgaccaggcacaaaatcgttcacacaaaggaaaaattaaataagtgcgaggagttcggaaaggcgttcaagcagtcctctcaccggactattcataaaatcattcataccggcgaaaagccctataaatgtgaagaacacggaaaggtattcaaccagtctagcaaccttactacccagaagatcattcatactggagagaacctgtacaaattcgaggagcacgggaaggcgttcaacctctttagcaatataactaatcataagataatttacaccggcgaaaagccccacaagtgcgaggaatgcggcaaagcctacaataggtttagcaacctcaccatacacaaaagaatccatacgggcgagaagccgtaccagtgtgcggagtgtggtaaagccttcaactgcagctctacactgaacagacacaagatcatccataccggagagaagccatacaagtgtaaagaatgcgggaaggccttcaatctcagttcaacccttaccgcacacaaaaaaattcatacaggagagaagccctataagtgcgaagaatgcggaaaggcttttaaccagagcagcaacctgacaacccacaaaaaaattcacacgagtgagaaaccttataaatgcgaagagtgtggtaaatcttttaatcagttttcttcactcaacatccataaaatcattcataccggcgagaagccgtacaagtgcggtgactatggcagggctttcaacctttcctccaacttgacaacccacaagaagattcataccggggaaaaaccttacaagtgcgagtacgggaagacgtag

SEQ ID NO: 247249 - DNA, 453 bp, synthetic construct
  misc_feature 1..453: note = Description of Artificial Sequence: Synthetic coding sequence
  source 1..453: mol_type = other DNA
atggtggcaaaaccccctgtgatgagttttcatttcgctcaggatttatggccggaacaaaatataaaggacagcttccagaaggtcacattacgccgttacggtaaatgcgagtatgagaatctacagcttcgcaaaggctgtaagcacgtggatgagtgcacaggccataaaggaggtcacaatacggtgaaccagtgcctgacggccactccttctaaaattttccagtgtaataagtacgttaaggtcttcgataagttctcaaactctaaccggtacaagcgacggcacactggcaataagcattttaagtgcaaggaatgttctaaatctttctgtgtcctcagccagcttacacagcaccgcagaatccatacacgtgtgaattcctataagtgcgaggagtgtggaaaagctatcatcatttgttcagacttcacccagcattag

SEQ ID NO: 247250 - DNA, 1254 bp, synthetic construct
  misc_feature 1..1254: note = Description of Artificial Sequence: Synthetic coding sequence
  source 1..1254: mol_type = other DNA
atgagccaggattctgtaacatttgccgatgtggctgtgaactttacgaaagaggaatggacacttctggatcctgcccagcggaatctgtatagagacgtgatgctggaaaactcccgtaaccttgcatttattgactgggccacgccctgtaaaaccaaggacgcgacaccacagcctgatatcttacccaagcgcacctttccagaggccaaccgggtgtgcttgacctctatttcatcccagcactctactttgcgcgaagactggagatgtccaaagacggaagagccacataggcagggcgtcaacaatgttaagcctccagccgttgcaccagagaaagacgagtccccagtgagcatctgcgaggaccatgagatgagaaaccacagcaagcctacttgcagactcgtaccaagtcaaggggattctatcagacagtgcatactgacgcgagattcgagtatcttcaagtataatccggtcctgaatgatagtcagaaaacgcacgagaacaacgaggatgatggagttctcgggtggaatattcaatgggttccttgcggcagaaagaccgagctgaagtctagcacatggaccggctcacagaacacagttcaccatattagagatgagatcgatactggagcaaaccgacatcagcgaaaccccttcggcaaggcttttcgtgaggatggatccctgcgtgcccacaatactcacggacgtgaaaagatgtatgatttcacgcaatgcgaaaatacatcaaggaacaacagtattcacgcaatgcagatgcagttatacacggcagagacgaacaaaaaagattgtcaaaccggagctaccagcgccaacgcccctaacagtgggtcacacaagtcccactgcactggcgagaagacgcacaagtgtcctgagtgtggccgagccttcttttatcagtcttttctcatgaggcatatgaaaatccacacaggtgagaagccttatgagtgcgggaaatgtggaaaggccttccgctactctttacatttgaataaacacttgagaaaacacgtggtgcagaagaagccttatgagtgtgaagagtgcgggaaagtgattagagaatcatctaagtatacccatattagatcacataccggtgagaaaccatataagtgcaaaacttgtggcaaggactttgccaagtcttctggcctgaaaaagcatcttaagacccacaaagatgagaagccatgcgagtag

SEQ ID NO: 247251 - DNA, 1254 bp, synthetic construct
  misc_feature 1..1254: note = Description of Artificial Sequence: Synthetic coding sequence
  source 1..1254: mol_type = other DNA
atgtctcaagactccgtaactttcgcagacgttgcggtaaacttcactaaagaggaatggacgcttctagatccagctcagaggaacctgtaccgcgacgtgatgcttgaaaacagtagaaacctggcgttcattgattgggccactccttgcaaaacaaaagatgccaccccccaacccgacatcctgccaaagcgcacctttcccgaggctaatagagtgtgcctgacctccatctcaagccagcacagcaccctacgcgaggactggcgttgccccaaaactgaagaaccccatcgtcagggcgttaataacgtcaagcctcctgcagtagcccctgaaaaagacgaatctcctgtctccatatgtgaggaccacgagatgcggaatcattccaagccaacatgtcggctggtaccctctcagggtgattcaattagacagtgcatcttgacccgggattctagtatcttcaagtacaacccggtattaaacgacagtcagaaaacgcatgagaacaatgaggatgatggcgtgttaggctggaacattcaatgggtaccctgcgggaggaaaacagaactcaaaagttctacctggacggggtcacagaacactgtgcatcacatacgggatgaaatagatactggtgcaaataggcaccagaggaatccttttggtaaagcattccgggaggacgggtctctacgcgcacataatacccacggcagggaaaagatgtatgatttcactcaatgcgagaatacatctcgcaacaacagcatccatgctatgcagatgcagctgtataccgctgaaaccaacaagaaagactgtcagaccggagccacatccgccaacgctcctaattccggttcgcacaagtctcattgtactggcgaaaaaacgcacaaatgccccgagtgtggtcgagcatttttttaccagtcttttttgatgaggcacatgaagattcacaccggagagaagccatacgaatgcggaaaatgcggtaaggccttccggtactctctgcatctgaacaagcacttaaggaaacacgttgtgcaaaagaagccgtatgaatgcgaggagtgtgggaaggttattcgtgagagcagcaagtacacacacatcaggtctcacaccggcgaaaaaccctacaaatgtaaaacatgtggaaaagactttgcaaagtcatctggcctcaagaagcacttgaagactcacaaggacgagaagccttgcgaatag

SEQ ID NO: 247252 - DNA, 1452 bp, synthetic construct
  misc_feature 1..1452: note = Description of Artificial Sequence: Synthetic coding sequence
  source 1..1452: mol_type = other DNA
atgaaacgacacgagatggtcgccaaacatttagtgatgttctactatttcgcacagcatttgtggccggaacagaatataagggactcgtttcagaaggttacactgagaaggtaccggaagtgtggatatgagaaccttcagctccggaagggctgtaagtccgtcgttgagtgtaagcagcataagggagactatagcggactgaaccagtgtcttaagacgactctgtccaagatttttcagtgcaataagtacgtggaggtatttcacaaaatcagcaatagcaataggcacaagatgaggcacactgagaacaaacattttaagtgtaaagagtgcaggaaaaccttctgcatgctgagccacctgacacagcacaaacgtatccagaccagagtcaatttttacaaatgcgaagcctatggaagagccttcaattggagttccacactcaataaacacaaacggattcacacaggagagaagccatacaagtgcaaagaatgcggaaaagcctttaaccagacaagccacctgatccgtcacaagcgaatacataccgaggaaaaaccatacaagtgcgaggagtgtggcaaagcatttaaccagagttccacactgacaacgcacaacattattcatactggagagatcccctacaaatgtgagaagtgcgttcgagctttcaaccaggctagtaaactgacggaacacaagctgatccacacaggcgaaaaaaggtacgagtgtgaggaatgtggcaaagcgtttaacaggtccagcaagctcaccgaacacaagtacatacatactggtgaaaagctttacaaatgtgaggagtgtggcaaggcctttaaccagtcaagtactctgaccacacacaaacgaatacactctggtgaaaagccctataaatgcgaggaatgcgggaaagccttcaagcaattttccaacctgacagatcataaaaaaattcataccggcgaaaaaccatataaatgcgaggagtgcggcaaagccttcaatcagttgtccaacctcacccgtcataaggtcatccataccggcgagaagccttacaaatgcggggaatgcggcaaggcttttaaccagagctccgccctgaacacccataagataatccatactggggagaaccctcacaaatgcagggaatctgggaaggtctttcatcttagctctaagctaagcacatgcaaaaagatccatacaggggaaaaattgtataagtgcgaggagtgcggcaaggcctttaaccggtcctccacgctgattggccataagcgcatacataccggggaaaagccatataaatgcgaagagtgtggcaaggctttcaaccagtcctccactctgactacacacaaaatcatacatacggaggagaaacagtataagtgtgatgaatgtgggaaagcctcaacctag

SEQ ID NO: 247253 - DNA, 1152 bp, synthetic construct
  misc_feature 1..1152: note = Description of Artificial Sequence: Synthetic coding sequence
  source 1..1152: mol_type = other DNA
atgaaaaggcacgagatggtggctaagcatctggtcatgttttattatttcgctcaacacctgtggcctgaacagaatatccgcgacagctttcagaaagtgaccctgaggagataccgaaaatgcggctatgagaaccttcaactccgcaagggctgcaagagcgtggtggaatgcaagcaacacaaaggcgactacagtgggcttaatcaatgcctgaagaccacactctcaaagattttccagtgcaataaatacgtcgaggttttccacaagatctctaacagcaatcggcacaagatgcggcacactgaaaacaagcacttcaaatgtaaggaatgccgcaagaccttctgcatgctatcacacctgactcaacataagcggatccagacaagagtcaatttttataagtgtgaagcctacggacgtgcctttaattggtccagcaccttgaacaagcacaaaaggatacatacaggcgaaaagccctacaagtgtaaagaatgcggaaaggcattcaatcagacgagtcacctcattcgccacaagcgcatccacacggaggaaaaaccctacaagtgtgaggaatgtggtaaggccttcaatcagtccagcacgctgacaacgcacaacatcatacataccggtgaaattccatacaagtgtgaaaaatgcgtacgcgcattcaaccaggcctcaaagctcaccgaacacaagctcatccacaccggggagaagaggtatgagtgcgaggagtgcggcaaagccttcaatagaagctcaaaactgacggaacataagtacatccataccggggaaaaattgtataaatgcgaagaatgcggaaaggcctttaaccagagctctaccctcaccacacataagaggatccacagcggagaaaaaccgtacaaatgcgaggagtgcgggaaggcctttaaacagttttccaacctgacagaccataagaagattcataccggggaaaaaccttacaagtgcgaagaatgtgggaaggccttcaatcaactgagcaacttaacacgccacaaggtgatccacactggcgaaaagccctataagtgcggagaatgcggtaaagccaatctcagctccactcttacccctcataaaactatccacatctag

SEQ ID NO: 247254 - DNA, 1368 bp, synthetic construct
  misc_feature 1..1368: note = Description of Artificial Sequence: Synthetic coding sequence
  source 1..1368: mol_type = other DNA
atgctggaaaactactcaaatctggtcagcgtgggctatcacatcattaagccagacgtgatcagcaagctggagcaaggcgaagagccctggatagtcgaaggagagtttcttctgcagagttaccccgatgaagtgtggcaaacggatgatcttatcgagcgtatccaagaggaagagaacaagccgtcccgccaaaccgtattcatagaaaccctgatcgaggagagggggaacgtgcccggaaaaactttcgacgtcgagacaaatcccgtccctagtcggaagatcgcgtataagaattccctctgcgattcctgcgaaaaatgtctgacaagcgtgagcgaatatatctcttcggatggtagctatgcgagaatgaaggctgatgaatgttcaggttgtggcaagagcctccttcatattaaactcgagaaaacccatcctggagaccaggcatacgaatttaaccaaaatggggagccgtatacactcaacgaggaatctctgtaccagaaaatccgtatcctcgaaaagcccttcgaatacattgagtgtcagaaagcattccaaaaggataccgtgtttgtgaaccacatggaagaaaagccctataagtggaacggcagcgagatcgcgtttttgcaaatgagcgacctgactgtgcatcaaacttcccacatggagatgaagccttacgagtgctcagaatgtggaaagtcattttgcaaaaagtctaagttcatcatccaccagcgcacccacaccggcgagaaaccctacgaatgtaaccagtgcggaaagtcattttgtcagaagggaaccctcactgtacaccagcggacccacacgggagagaagccatatgagtgcaatgagtgtgggaaaaatttttaccagaagctccatttgatacagcatcagaggactcattctggcgaaaaaccttacgagtgttcctattgcggtaaaagtttctgccagaaaacccatctcacacagcatcagaggacgcactcaggcgaaaggccatacgtatgtcatgattgcgggccaagcagaagaagtcagcatcttatgcatcagaaaattcataccggtgtgaaattatataaatgcagcgaatgtgggaagtgtttttgcagaaagtcgaccctaaccacacacctgcgcactcatactggagaaaagccctacgagtgtaacgaatgcggtaagttcttctctagattatcttacctgactgttcactaccggacacatagcggagaaaaaccctatgaatgcaatgagtgcgggaaaaccttttaccttaactctgctcttatgagacaccagagggtgcataccggcgagaagccgtattag

SEQ ID NO: 247255 - DNA, 1980 bp, synthetic construct
  misc_feature 1..1980: note = Description of Artificial Sequence: Synthetic coding sequence
  source 1..1980: mol_type = other DNA
atgaataaatcgctgggccctgtgagctttaaggatgtggcagtggactttacacaggaagagtggcagcagctggacccggaacaaaagattacgtaccgcgatgtcatgctggagaactatagcaatctggtcagcgtgggttaccacataatcaaaccagatgttatctcgaaactggaacagggtgaggagccatggatcgtagaaggggagttccttctgcagagctatcctgatgaagtgtggcaaactgacgacctgatcgaacgcattcaggaagaggagaacaaacctagtaggcaaactgttttcatcgagaccttaatcgaagaacgggaatacatctcgtccgacgggagctatgctaggatgaaggccgacgagtgttccggttgtggcaagagcctgttacatatcaaattagagaagacccacccaggcgaccaggcctatgagttcaatcagaatggtgagccctacactttgaacgaggagagcctgtaccagaagatccggatcctggagaaacccttcgagtatatagaatgccaaaaagcatttcaaaaggacacagttttcgtcaatcacatggaagagaagccatataagtggaacggctctgaaatagcctttttgcaaatgagtgacctgaccgtgcatcagacttcccatatggaaatgaaaccgtacgagtgtagcgagtgcggaaagtccttttgcaaaaagtctaagtttatcatacaccagcggacccacaccggcgaaaagccttacgaatgtaatcagtgcgggaaatcgttttgtcaaaaagggacactcacagttcatcagcgcactcacaccggcgaaaagccatacgaatgtaacgagtgtggcaaaaatttctatcagaaactgcatctaatccagcaccaacggacgcacagcggggaaaagccatatgaatgttcgtactgcggtaaatctttttgccagaaaacccatctgacccaacatcaaagaacccactctggcgagagaccttacgtctgccatgattgcggaaagacattctcacagaagagcgctctgaacgaccaccaaaagattcacacaggggttaagctgtacaagtgttcagagtgtggtaagtgtttctgccggaagtccaccctcaccacccatctgcggactcatactggagagaaaccatacgagtgcaatgagtgtggcaagttcttctctcggctctcttatctgaccgtgcactaccgaacccactctggcgagaaaccttacgagtgtaatgaatgtgggaaaacgttctacctgaactcagccttaatgaggcatcagcgagtacatacgggcgagaagccttacgagtgtaatgagtgtgggaagctattttctcagttgtcttacctcaccattcaccaccgaactcatagcggcgtgaaaccctatgagtgtagtgaatgtggaaaaacattctaccagaactcagcactgtgccggcacaggcgcatccacaagggcgagaaaccctatgagtgttatatttgcgggaaattcttcagtcagatgtcgtatctgacaatccaccacagaatacacagcggtgaaaaaccttacgaatgcagcgagtgcggaaagactttttgccagaactctgctttaaatagacaccaaaggacccatactggcgagaaggcatacgagtgttacgaatgtggaaagtgtttctcacaaatgtcctacttaactattcatcatcggatccactcgggcgaaaagccattcgaatgcaacgaatgtggcaaggcgttttcaagaatgagctacctgaccgtacattataggacccactctggtgagaaaccctacgagtgcaccgagtgcggcaaaaagttttatcataagagtgcattcaacagccaccaacgaatccacaggaggggtaatatgaacgtgatcgatgttgggcgattgctctag

SEQ ID NO: 247256 - DNA, 2268 bp, synthetic construct
  misc_feature 1..2268: note = Description of Artificial Sequence: Synthetic coding sequence
  source 1..2268: mol_type = other DNA
atgcgggctactgccctggttcgatggacagggagggatcttgcaagtcggagggcccctgccactgcgatccctcctcggcctgtcggaagcggcggagccgaggccgctgaacctcaagaggacctcccgcctctctcgcagtccagcagatttttccaggagcagcagaagatgaataaaagtctgggaccagtgtcctttaaggacgtggcagtcgattttacccaagaggaatggcaacagctcgaccccgagcagaaaataacctacagggatgtgatgctggagaactactcaaaccttgtgtccgtgggctaccacattataaagccggatgtgataagtaagctggaacagggagaggagccttggatcgtggaaggcgaattcttattgcagtcgtaccccgacgaggtgtggcaaacagatgacctgatcgaacggatccaggaggaagaaaataaaccgtcacgccagaccgtgttcatcgagactctcatcgaggagcggggtaacgtcccaggcaagacgtttgacgtcgagaccaatcctgtgccttcacgcaaaatcgcctataaaaactccctctgcgacagctgtgagaagtgtctgacctcagtgtctgagtacattagtagcgacggcagctatgccagaatgaaggcggacgaatgttccgggtgcggcaaatctctcctccacattaagttagagaaaacacatcccggtgaccaggcttatgaattcaatcagaatggagagccatatacattgaacgaggagagcctgtaccagaaaatacggattttggaaaaaccatttgagtatattgaatgtcagaaggccttccagaaggataccgtgttcgttaaccatatggaagaaaagccctacaagtggaacggaagcgaaattgcattcctccagatgagcgacctgacagtccaccagaccagccacatggaaatgaagccatacgaatgcagcgagtgcggcaagagtttttgcaaaaagagcaagtttatcatacatcagcggacccacacaggtgaaaagccctacgagtgtaaccagtgtggcaagagtttttgccagaaggggaccttaaccgtccaccagagaacccacaccggggagaagccctacgagtgtaatgaatgcgggaaaaacttttatcagaaacttcatctgatacaacatcagcggactcatagcggggaaaagccctacgagtgctcttattgtggtaagtcattttgccagaaaacacatctcacacagcaccagagaactcacagcggggagagaccgtatgtttgccacgactgcggtaaaaccttctcgcaaaagagtgctctcaacgaccaccagaagatacacacaggtgtgaaactctacaagtgctctgagtgcggcaaatgtttctgccggaagtcgactctgactacacacttacggacgcacaccggggaaaagccttacgagtgtaacgaatgcggaaaatttttctcccgattatcatatcttaccgttcattaccggacccattcgggagagaagccttatgaatgtaacgagtgtggtaagacgttttacttaaattccgccctcatgcgacaccagagagttcacaccggtgagaaaccatacgaatgcaacgaatgcggaaaactcttttcgcagctgagctacctgaccatacaccatcggacccactctggggtaaaaccatacgaatgtagtgaatgcggcaaaaccttctaccagaacagcgcgttgtgccggcaccgcaggatccacaaaggagaaaagccgtatgagtgctatatttgtggcaaattcttcagccaaatgtcttatcttacaattcaccaccggattcactccggcgagaaaccctacgagtgtagcgaatgcggtaagacattctgtcagaacagcgccctcaacaggcaccagaggactcatacgggggagaaagcctacgagtgttacgagtgcggtaagtgtttttcacagatgtcttacttgacaatccatcacaggatccactccggcgagaagccatttgagtgcaacgagtgtgggaaagcgttcagtaggatgagttatctgacagtacactatcgcactcattccggcgagaagccctacgaatgcactgaatgtggcaagaagttttaccacaaaagtgcgttcaatagccatcagcgcattcacaggagggggaacatgaacgtgattgatgtgggcaggcttctgtag

SEQ ID NO: 247257 - DNA, 2094 bp, synthetic construct
  misc_feature 1..2094: note = Description of Artificial Sequence: Synthetic coding sequence
  source 1..2094: mol_type = other DNA
atgaacaagtcactgggcccagtgtcgtttaaggacgtggctgtggatttcacccaggaggaatggcagcagttggatcccgagcagaaaattacctatcgtgatgtaatgctcgagaattatagcaacctggtatcagtcggctaccatatcatcaagcctgatgtgatcagcaaactggagcaaggcgaggaaccttggatagttgagggggagtttttgctccagagctacccagacgaagtgtggcagaccgatgacctgatcgagagaatacaggaggaggagaacaagccctccaggcagacggtctttattgagaccctgatcgaggagcgaggaaacgttcccggtaagactttcgacgtggagaccaaccctgtcccttctcgaaagatcgcttataagaacagcctttgtgactcatgtgaaaagtgcctgacatcagtatcggagtatatctcctcagacggaagctacgctcggatgaaagcggatgagtgttctggctgcggcaaatcattactccacatcaaactcgagaagacccaccccggagatcaggcatacgaatttaatcaaaacggagagccttacacactcaacgaagagtctctctaccagaaaatcagaattctggagaagccttttgaatatattgagtgccagaaggcgttccagaaggacacggtattcgtgaatcacatggaagagaaaccatataagtggaacggatccgagattgctttcctccaaatgtcggatctcaccgttcatcagaccagccacatggagatgaagccctatgagtgctccgaatgcggcaagagtttctgcaagaagtctaaattcatcatccatcaacggactcacaccggggagaaaccttacgagtgcaaccagtgcgggaagtcgttctgtcagaaaggaaccctgaccgtgcaccagagaacacataccggagaaaagccttacgagtgtaacgagtgcggaaaaaacttctaccaaaagcttcatctgatccagcaccagcgaacacattctggggagaaaccatacgagtgcagttattgtgggaagtccttctgccagaagactcacctcacacagcaccagcggacacatagcggggagcgcccatatgtgtgccatgattgtggcaaaacatttagccagaagagtgccctgaatgatcaccagaagattcacactggtgtaaaattgtacaaatgttccgaatgtggaaaatgcttctgtagaaaaagcacactcaccacacatcttagaacccacactggtgagaaaccctacgagtgcaatgaatgtggcaaatttttttctcgattgtcttatcttactgttcactataggacacacagtggggagaagccatacgaatgcaatgagtgcggtaaaacgttctatctaaacagcgccctgatgcggcaccagcgtgttcacaccggtgagaagccctacgaatgtaatgaatgcggcaagctcttttctcagttatcctacctgaccatccaccatagaacacacagcggcgtcaaaccatacgagtgtagcgaatgtggcaagacattctaccaaaattcggctctgtgtaggcatcgtaggatacacaagggcgagaaaccctacgaatgttacatatgcggcaagttcttcagccagatgagctacctgaccattcatcaccggatccactccggggagaagccttacgagtgctctgagtgcggtaagactttttgccaaaacagcgcgttgaacagacaccagaggacccacaccggggaaaaggcatacgagtgctacgaatgcggcaagtgcttttcccagatgtcttatctgaccatacaccaccgaatacattccggagaaaaaccctttgagtgcaacgaatgtggcaaagccttttccaggatgtcctacctgaccgtgcactatcgcacacactccggggagaagccgtacgaatgcacggagtgcggcaagaaattttatcacaaaagtgcattcaatagccaccagcgtatccaccggaggggtaatatgaacgtcatagatgtcgggagattgctgtag

SEQ ID NO: 247258 - DNA, 1173 bp, synthetic construct
  misc_feature 1..1173: note = Description of Artificial Sequence: Synthetic coding sequence
  source 1..1173: mol_type = other DNA
atggccgagatccataatggtggggagctgtgcgatttcatggagaacggcgagattttcagtgagcactcttgtttgaatgcccacatgggcactgagaatacaggggacacttatgactgcgatgagtacggcgaaaattttcctatgctgcacaattctgccccagctggggagacattaagcgtgctgaatcagtgcagaaaggcattctctctccctccgaacgtgcaccagagaacatggattggagacaaatctttcgagtacagtgactgtgaggaggcatttgttgatcagtcccatctccaagcaaaccgaataacccacaatggagaaaccctttatgagcagaaacagtgtgggcgagcctttacctattcaactagccacgccgtgagcgtgaaaatgcacactgtcgagaagccctacgaatgcaaggagtgcgggaaattttttcgttactcatcctatctgaactctcatatgagaacacacacaggagaaaaaccctacgaatgcaaggaatgtgggaaatgtttcaccgtgtcctcacacctagtcgagcatgtcaggattcacactggggagaagccctatcaatgcaaggagtgtggaagggcttttgctggcagaagcggcctcactaagcacgtccgaattcacaccggcgaaaagccatatgaatgcaacgagtgcggtaaagcttataatagattttatctactaactgagcactttaagacgcacaccgaggagaagccattcgagtgcaaggtgtgtggcaagtctttcaggagctctagctgcctgaagaatcattttcggatccacaccggtatcaagccatataaatgcaaggagtgtgggaaggcctttaccgttagttcgtcccttcacaatcacgtaaagattcatacaggtgaaaaaccctatgagtgcaaagactgcggcaaagcctttgccacctcctcccaactgatcgagcacattaggactcatacgggggagaaaccttacatatgtaaagagtgcggcaagaccttccgggcatccagccacctgcaaaaacatgtgcgaattcacaccggggagaaaccttacatatgcaatgagtgcggaaaagcgtataacagattctacctgctcacgaaacaccttaagacgcactag

SEQ ID NO: 247259 - DNA, 1032 bp, synthetic construct
  misc_feature 1..1032: note = Description of Artificial Sequence: Synthetic coding sequence
  source 1..1032: mol_type = other DNA
atggccgagatacacaacggcggagagttatgtgattttatggaaaacggcgagatcttctcagagcattcatgcctcaacgcacacatgggaacagagaacaccggggacacctacgactgtgatgagtacggggaaaactttccgatgctccacaattcagcacctgccggtgagactctcagcgtgcttaaccagtgtagaaaggcctttagcctcccccctaatgttcaccaaaggacctggatcggagacaagagcttcgagtacagtgactgtgaggaggcctttgtggaccagtcccatttgcaggccaataggatcactcataatggggagaccctctatgagcaaaagcagtgcggcagagcattcacttattcaacatcccatgcagtgtcagtaaagatgcatactgtcgagaagccttatgaatgtaaagagtgtggcaagttttttagatatagcagttacttaaactcccatatgcgcacacatacgggtgagaagccttatgaatgcaaggagtgcggaaaatgcttcactgtgtcatcacacctggtggagcatgtacgcattcatacaggtgaaaaaccgtatcagtgcaaggagtgcgggagggccttcgccggacggtccggcctaacaaaacatgttcggatacatacaggggaaaaaccctacgagtgtaatgagtgtggcaaagcatataacagattctatctgctgactgaacattttaaaacccacaccgaggaaaaaccgtttgagtgtaaagtgtgtgggaagagtttccgcagctcctcctgcctgaagaatcacttcagaatccacacggggatcaagccgtataagtgcaaggagtgtggaaaggcattcactgtgtccagtagtcttcacaatcatgtcaaaatccatacaggcgaaaagccctacgaatgtaaggactgcgggaaggcattcgccaccagtagtcagttgatcgaacacatccgcacgcatacttgtaatccttcaaccctcagaggctag

SEQ ID NO: 247260 - DNA, 870 bp, synthetic construct
  misc_feature 1..870: note = Description of Artificial Sequence: Synthetic coding sequence
  source 1..870: mol_type = other DNA
atgtcaggccatcccggaagctgggaaatgaacagcgtagcattcgaggacgtggccgtgaacttcacacaagaggagtgggccctgctggatccaagccagaagaacttgtaccgcgatgttatgcaggagacctttaggaatctggcctcgattgggaacaaaggcgaggatcaaagtatagaagaccagtataaaaatagctccaggaacctgagctcttttcagattcaccagagaaaccacacaggagaaaagccctatgaatgcatggaatgcggtaaggccttgggcttctcacgctctttgaatcggcataaacgaatacacacaggagagaagaggtatgagtgtaaacagtgcggaaaggcattctctcgcagctctcatctccgcgaccatgagcggactcatacaggcgagaagccctatgagtgtaagcactgtggaaaggctttcaggtattctaattgcttgcattatcacgaacggactcatactggggagaagccatatgtgtgtatggagtgcgggaaggcattctcctgtctcagcagtcttcaagggcatattaaagcccatgctggagaggagccttacccttgtaaacagtgtggtaaggctttccgctatgcctcttctctacagaaacatgaaaagacccatatagcacagaagccttacgtctgcaataattgtggaaagggattccgttgctctagttcgcttagggaccatgagcgtactcacactggcgagaagccttacgaatgtcagaaatgtgggaaagccttctctcgcgcaagcacactgtggaagcacaagaagacccataccggggagaagccctacaaatgcaaaaagatgtag

SEQ ID NO: 247261 - DNA, 939 bp, synthetic construct
  misc_feature 1..939: note = Description of Artificial Sequence: Synthetic coding sequence
  source 1..939: mol_type = other DNA
atgccaaatttcaacctcaataagaaaatacctgccagggtcaagcctcatgaatgcatcgtctgtgagaagttcttcattcgccatagtagtcttcacagacacattatctctcactccggcaataacccatatggatgtgaggagtgtggcaagaaaccttgtacctgtaagcaatgccagaaaacctcactgtccgtcacaagagtgcacagggacaccgtgatgcataccggcaatggacactacggatgtactatttgcgagaaggtgtttaacatcccctcgtcattccagatccatcaacgcaatcatactggggagaagccgtacgaatgcatggaatgcggaaaagcccttggatttagtaggagcctgaatcgccacaaacgtatacacaccggcgaaaagcgatacgagtgtaagcagtgtgggaaagcatttagtcgatcttcccatctcagggaccacgaacgcacccacaccggagaaaagccgtacgagtgtaagcactgcgggaaagcctttcgttactcaaattgccttcactaccacgagcggacacacacgggagaaaaaccgtacgtgtgtatggaatgcgggaaggcgtttagctgcctctcctccctgcagggtcacattaaggcccatgcgggtgaggagccttacccatgcaagcagtgcggcaaggccttcagatatgcttccagcctgcagaaacacgaaaagacccacattgcccaaaagccttacgtctgcaataattgcggcaaaggatttcggtgctccagcagtctgcgggaccatgagagaacccacaccggtgagaagccctacgagtgccagaagtgcggcaaagctttctccagagcttccacactgtggaagcacaagaaaacacacaccggcgagaagccctataaatgcaagaagatgtag

SEQ ID NO: 247262 - DNA, 468 bp, synthetic construct
  misc_feature 1..468: note = Description of Artificial Sequence: Synthetic coding sequence
  source 1..468: mol_type = other DNA
atgaacgctctctgcgtgaaaaactccagttatcatagttcgttgcacaggcatataatttcacactctgggaataacccctatggctgcgaagagtgcgggaagaagccatgcacctgcaagcaatgccagaagacctcactcagcgttacgcgggtacatcgcgacaccgtcatgcataccggtaacggacactacgggtgtaccatttgtgagaaggtatttaacatccccagtagctttcaaattcatcagagaaaccacaccggggagaagccatatgaatgtatggaatgtggaaaagctcttggattctcacggagcctaaataggcacaaacgcatccacaccggggaaaagcggtacgagtgcaagaaatgtggcaaagccttttcccgcgctagtactttatggaaacacaaaaaaactcacacgggcgagaaaccgtataagtgcaaaaaaatgtag

SEQ ID NO: 247263 - DNA, 888 bp, synthetic construct
  misc_feature 1..888: note = Description of Artificial Sequence: Synthetic coding sequence
  source 1..888: mol_type = other DNA
atgaacgctctgtgcgtcaagaacagttcataccactcctctctgcataggcacataatctcacattcgggcaacaatccctacgggtgcgaagagtgtggaaagaaaccctgcacatgcaagcagtgtcagaagacaagcctgtcagtgacaagagtgcaccgggatactgtgatgcacaccggaaacggacattacggctgcaccatttgcgaaaaggtgttcaacatcccttctagctttcagattcaccagcgcaaccatacgggtgaaaagccgtatgagtgcatggagtgtggaaaagctcttggcttcagtcggtcgctgaataggcataaaagaattcacaccggcgaaaagagatatgagtgcaaacagtgtggcaaggccttcagcagatcctcacacctcagggatcacgagagaacccacactggcgaaaaaccgtatgagtgtaaacactgtgggaaggcattcagatacagcaactgtctacactatcacgagcgcacccacacgggtgaaaagccttatgtttgcatggagtgtggcaaagcgtttagctgtctgtcttcactgcaggggcacataaaagcgcatgcgggagaggaaccctacccgtgtaaacagtgcgggaaggcatttcgctacgcctcttctctccagaaacacgagaaaacccacatcgctcaaaagccttacgtctgcaacaattgcggaaaaggcttccggtgtagcagctccttaagggaccacgaacggactcatactggcgagaagccttatgaatgccagaagtgcggtaaagcgttttccagagcaagcacactatggaagcacaagaaaacacacacaggagaaaaaccatacaaatgtaagaaaatgtag

SEQ ID NO: 247264 - DNA, 222 bp, synthetic construct
  misc_feature 1..222: note = Description of Artificial Sequence: Synthetic coding sequence
  source 1..222: mol_type = other DNA
atgagtggccaccctggatcatgggaaatgaactccgtcgcatttgaggacgttgccgtaaattttacgcaagaggagtgggccctcctcgacccctctcagaaaaatttataccgtgatgtcatgcaggaaacatttcgaaatctcgctagtatcgggaacaagggagaggaccagtcaattgaggatcaatacaagaattcgtcaaggaatctgagatag

SEQ ID NO: 247265 - DNA, 1770 bp, synthetic construct
  misc_feature 1..1770: note = Description of Artificial Sequence: Synthetic coding sequence
  source 1..1770: mol_type = other DNA
atggaagctgaggagacgatggagtgtttgcaggaatttcctgaacaccataaaatgattcttgatcgcctgaatgagcagagggagcaggaccgctttaccgatattaccctaatcgtggatggacatcactttaaagcccacaaggctgtgctagcagcgtgttccaaatttttttacaaattcttccaagagttcacccaggagccgctggtcgaaattgagggcgtttcaaagatggcattccgccacctgatcgaatttacttacaccgcgaagctgatgatccagggcgaggaggaagccaacgacgtttggaaggctgctgaattcttacaaatgctagaggcgatcaaggctctcgaagtgcggaataaagagaattccgcaccactagaagagaacacaactggcaagaatgaagctaagaagaggaaaatcgccgaaacctccaacgttatcaccgagagcctgccatccgcagaatctgagccagtggagatcgaggtggagattgcagaggggacgattgaggtggaggacgaagggatcgaaactctcgaagaggtggccagtgctaaacaaagtgttaaatatatccagtccaccggttcttccgacgattcagcccttgcattgctggccgacatcacttctaagtatagacaaggcgacagaaaaggacagatcaaggaagacgggtgtccttcagacccaacaagcaaacaggagcatatgaaaagtcatagcaccgagtcattcaagtgcgaaatctgcaacaagcggtaccttcgcgaatccgcttggaaacagcacctgaactgttaccatctcgaggagggaggtgtctcaaagaagcagagaacaggaaagaaaatccacgtctgccagtactgtgagaaacaattcgaccatttcggccactttaaagagcaccttagaaagcacaccggcgaaaagccttttgaatgtccaaactgtcatgagcggtttgcacggaatagtacgctaaagtgccacttgacagcatgtcagacaggagtaggcgctaagaaaggaagaaaaaaactgtatgagtgccaggtatgcaacagcgtcttcaattcctgggaccagtttaaagaccatctggtgattcataccggggacaagcccaaccactgcaccctctgtgacctatggttcatgcaaggcaacgaactgcgtcgccatctctcagatgcacacaatattagcgagaggctggtgactgaggaagtgctctctgtggagactagggtacagactgaaccggttacatcaatgacgattatagagcaagtcggaaaggttcatgtgttgcctctgcttcaggtccaagttgatagcgcacaagtgaccgttgagcaggtccatcccgatctgctacaggattcacaggtccacgacagccacatgtccgaactgcctgagcaagtgcaagtaagctatctagaggtggggagaatccagacagaagagggaaccgaggttcatgttgaagagctccatgttgagagggtaaatcagatgcctgtggaagtgcagaccgagctactcgaagccgatctggaccacgtgacacccgagataatgaaccaggaggaacgcgagtcatctcaggcggacgctgcggaggctgctcgggaagatcacgaggacgccgaagatctggaaaccaagccgacagtggattcagaggccgagaaggcggaaaatgaagaccgtactgcattgccagtgttagagtag

SEQ ID NO: 247266 - DNA, 1872 bp, synthetic construct
  misc_feature 1..1872: note = Description of Artificial Sequence: Synthetic coding sequence
  source 1..1872: mol_type = other DNA
atggaggccgaagaaaccatggagtgtttgcaggagttcccagagcatcataaaatgatactcgatagactgaatgagcagagggaacaggatcgattcactgacattaccctcatagtggatggacatcacttcaaagctcataaagccgtcttggcagcttgtagcaaatttttttacaaattctttcaggagttcacacaagaacctctcgtggaaattgaaggcgtgtctaagatggcattcagacacctaatcgaatttacttacactgccaagctgatgattcagggggaagaggaggctaatgatgtatggaaagctgccgaattcctgcaaatgctggaggccataaaggccctcgaagtccgaaataaggaaaattccgcccctttagaggagaatacgaccggcaaaaacgaggcaaagaagagaaaaatcgctgagacctccaacgtaatcacggaatctctaccgagtgccgaatccgagcccgttgagattgaggtggaaatcgctgagggcacaattgaagtggaggatgagggtattgaaaccctggaggaagtggcaagcgctaagcagtccgtgaagtatatccagtctaccgggtcctctgacgatagcgctctcgcgctgttggcagatatcacatccaagtatagacagggcgaccgcaagggccagatcaaggaggacgggtgtccctccgaccctacttccaaacaggtggaaggcattgagatcgttgaactgcaattgtcacatgtgaaagacttattccactgcgagaagtgcaaccgatcctttaagctgttctaccacttcaaggagcatatgaagagccatagcacagagagctttaaatgtgaaatatgcaacaaaaggtatcttagagagagtgcatggaagcagcacctgaattgctaccatctcgaagagggcggagtgtccaaaaagcagcgtacaggcaagaaaatccatgtgtgccagtactgtgagaagcagtttgaccacttcgggcactttaaggagcatctcaggaagcataccggcgaaaagcctttcgagtgtccaaattgccatgagagattcgccaggaattctacacttaagtgtcatctcacagcatgtcaaactggtgttggggcaaaaaagggacggaagaagctgtacgaatgccaggtctgtaattccgtctttaattcttgggatcagtttaaggatcatctggtcatccacaccggtgataaacccaaccattgtactttgtgcgacctttggtttatgcagggaaatgagcttcgtcggcatctgagcgatgctcacaatatttccgagagacttgtcaccgaagaagtcctcagcgtcgaaaccagagtccaaactgaacccgtgacttctatgaccattattgaacaggtcggtaaggtccatgtgctacctttactccaggtgcaggttgacagcgcacaggtgaccgtggaacaggtgcacccagacctcctgcaggattcccaggtgcacgattcacacatgagtgaactgccagaacaggttcaagtgtcttatttagaagttggaagaatccagaccgaagagggtaccgaggtacatgtagaggaactacatgttgagcgcgtaaaccagatgccagtcgaagtccagacagagctgttggaagcggacttagatcacgttacacccgaaatcatgaaccaggaggaaagagagtctagccaagctgatgcagccgaagctgccagggaagaccacgaagacgcagaggatctcgagacgaaacctacagttgacagcgaagccgagaaagccgagaacgaggatcgtaccgccctgccagtgctggagtag

SEQ ID NO: 247267 - DNA, 1770 bp, synthetic construct
  misc_feature 1..1770: note = Description of Artificial Sequence: Synthetic coding sequence
  source 1..1770: mol_type = other DNA
atggaggcagaagagactatggaatgtctgcaggagttccccgagcatcataagatgatcctagataggctgaatgaacagcgcgaacaggacaggtttacggatatcacgctgattgtggacggacatcactttaaggctcataaggctgtgctagccgcttgcagcaagtttttttataaattcttccaggaattcacccaggagccattggttgaaattgagggcgtgtcaaaaatggcttttcgccatctgatagagtttacctatacagctaagctgatgatccagggagaggaagaggccaatgatgtctggaaggcggctgagttcctacagatgctggaagccatcaaggcattggaggtgagaaataaggaaaatagtgcaccgctggaagaaaacaccacagggaagaatgaagcaaagaagagaaagatcgccgagaccagcaacgtcatcacggagagcctgccttcggccgagagcgagcccgtggagatcgaggtggagattgctgagggcaccatcgaagttgaggacgaggggatagaaaccttagaggaagtagcatccgcaaagcagtccgttaagtacattcaaagcactggcagcagtgacgactctgccctcgccctcctggccgacatcactagcaagtatcgccagggtgacagaaagggccaaattaaggaagatgggtgtccatcagatcccacgagcaaacaggaacacatgaaaagccattccactgaatcctttaagtgtgagatctgcaataaacgataccttcgggagagtgcttggaaacagcacctcaattgttatcatctagaggagggcggtgtgtcaaagaagcagaggactggaaagaaaattcacgtatgccagtattgtgagaaacaattcgaccattttggacactttaaggagcacctaaggaagcacacaggagagaaacccttcgaatgccccaattgtcatgagcgctttgccaggaacagtacactaaaatgtcacctgacagcctgtcaaactggcgtgggtgcgaagaaaggtcgaaagaaactgtatgaatgtcaggtctgcaattctgtctttaatagttgggatcagttcaaagaccacctggtgatccatacaggcgacaagccgaaccattgtacactgtgcgatttgtggttcatgcagggcaacgaactgcgcagacatctgtctgacgcacacaatatttcagaacggctggtgactgaagaggttctgtctgtggaaacacgcgtccagacagagcctgtgacctctatgaccattattgaacaggtgggaaaagtgcatgtactccctctcttacaggtgcaggttgattcagctcaagtgactgtcgagcaggtgcacccagacctgttgcaggactcccaggtccatgattcccacatgtcggaactgcccgaacaggtacaagtgagctacctggaggttgggcgtatacaaacggaagaggggactgaagtccatgtggaggagcttcacgttgaaagggtcaatcagatgccagtggaggtgcagaccgagctgcttgaggctgatcttgaccacgttaccccagagatcatgaaccaggaggagcgggagagcagccaggccgacgctgcagaggccgctagagaggaccacgaggacgccgaggacctcgagaccaagccgacagtggattctgaagctgaaaaagcggagaatgaagaccgaactgcgctgccagtcttggaatag

SEQ ID NO: 247268 - DNA, 456 bp, synthetic construct
  misc_feature 1..456: note = Description of Artificial Sequence: Synthetic coding sequence
  source 1..456: mol_type = other DNA
atggaggccgaggagactatggagtgtttgcaggagttccccgagcatcacaagatgattctggatcggctgaacgagcagagggagcaggatagattcactgacataaccctgattgtggacggtcaccatttcaaagctcataaagctgtgttagctgcctgttccaagttcttctataaattcttccaagagttcacccaagaacctcttgttgagattgagggtgttagtaagatggcatttcgccatctcatagagtttacgtacactgctaagctcatgatccaaggggaagaagaggccaatgacgtgtggaaggctgcagaattcctgcagatgctggaagccattaaagcactcgaagtgcgtaacaaagagaacagcgccccactggaggaaaatactactggaaagaacgaagcaaagaagcggaaaatcgcagaaacctcgtag

SEQ ID NO: 247269 - DNA, 1872 bp, synthetic construct
  misc_feature 1..1872: note = Description of Artificial Sequence: Synthetic coding sequence
  source 1..1872: mol_type = other DNA
atggaggccgaagaaaccatggagtgcttgcaagagtttcccgaacaccataaaatgatcttggaccggctgaacgagcaaagagagcaagatagattcactgacataaccttgattgtggacggccaccatttcaaagctcacaaagctgttcttgcggcttgttcaaagtttttctacaagttcttccaggaatttacccaggagcccctggtcgagattgaaggcgtttctaagatggctttccgccacctcattgaattcacctacactgcgaagctcatgatccaaggggaggaggaagccaacgacgtgtggaaagccgctgaatttctgcagatgcttgaagccattaaagcccttgaggtcaggaataaagagaactctgctcccctggaagaaaacactactggcaaaaacgaggcaaagaagagaaaaattgctgagacatcaaatgtaattacagaaagccttccgtcagcagagtccgaacctgttgagattgaggtggagatagctgaaggaactatcgaagtggaagatgagggaattgaaaccctggaggaggtggccagcgccaaacagagtgttaagtatattcagagcactggttcttccgacgactcggccctggccctgctggctgatattacctcgaagtatcgacaaggcgaccggaagggtcagataaaggaagatggatgtccctccgacccaacttccaagcaagtcgaaggaattgaaatagtggaactccagttgagccatgtcaaagatctgttccactgtgaaaaatgcaataggtccttcaagctcttctatcacttcaaagagcacatgaaatctcattccacagagtcgttcaaatgcgagatctgcaacaagaggtatcttcgagagtctgcttggaagcagcacctaaattgttaccacctagaggagggaggggtgagtaaaaaacaacgcacggggaaaaagattcatgtgtgccaatactgtgaaaaacaattcgatcattttggccacttcaaggagcacctccgcaaacacacgggagaaaagcctttcgagtgtccgaactgccacgagagattcgccaggaattcaacattgaaatgccacctcacagcctgtcagactggggtaggtgccaagaaaggcaggaagaaactgtatgaatgccaggtctgcaatagcgtgttcaactcctgggatcagtttaaggaccacttggtgatacatacaggagataaacccaaccactgtactctttgcgatctatggttcatgcagggaaatgaactgcggaggcatctgagcgatgctcacaatatctccgagcggctcgttactgaagaagtactgagcgtggaaactcgcgtgcagaccgagcctgtgaccagtatgaccatcattgaacaggtgggaaaagttcatgtactccccttattacaggttcaggttgatagcgcccaagtcaccgtggaacaggtccacccagatttgctgcaggattcacaggttcacgatagccacatgtccgaactgcctgagcaggtgcaggttagctacttggaagtcggtcgaatccaaacagaagaaggcacggaggtgcatgtagaagaactgcatgtcgagagggtgaaccaaatgccagttgaagttcagacagagttgctagaagctgatctggaccatgttacacccgagattatgaaccaggaggagcgagaatcaagccaggcagatgccgcagaggccgcaagagaagatcatgaggatgctgaggacctggagacaaagccaactgtcgattcagaagctgagaaggccgagaatgaggaccgaacggccttgcccgtgctggagtag

SEQ ID NO: 247270 - DNA, 420 bp, synthetic construct
  misc_feature 1..420: note = Description of Artificial Sequence: Synthetic coding sequence
  source 1..420: mol_type = other DNA
atggaagcagaagagacaatggagtgtctgcaggagtttccggagcaccataaaatgattctcgatcggctgaatgaacagagagagcaggatcgattcacggatatcactctgattgtggatggccatcatttcaaagctcacaaagccgtgcttgctgcttgctccaaattcttttacaagttctttcaggagttcactcaggaacccctcgtggagatcgagggagtgtcaaagatggcattcaggcacctgatcgagtttacatacacagctaaactaatgatccagggcgaggaagaagccaacgacgtttggaaagcagccgagttcctccagatgctggaagcaatcaaagcccttgaggtgcgcaacaaagaaaatagcgcccctctcgaagagaacacgaccgggaaatag

SEQ ID NO: 247271 - DNA, 1770 bp, synthetic construct
  misc_feature 1..1770: note = Description of Artificial Sequence: Synthetic coding sequence
  source 1..1770: mol_type = other DNA
atggaagccgaggaaacgatggaatgcctacaggaatttcccgagcaccacaagatgatcttggatcggctcaatgaacagcgagagcaagatcgcttcacggatatcaccctcatcgtcgacggccaccattttaaagcacataaagccgtactggccgcttgctccaagtttttctacaagttcttccaggagtttacacaagagcccttggtcgagatagagggcgtgtcaaagatggcgtttaggcacctgatcgaattcacttataccgcgaagctaatgattcagggagaagaagaggcaaatgatgtgtggaaggctgcagaatttctgcagatgttggaagccattaaggctttggaggtgcgtaacaaagaaaattccgccccactggaagaaaacactactggcaagaacgaagccaaaaagagaaaaatcgccgagacgtcaaacgtcattacagagagcctgccaagtgcggagagcgagcccgtggaaatcgaggtagagatcgcagagggtaccatagaagtggaagacgaaggaattgagacgctggaggaggtagcctccgctaagcagtctgtcaagtacatacagtcgacaggaagctccgatgacagcgcgctggctctgctggcagatatcacgagtaagtaccgccagggcgatagaaaggggcagataaaggaagatggttgtccctcggacccaacttccaagcaggagcatatgaaatctcatagcactgaatcatttaaatgcgaaatttgcaataagcgatacctgcgcgagagtgcttggaagcagcacctcaactgttatcacttagaggagggcggagttagcaagaagcaaagaactggcaagaagatccatgtgtgtcagtactgcgaaaaacagtttgatcacttcggacactttaaagagcatctcaggaagcatacaggtgaaaaaccttttgagtgtccaaactgccacgaacggtttgcacggaatagtacccttaagtgccatctcaccgcatgtcaaaccggcgtgggcgcaaagaaggggaggaaaaagctctatgagtgccaagtctgtaattccgtcttcaattcatgggaccaatttaaggaccacctggtgatacacacgggcgataaacccaaccactgtacactatgcgacttgtggtttatgcagggtaatgagctcaggagacacctctcagatgcgcacaatatatccgagaggcttgtcacagaagaagtactgtccgtggagacccgcgttcagaccgaaccagtgacaagcatgacgataatagagcaggttggtaaagtgcatgtgcttcctttgcttcaggtccaggtggattcggcccaggtgactgttgagcaggtgcatcccgatctgctgcaggattctcaggtgcacgacagtcatatgagcgagttaccggaacaagtccaggtgtcctacctggaagtgggtagaattcagacagaggagggcacggaggtgcatgtggaagagcttcacgtggaacgcgtgaatcaaatgccggtggaggtgcaaactgaactcttggaagccgacctcgaccatgtgacccctgagatcatgaatcaggaggaacgggagtcgagccaagccgatgctgccgaagccgcacgcgaggaccacgaagacgcagaagacctggaaaccaagcctactgtcgattcagaagccgagaaagctgagaatgaagataggactgccctaccagtgctggagtag

SEQ ID NO: 247272 - DNA, 798 bp, synthetic construct
  misc_feature 1..798: note = Description of Artificial Sequence: Synthetic coding sequence
  source 1..798: mol_type = other DNA
atggaggcagaggagacaatggaatgtcttcaagaatttcctgaacaccacaagatgattttggataggctcaatgagcaacgagaacaggatagattcaccgatattaccctgatcgtggacggccatcactttaaggcccacaaagcggtgctggcagcctgctccaagttcttctataaattttttcaggaatttactcaggagccgcttgtcgaaatcgaaggtgtgagtaaaatggcttttcggcacctgatcgaattcacatataccgctaagctgatgattcaaggagaggaagaggcaaatgacgtctggaaagcggctgaatttctccagatgttagaggctattaaggccctggaagttcgaaacaaagagaattctgcccctctcgaggagaacacaacaggaaagaatgaggcgaaaaaacgaaaaatcgctgagacctctaacgtgattactgaaagcctgccaagcgccgagagtgagcctgtcgaaatagaggttgagatcgcagagggcactatagaagtggaggatgagggcattgagacactggaggaggtggctagtgctaagcagtccgtcaagtatatccagtcaacaggttcgagcgacgacagtgcactggctctactggcggacatcacatctaagtatcgccaaggcgatagaaagggacagattaaggaggacggctgcccctccgaccctacatcaaagcaggaacatatgaaatctcatagcacagaaagtttcaaatgtgaaatctgtaataagcgctacctgcggtag

SEQ ID NO: 247273 - DNA, 2121 bp, synthetic construct
  misc_feature 1..2121: note = Description of Artificial Sequence: Synthetic coding sequence
  source 1..2121: mol_type = other DNA
atggccctcccatccccccaggtgctcatgggcctcccagcattactaatgggacctgcgcaacacacttcttggccgtgcggtagtgccgttcccacccttaagtccatggtgacctttgaagacgtcgctgtgtacttctcgcaggaggaatgggagctgctggatgccgcacagaggcacctttatcactcggtgatgctagagaacctcgaactggtgaccagtcttggaagctggcacggcgtggagggcgagggtgcccatcccaaacagaacgtgtccgttgaagtgctgcaggttcgcattccaaatgccgatccatccactaaaaaggctaattcttgtgatatgtgcggtccctttctcaaggacattctccacctggccgaacatcagggtacccagtctgaggagaaaccctacacgtgtggcgcttgtggtagagatttctggcttaacgctaacctgcatcagcaccagaaggagcactctggcggaaagccgttccggtggtataaggatagagacgcccttatgaaaagcagcaaagttcacctgtccgagaatccattcacctgcagagaaggcggaaaggtgatcctgggcagctgtgacctgctccagctgcaggcagtggatagcgggcagaagccatattcaaatctgggtcagctgcccgaggtgtgcaccacacaaaaattgttcgagtgttccaactgcggcaaagcttttcttaagagctccaccctgccaaaccacctgcgcactcacagcgaagaaatcccttttacatgcccaactggtggcaacttcctcgaggagaaatcaattctgggaaacaaaaagttccatactggcgagatccctcacgtgtgcaaagagtgtggtaaggcgtttagccacagcagcaagctgcgtaaacatcagaaattccatactgaggtgaagtattatgagtgcattgcatgcggcaaaacatttaaccacaagctaacttttgtccatcaccaaaggatccatagcggagaaaggccttacgaatgtgacgagtgcgggaaggccttctcgaatcgatcgcacctgatacgccacgaaaaagtccatacgggcgaaaggcctttcgaatgtctgaagtgtggacgcgctttttcacagagcagcaactttctacgccaccagaaagtgcatactcaggtgcgaccttatgagtgctcccaatgtggaaaaagcttcagtaggagttcggccttaatccagcactggagggtacataccggcgagcgaccatatgagtgctctgaatgcgggcgagccttcaataataattcaaacctggcacagcaccaaaaagtgcacaccggagaaagacccttcgaatgcagcgaatgcggaagagattttagccagagcagccatctcttgcgccaccaaaaggttcacaccggggagaggccatttgaatgttgtgattgcggaaaagcattttctaattcaagcacactgatacagcaccaaaaagttcatacagggcagaggccttacgagtgttctgagtgccggaagtcattctcccggtcttctagcctcattcaacactggcggatccatacaggcgaaaaaccctatgaatgtagtgagtgtggcaaggcttttgctcacagttctaccctcatcgagcattggagggtgcacactaaagaacgcccatacgaatgtaatgaatgcggaaagttttttagccagaactccattctgatcaaacatcagaaagtacacactggcgaaaaaccttacaaatgctctgagtgtggtaaattcttcagccgtaaaagttcattgatctgtcactggagggtacatactggggagagaccttatgaatgttccgagtgcggaagagctttttctagtaattcacatcttgtgcgtcaccagagggtccacactcaggaacgtccctatgagtgcatacagtgcgggaaggccttctccgaaagatccacactggtgagacaccagaaagtccacactcgggaacgcacgtatgagtgctcccagtgtgggaagctgttcagccacctgtgtaacctggcacaacataagaagatccatacctag

SEQ ID NO: 247274 - DNA, 1191 bp, synthetic construct
  misc_feature 1..1191: note = Description of Artificial Sequence: Synthetic coding sequence
  source 1..1191: mol_type = other DNA
cctacacttaagagtatggttacattcgaagacgtggctgtctacttctcccaggaggaatgggaactcctcgatgcagctcagaggcacctttaccattccgttatgctcgagaacctcgaactggtgacttccctggggaacgccctgagccaacatgtgtgtttgttccccatagagagttcagtacatcctaaggcccgatcttgggtcctcctgcctagtagggtgagttgttgtaggtgctggggggctgaggtattattaggagttgagggtgagggggctcatcctaaacagaacgtgtctgttgaggttctacagcaccaaaaggagcacagtggtggaaagccgtttaggtggtataaggatagttccgggcagaagccatacagcaatctggggcaacttcccgaggtgtgtactacccaaaaactcttcgaatgtagcaactgtggtaaggcctttctgaaatcttcaactttgcccaatcatttacgaacacactccgaggagatccctttcacatgccccaccggcggtaatttcttagaagagaagagcatcctaggtaacaagaaatttcatacaggtgagattccgcatgtgtgcaaagagtgcggaaaggctttcagccattcttctaagctccggaagcatcagaagtttcatacagaggtccgtccctatgagtgttcccaatgcgggaagagttttagtcggagtagcgccttgatacagcactggaggatacacacgggcgagaagccatacgagtgctcagagtgtgggaaagcatttgctcactcctccacgctgatcgagcactggcgtgtccataccaaagaacgcccatatgaatgtaacgagtgcggcaagtttttctcccagaatagcatcttaatcaaacatcagaaagtccacacgggcgagaagccctacaaatgttccgagtgtggaaagtttttctctcggaaatcatccttaatatgccactggagagtccataccggagaacgcccatatgagtgttccgaatgtggcagagcattctcctccaattcgcatctggtaaggcatcaacgcgtgcatacgcaagaaaggccctacgaatgcatccagtgtggcaaggctttttccgagcgcagcacactggtgcgacaccagaaggtgcacactagggagagatag

SEQ ID NO: 247275 - DNA, 1965 bp, synthetic construct
  misc_feature 1..1965: note = Description of Artificial Sequence: Synthetic coding sequence
  source 1..1965: mol_type = other DNA
atggcttttcgagatgtggccgtggatttcacccaagacgagtggcggttgctttcacccgctcagcggaccctttacagagaggtgatgctcgagaactatagtaacctcgtctccctcggaatttctttttccaaacccgagttgattacacagttagagcagggcaaggaaacttggcgggaagaaaagaagtgttcccccgctacatgtcctgcagatcccgaaccagaactctacctggatcctttctgtcccccagggttctcatctcagaagttccctatgcagcacgtcctatgtaatcacccaccatggatctttacctgtctctgtgccgagggcaacattcagccaggagaccctgggccaggtgaccaggagaagcaacaacaagcctctgaagggagaccttggagcgatcaggcagaggggcctgaaggtgagggagcaatgccgttgttcggacggacgaaaaagaggacgctgggggctttttctcgaccaccacagaggcagccagtttcatcccgaaacggactacggggtgtggaacttgaagcttctcctgctcagtccggaaatcctgaagaaaccgataagctcctgaagaggatcgaagttttggggtttggaaccgtcaactgtggcgaatgcggacttagcttctccaagatgacaaatttgcttagtcatcagagaatccatagcggagaaaagccctatgtttgcggtgtttgtgagaaggggttttccctgaaaaagtcattggcacggcatcagaaggcccacagtggcgagaaaccaattgtgtgtagggagtgtggaaggggatttaacaggaagagcaccctaatcatccacgagaggacccacagcggagagaagccctacatgtgctccgagtgcggtagggggttcagtcagaagtcaaacctgattattcaccagcgaactcattccggcgagaaaccgtacgtgtgtcgcgaatgcggcaagggattctcacagaaatccgccgtggtccggcaccaacgcactcacctggaggaaaagacgatcgtctgttcagattgcgggctcggattctctgataggagcaatctgatcagccaccagcggacacacagtggtgaaaaaccttatgcctgcaaggaatgcggcaggtgcttccgacagagaaccacactcgttaatcatcagcgcactcatagcaaggaaaaaccttatgtctgcggcgtctgtggccattctttctctcagaatagtactctgatatctcaccggagaacgcacacaggagagaaaccttatgtgtgcggagtgtgtgggaggggtttcagtttaaaatcccacttaaacaggcatcagaatatccacagtggcgaaaaaccaattgtgtgcaaagattgtggcagaggcttctcccagcagtcaaatctgatcagacaccaacggacccacagtggcgaaaagccaatggtgtgtggggagtgcgggagggggtttagtcaaaaaagcaatctcgtggcccaccaaagaactcattccggcgagaggccctatgtttgtcgcgaatgcggtcgtggctttagtcaccaggccggtctgattagacacaaaagaaaacactctagagagaagccatacatgtgccgccagtgcggactgggatttggtaataagagcgctctaataacacacaaaagagcccattccgaagagaagccctgtgtgtgtagggaatgcggtcagggcttcctgcagaagtcccaccttaccctgcatcagatgacccacactggcgaaaagccttatgtatgcaagacttgcggcaggggttttagcttaaaaagtcatctgtccaggcacaggaagactaccagcgtacaccatcggctgcccgtccagcccgatccagagccctgcgcaggccagccatcagatagtctttatagtctctag

SEQ ID NO: 247276 - DNA, 300 bp, synthetic construct
  misc_feature 1..300: note = Description of Artificial Sequence: Synthetic coding sequence
  source 1..300: mol_type = other DNA
atggcttttagagacgtcgcggtggacttcacacaggacgagtggagactattgtcaccagctcagcggaccctctaccgtgaggttatgctggagaattactctaacctggtttctcttgggatttctttcagcaagcccgaattgatcacacaactcgagcagggaaaggagacttggcgggaagagaagaagtgcagcccagccacctgtccagaccatcaggaatatggaaacaattgtgatctgcaaaaagaggccgaccctgagccagagctgtatctggatccgttctgttag

SEQ ID NO: 247277 - DNA, 1962 bp, synthetic construct
  misc_feature 1..1962: note = Description of Artificial Sequence: Synthetic coding sequence
  source 1..1962: mol_type = other DNA
atggcttttagagacgtcgcagtggatttcactcaggacgaatggagactcttgtctcctgctcaaagaacactgtatagggaggtgatgttggagaactattcaaatctggtttctttgggtatcagtttctcaaagcctgaactaatcactcagctggaacagggtaaagagacctggagggaggaaaaaaagtgtagcccagccacttgccctgaccctgagcccgaactctatctagacccattttgccctccaggctttagctctcaaaagtttcccatgcaacacgttctgtgcaatcatcctccatggattttcacttgtctgtgtgccgaaggtaatatacagcctggtgaccccggacccggagaccaggagaagcagcaacaggcctcggaaggccgaccttggagcgatcaagctgagggccctgagggcgagggagcaatgcccttgtttggtcgtactaaaaaaagaaccctgggggctttctcaagacccccacagaggcagccggttagcagccggaacggtttaaggggagttgagttggaagcatcacccgcacagtctggaaatccagaggaaaccgacaagcttctgaagagaattgaggttctcggattcggcacagtgaattgcggcgagtgcgggcttagcttcagcaagatgacgaacttactgtcccaccaacgaattcacagcggggagaaaccttacgtctgcggagtatgtgagaagggattttcattgaagaagtccttagctaggcaccagaaggctcactccggcgaaaaaccaatagtgtgcagggaatgtggaagggggttcaacagaaaatcaaccctcataattcatgagcggacccatagtggagaaaaaccatacatgtgctcagaatgtgggaggggcttcagtcagaaatccaacctgatcatccatcaaaggactcacagtggggaaaagccttatgtctgtcgtgaatgcggtaaggggttctctcagaaaagcgctgtggtgagacatcagaggacacacctggaggaaaaaaccatcgtgtgcagcgactgcgggttaggcttttcagatcggtctaaccttatctcacatcaacggacccattctggtgaaaagccctatgcgtgcaaggagtgcggcaggtgttttaggcagcgaacgactctcgtcaaccaccagaggacacactccaaagagaaaccctatgtctgcggagtgtgtgggcacagcttcagccagaattcaactcttataagccaccgcagaacccacacaggcgagaagccatatgtctgtggagtgtgtggacgtggattctctctcaagtcccatcttaatcgccaccagaacatccactctggtgagaagcccatcgtttgtaaagactgcgggaggggattctcacagcagtcaaatctcatccgccatcagcgtacccactctggagaaaagccaatggtgtgcggggaatgcggcagagggttttcccagaagtcaaatctggtggctcaccaacgcacacattccggagaacggccttacgtttgtcgggagtgcgggagagggtttagccatcaggcaggcctgatcagacataagcggaagcacagccgcgaaaaaccttatatgtgtaggcagtgcggcctgggcttcggcaacaagtccgctctgattacccataaacgcgcacacagcgaagaaaagccctgcgtctgtagagaatgtggccaggggttcctgcagaaaagccacctgaccttgcatcagatgactcacacaggcgagaaaccttacgtctgcaagacctgcggccgtgggttctcactcaagtcccacctctctagacatagaaagacaacttccgtacatcacagattgcctgttcaaccggaccctgagccatgcgccggtcaaccttcggactctctctactctctatag

SEQ ID NO: 247278 - DNA, 1974 bp, synthetic construct
  misc_feature 1..1974: note = Description of Artificial Sequence: Synthetic coding sequence
  source 1..1974: mol_type = other DNA
atggcccacatggcctttagggacgtcgcggtggatttcacccaagatgaatggcgcctcctaagcccggctcagagaacactgtatagggaagtgatgcttgagaactactcgaacctcgtgtctttgggcatctcattctcaaagccggaactgatcacgcagctcgaacaaggaaaggagacctggagggaagaaaaaaagtgttcacctgccacttgccctgccgatccagaacccgaactgtacctagatccgttttgcccacctggctttagcagccagaagtttccaatgcagcacgttctgtgcaaccacccaccttggatcttcacttgtctgtgcgccgaagggaacatccagcctggggatcccggtcccggtgaccaggagaaacagcagcaagcctccgagggacgtccctggagtgatcaggccgaaggccctgagggcgagggcgcaatgcccctgttcgggaggactaagaagcggaccctcggagccttctcccgcccaccacaaaggcagcccgtcagctcccgcaatggactgaggggcgtggagttagaggcaagccctgctcagtctggcaatcccgaagagaccgataagctcttaaaaaggatcgaggtgttaggatttgggacagtaaactgtggagagtgcggcctgtctttcagcaaaatgaccaaccttctctcccaccagcggattcattccggggaaaagccatatgtgtgtggagtgtgcgagaaggggttttcactgaagaagtccctcgcacggcatcagaaggcacactctggagaaaagccaatagtgtgtagagaatgcggccgtgggtttaataggaaatccacactgataattcatgagcgtactcactctggggagaaaccctatatgtgctccgagtgtggcagaggcttctcacagaagtcgaacttgatcatccaccagcggactcattctggagagaagccctacgtctgcagagagtgtggcaaaggtttcagtcaaaaaagtgctgtcgtgcgccatcagagaacacatctagaggagaagacaatcgtctgctctgattgtggtctagggtttagcgaccggtcgaatctgatctcccaccaacgtacccactcaggcgaaaagccatatgcctgcaaagagtgcggcaggtgtttccgtcagcggaccacactcgtcaaccaccaacgcacccactccaaagaaaaaccatatgtgtgtggtgtctgcgggcactccttcagccagaattctactttaatatcacatcgtagaacccataccggcgaaaaaccatatgtttgtggtgtatgcggaagagggttcagcttaaagtctcacctgaaccgccatcagaatattcattctggggaaaagcccattgtctgcaaagattgcggccgtggtttcagccagcagagtaatctaatccggcatcagagaacccattcaggagaaaaacctatggtgtgcggcgagtgcggccgtggatttagccagaagagtaacctcgtcgcccaccagcgcactcacagtggagaacgcccttacgtgtgccgcgaatgtggaagagggttctcacaccaggcgggactcatccgacacaagcggaaacacagccgtgaaaaaccatatatgtgccgacagtgcgggttgggatttggaaacaaatctgcgttaatcactcataaacgtgctcactctgaagaaaagccatgcgtttgccgtgagtgtggtcaaggctttctccagaaatcccatctgaccctccatcagatgacacacactggagagaaaccatacgtgtgtaaaacatgtgggagagggtttagtctgaaatcccatctgtcgagacatcgcaaaaccacgtcagtccaccataggcttcccgtacagcccgatcctgagccatgcgcgggacaaccttctgattccctgtattctctatag

SEQ ID NO: 247279 - DNA, 1965 bp, synthetic construct
  misc_feature 1..1965: note = Description of Artificial Sequence: Synthetic coding sequence
  source 1..1965: mol_type = other DNA
atggctttccgcgatgtcgctgtggatttcacacaggacgagtggcgtctgctttctccggctcaacggacactgtacagggaagtgatgcttgaaaactacagcaatctggtctccctcggaatttcatttagcaagcccgagctcattacacaactggaacagggaaaggaaacatggagagaggagaagaagtgcagtcccgctacatgtcctgctgatcctgaaccagagttatatctcgacccgttttgtcccccagggttttcctcacaaaagttcccgatgcagcatgtcctctgtaatcaccctccatggatcttcacatgtctctgcgcagagggtaatatacagcctggagatcctggtccaggggaccaggaaaaacagcaacaggcttccgaagggcgaccctggagcgaccaagcggaaggccctgagggagagggagctatgccattattcggacgcactaagaaaagaactttgggcgcattttcccgacccccacagagacaacctgtgagttctcggaatggcctgagaggagtcgagctggaggcatcccctgcccagtcaggcaaccccgaggaaaccgataagctgttgaagcgcatagaagtgctcggatttggaacagttaattgtggtgaatgcggcctctccttcagtaagatgactaatttacttagccaccaacgcatccacagcggggaaaaaccgtatgtatgtggcgtgtgcgagaagggattttctctaaaaaagtccctggccagacaccagaaggctcacagcggtgagaagcccattgtttgtagggaatgtggtcgcggatttaatcgcaaatcaactctgattattcacgagaggactcacagcggcgagaaaccctacatgtgcagcgaatgcggtcggggttttagccagaaaagcaatctaataattcaccagaggacccattcaggtgagaaaccgtatgtttgcagagaatgcggcaaaggattctcccagaagtccgcagtagtgcgccatcaacggactcacttggaggagaaaacaatcgtgtgctccgactgtgggctcggattctctgaccgatcaaacctgatcagtcaccagcgcacccactcgggagaaaaaccatatgcttgcaaggaatgtggcagatgcttccgccagcggactacactcgttaaccaccagagaacacatagcaaggagaagccatatgtgtgtggagtgtgcggccacagcttttcacagaattccactctgatttctcaccgacgtacccatacaggggagaaaccttatgtctgcggcgtgtgtggaagggggttctctttgaagagccacctgaatcggcaccaaaacatacactctggcgaaaagcctattgtctgcaaggactgcggcaggggcttttcacagcaaagcaatctcattcgtcatcagaggacccacagtggcgagaagcctatggtgtgcggggagtgcggcagagggtttagccagaagagtaacctcgtggctcatcaaagaacgcacagcggtgagaggccttatgtatgccgcgagtgcgggagaggattctctcatcaagccggattaattagacacaagaggaagcactcaagggagaaaccctatatgtgccggcagtgtgggctgggatttggaaacaagagcgccctgattacccataagagggcacattctgaggaaaaaccctgcgtctgccgcgaatgcggccaggggttcctgcaaaaatctcacctcaccctgcatcagatgactcacaccggtgagaagccttacgtttgtaaaacctgcggcaggggattctccttgaagtcccacctgtcacgccatagaaagacaacttcggtgcaccatagacttcccgtgcagcccgatcctgagccctgcgcaggacagccgtcagattctttatactctctgtag

SEQ ID NO: 247280 - DNA, 1776 bp, synthetic construct
  misc_feature 1..1776: note = Description of Artificial Sequence: Synthetic coding sequence
  source 1..1776: mol_type = other DNA
atgtgcaacggtagaaagacagtactcgcagacccggagcctgaactgtacttggatccgttctgtccgccaggattttcaagtcagaaatttcccatgcagcatgtattgtgcaatcaccccccttggatctttacttgtctgtgtgctgagggcaatattcagccaggagaccctggtcctggggaccaggaaaagcaacaacaggcttcggaggggaggccctggtccgatcaggcagaagggccagaaggagagggcgcaatgccactgttcggccgaacaaaaaagcggactctaggggctttcagccgacccccacagagacagccagtttcaagccgcaacggactgcggggtgtcgagctggaggctagtccggcacagagcgggaatcctgaagaaacagacaagctgctgaagcgcattgaggtgctgggcttcggcaccgtgaattgcggggagtgtggcttgtcgttttccaaaatgactaacttgctgtctcaccagcgtattcatagtggcgagaagccctacgtttgcggcgtctgtgaaaaaggattctcactgaaaaaatccttagcccgacaccaaaaggcccactctggcgaaaagcccatagtgtgtcgcgaatgtggacgaggctttaaccggaagagtaccctcataatccacgagagaactcactcaggggaaaagccttacatgtgctccgagtgtggacgcggattttcccagaagagcaaccttataattcaccaacgtacccattctggggagaaaccttacgtgtgtcgggaatgtggcaaagggtttagccaaaaatccgccgtggtgagacaccaaaggacacacctggaggaaaagacaattgtgtgcagcgactgcgggcttggtttttcggacaggtcaaacttaatctcccatcagagaactcacagcggagaaaaaccctacgcctgtaaggagtgcggtagatgctttcgtcagcgcaccacacttgtgaatcaccaacgaactcatagcaaggagaagccatatgtttgcggagtctgtggccactctttcagtcaaaatagtaccctgatttctcatcgtaggacccacactggcgagaagccatacgtttgcggagtatgcggtaggggcttctcccttaaaagccatctgaatcggcatcagaatatacactcgggtgagaagccaattgtgtgcaaagactgtggccgtggtttctcccaacaatctaacctgatccggcatcagagaactcacagcggagagaagcccatggtgtgcggcgaatgcggccgtggcttctctcagaaaagcaaccttgtggcccatcagcggacccactccggagagcgcccttacgtttgtcgcgaatgcggacggggatttagtcatcaggcaggccttattcgtcacaagcggaaacatagtagagaaaagccatatatgtgccggcagtgtggactgggtttcggtaacaaaagcgccctcatcacacataagagggcgcatagtgaagagaagccatgtgtgtgcagagagtgcggacaggggttcttgcagaagagccatctcacactgcaccagatgacacacacaggagagaaaccatacgtgtgtaaaacttgcggtaggggattctccctgaagtcccatttgtctcggcatcggaagacgacttctgtccaccataggctccccgttcagccagatcctgagccatgtgctgggcagccttccgattcattatacagcctgtag

SEQ ID NO: 247281 - DNA, 540 bp, synthetic construct
  misc_feature 1..540: note = Description of Artificial Sequence: Synthetic coding sequence
  source 1..540: mol_type = other DNA
atggcatttcgggacgtagccgtggattttactcaagatgagtggcgactactgtcccctgctcagcgtacactctaccgcgaggtaatgctggaaaactacagcaatctggtgtccttgggtatatcgttcagcaagccagaattgattacgcagttagagcaggggaaagagacttggcgggaagaaaagaagtgtagccctgctacatgcccggcagacccagaaccggaattgtacctggatccgttttgcccccctggcttctcctcacagaagtttccaatgcagcacgtgctctgcaatcacccaccttggatttttacttgtctctgcgccgaaggtaacatacagcctggagacccaggtcctggagatcaggaaaaacagcagcaagcttcggagggaagaccttggtccgatcaagctgaaggtcctgagggagagggagccatgcctctctttggacggacaaagaagcggacactgggggcattctctcgcccacctcaaagacagcccgtatcctcccgtaactag

SEQ ID NO: 247282 - DNA, 432 bp, synthetic construct
  misc_feature 1..432: note = Description of Artificial Sequence: Synthetic coding sequence
  source 1..432: mol_type = other DNA
atggccttcagggacgtggccgtcgactttacccaagatgagtggaggcttttgtcccctgctcagagaacactttatcgtgaagttatgctggaaaactacagcaacttggtgagcctgggaatttccttttccaagcccgagctgattacccagctggagcagggcaaagagacatggagagaggagaaaaagtgttcaccggcaacatgtccagcagatcccgaaccggaactttacctggacccattttgccctccaggcttctccagccagaaatttcccatgcagcacgttctgtgtaaccatccgccttggatctttacatgtctgtgcgccgaaggcaatatccagccaggcgatcctggcccaggagaccaggagaagcagcagcaagcctcagaaggccgtccctggtctgaccaggcctag

SEQ ID NO: 247283 - DNA, 1680 bp, synthetic construct
  misc_feature 1..1680: note = Description of Artificial Sequence: Synthetic coding sequence
  source 1..1680: mol_type = other DNA
atgcagcacgtgctctgcaatcacccaccctggatattcacctgcctttgtgccgagggcaacattcagcccggagatcccggtcctggtgaccaggaaaagcagcagcaggcttctgaaggtcggccatggtcagaccaggcagagggcccagagggtgagggcgctatgccgttatttggtcgcactaagaaacgaactctcggcgcattctcaagacctcctcagaggcagcctgtgtctagtcggaatggtctgaggggcgtcgaactcgaggcctcacccgctcagtctggcaatccggaggaaacggataagctcctgaagcgaatcgaggtgctgggattcgggaccgtcaactgcggcgagtgtggcctcagtttctctaaaatgactaatctactgtctcatcagcggattcactcaggtgaaaaaccatatgtgtgtggcgtgtgcgagaaggggtttagcctgaaaaaaagccttgcacgacatcagaaggcccacagtggtgagaagcctatcgtctgtagagagtgcggtagggggtttaataggaagtcgacattgatcatccacgagcgtacacattctggcgaaaaaccatacatgtgtagcgagtgcggcaggggcttctctcagaagtccaatctgattatccaccagcggacacactccggcgaaaaaccctacgtatgcagggaatgcgggaagggcttctcccagaagagcgcggtagtgcgccatcaaaggacgcacctggaagagaagactattgtgtgtagcgattgtggacttggtttttcagacagaagtaacctgataagccatcagcgcacccatagcggagagaagccctacgcctgcaaagaatgtggcaggtgcttccgccagcggacaaccctggtgaatcatcaacggacccattccaaggaaaaaccctacgtctgtggagtctgtgggcatagcttctcacagaacagtacgttgattagccatcgcagaactcacacgggggaaaagccctatgtgtgcggagtatgtggtagaggattctctttgaagagtcacctaaatcgccaccagaatatacacagcggggagaaacccatcgtgtgtaaagattgtggacggggattctcccagcagtctaacttgattcgacaccaacgaacccactccggggaaaaaccgatggtctgcggcgaatgtggccgagggttctctcaaaaaagcaatctcgttgcgcaccagcggacacattctggcgaaaggccttacgtgtgccgcgagtgtgggcgagggttctcacaccaagcaggtctgatcagacacaagagaaaacatagccgggaaaagccttacatgtgccgccagtgtggcctagggtttggcaacaagtccgcccttattacacacaaacgtgcccactccgaggaaaaaccttgcgtctgtcgcgagtgtggccagggtttcctccagaagagtcacctgacattgcaccagatgactcataccggcgagaaaccctatgtgtgtaaaacttgtggacgtggattctctctcaagagccatttgtcccgacatagaaagactacctcggtgcaccaccgcttgcctgtacagccagatccagaaccatgcgccggacaaccctctgatagtctgtattctttgtag

SEQ ID NO: 247284 - DNA, 1680 bp, synthetic construct
  misc_feature 1..1680: note = Description of Artificial Sequence: Synthetic coding sequence
  source 1..1680: mol_type = other DNA
atgcagcatgtgctctgtaatcacccaccatggatcttcacgtgtctgtgcgcggagggaaatatacaacctggggatccaggacctggcgaccaagagaagcagcagcaggcctcagagggacgcccatggagcgatcaggcagagggacctgagggcgaaggcgctatgccgctgtttggacgaactaaaaagcgcacacttggggcattctcacgcccacctcagagacagcccgtgtctagtcggaacggattgcgcggagtagagttagaggccagccccgcacaaagcggaaatcctgaagagactgacaagctgcttaagagaatcgaggttctggggttcggtactgtcaattgcggtgaatgtggcctctcctttagcaagatgaccaacctgctgagccatcagcgcattcattctggggaaaagccatatgtttgtggtgtctgtgaaaagggcttctctctcaagaagtctttggcgaggcaccagaaagcacatagcggcgaaaagccaatcgtttgcagagagtgcgggaggggattcaacaggaagagtactttgataattcatgaacggacccactctggcgaaaagccttatatgtgcagcgagtgtggaaggggattctcacaaaaatctaacctcattattcaccaacgaacccattccggggaaaagccatatgtctgtagggaatgtgggaaagggttcagccaaaagagcgccgttgtgcggcatcaaagaactcatctcgaggaaaaaacgatcgtatgctccgattgcggtctaggcttcagcgataggtccaacttgatcagccatcagagaacacatagcggcgagaaaccatacgcgtgtaaggaatgtggcagatgcttccgccagagaactactctggtgaatcatcagcgaacccactccaaagaaaagccatacgtgtgtggggtgtgtgggcatagtttctcccagaatagcaccctcatatcacatcggagaacacatacaggggaaaagccctacgtttgcggcgtctgcggcagaggtttttcgctgaagtcccatctgaatcggcaccaaaatatccatagtggagagaaaccaatcgtgtgcaaagactgcggtcgcggtttttctcaacagtcaaacctcattcggcaccagaggactcatagtggcgagaagccgatggtatgcggagaatgtggtcggggattctcccagaagagcaacctggtggcgcaccagcgtacacactccggagagcgcccttacgtgtgtcgtgagtgtggtagagggttttctcaccaggctggcttgatcagacacaaaaggaaacattctagagaaaagccctatatgtgtagacaatgtgggctgggtttcggaaataaatctgcactgatcacccataagcgtgcacattcagaagaaaaaccatgtgtgtgtagggaatgtgggcagggattccttcagaagagccacctgacgctacaccaaatgacccataccggcgagaagccctacgtgtgcaaaacttgtggtaggggcttttcgcttaaatcgcacttatctcgccaccggaagacgacatccgttcaccacaggcttcccgtgcagcctgatcctgagccttgtgccggacagcctagcgacagtctgtacagtctctag

SEQ ID NO: 247285 - DNA, 1284 bp, synthetic construct
  misc_feature 1..1284: note = Description of Artificial Sequence: Synthetic coding sequence
  source 1..1284: mol_type = other DNA
atgaccctggtcaccgcgggtggggcatggaccggccctggttgttggcacgaagttaaggatgaggagagttcatccgagcagagtatcagtatcgccgtgtcacacgtcaacactagcaaggccggactcccggcacagactgcattgccatgcgacatttgcggacccatcttgaaagacattttgcacctcgacgaacaccagggaacgcaccacgggctaaagctgcatacctgcggagcatgtggtcggcagttctggttttccgcaaacctgcaccaataccagaagtgctactcaattgaacagcctctccgacgggataaatctgaagcctccatagtgaagaattgcactgtatcaaaagagccacacccatcggagaagccgttcacatgcaaggaggagcagaagaactttcaggcaactctgggcggttgtcagcagaaggctattcactcaaagcgaaagactcaccgaagcacagagagcggagacgccttccacggagaacagatgcactataagtgcagcgagtgcggaaaagctttctcccgaaaagacaccctcgtgcagcaccaacggatccattctggagagaagccatacgaatgctccgaatgcgggaaagccttctctcggaaagctaccctcgtgcagcatcagcgtattcataccggcgaacgaccttatgaatgcagtgagtgtggcaagacgttttctcgaaaggacaatctaacccagcataaacgtattcacaccggcgagatgccctacaaatgcaacgagtgcgggaaatatttttcccatcactcaaacctcattgtccaccagagagttcacaacggggctcgcccttacaaatgctctgactgtggtaaagtctttaggcacaagtccacactggtgcagcacgaaagtattcacacaggcgagaatccttacgactgtagcgactgtggcaaaagtttcggccacaagtatacccttataaaacatcagagaattcacacagaatccaaaccgttcgaatgcatagaatgtgggaaatttttctctaggagctctgactatatcgcacaccagagggtgcatacaggtgaaaggcccttcgtgtgttccaagtgtggcaaagatttcattcgaacctcgcatctggtgagacatcagcgagtgcatacgggagagcgcccatatgaatgtagcgagtgcgggaaagcatattcactcagttctcatctgaatcggcatcagaaagtacacacagccggacgactctag

SEQ ID NO: 247286 - DNA, 1485 bp, synthetic construct
  misc_feature 1..1485: note = Description of Artificial Sequence: Synthetic coding sequence
  source 1..1485: mol_type = other DNA
ctgcggtggaaccacagaagcagaagctcaggtctccttggaggctccgaggtgacggaagccggaggctgtgggagaagcagatgttctctgtgcggagtggccagacaacgccgaccaaggctacgtccacgtgggaggacgactgcagttcctggctcaagggatctgggcccacctcgcggatccggctggtccacaaattgtgacggcggtggccgaggcgatggtcccggagccggatgctggcatgaggtcaaagacgaagaatccagctccgaacaatcgatatctatcgctgtgagccacgtcaatacgtctaaggctggcctacctgcgcagaccgccctcccctgcgatatttgcgggccaatactgaaggacatccttcatctggacgagcatcagggcacacaccacggactgaaactccacacatgtggggcttgcggccgacaattctggttcagtgcgaaccttcaccaatatcagaaatgctactccatcgagcagcctttgagaagggataaatccgaggcctctatcgtcaagaactgcacggtttcaaaagaaccgcatccctctgagaagccgtttacctgtaaagaagagcagaagaactttcaggcaacactaggcggatgtcagcaaaaagctatccactcgaagcgcaagactcaccggtctacagagagcggggacgcctttcatggcgaacagatgcactataaatgtagcgaatgtggaaaagcctttagtcggaaagacactttggtgcagcatcagcgaattcactctggagagaaaccatatgaatgcagcgaatgtggcaaagcattctctcgtaaggctaccctagtgcagcaccaaagaatccacactggagagagaccttatgaatgctccgaatgtggtaagacctttagccggaaggacaaccttacccagcacaagaggatccacaccggtgagatgccttacaagtgcaacgagtgtgggaaatatttctcccatcacagcaacctcattgtgcatcagcgtgttcacaatggggctagaccctacaaatgctctgactgcggcaaagtgttccgtcacaagtcgactttggtgcagcatgagagtattcacacaggagaaaacccttacgattgtagcgattgcggtaaatcattcggccacaaatacaccctaataaagcaccagcggatccatacagagtccaaaccattcgagtgtattgaatgcgggaagttctttagccgcagctccgactatatcgcccatcaaagggtccacacaggggagcgcccattcgtctgctcaaaatgcggtaaagatttcattaggaccagccacctcgtcagacaccaacgagtgcacaccggggagcggccatatgagtgtagcgaatgtggcaaagcatattcacttagcagccacctgaaccggcaccaaaaggtgcacaccgcaggcagactctag

SEQ ID NO: 247287 - DNA, 1044 bp, synthetic construct
  misc_feature 1..1044: note = Description of Artificial Sequence: Synthetic coding sequence
  source 1..1044: mol_type = other DNA
atgtgggggatgtgggagaccattctcgtgcagtgcctgcatcaatatcagaaatgctatagcattgaacaacctttaaggcgggacaaatccgaagctagcatcgtgaagaattgtacagtctcgaaggaacctcatccctctgaaaaaccatttacatgtaaggaggaacaaaaaaattttcaggccaccttgggcggatgccagcagaaggcaatacactctaaacgaaaaacccatcggtccactgaaagcggagacgcatttcacggcgagcagatgcattacaagtgtagcgagtgcgggaaggccttcagcaggaaggacacactcgtccagcaccagcggattcatagtggggagaagccatatgagtgttcagagtgtgggaaggccttttccaggaaggccactctggtccagcatcagcgtattcacaccggtgaaagaccgtatgaatgttccgaatgcggcaagacctttagccgcaaggacaacctgactcagcataaaagaatacacactggcgaaatgccttacaagtgtaatgaatgtgggaaatatttctctcaccattcaaatctaattgttcatcagcgggtgcacaatggtgcccgtccttacaagtgttccgactgtgggaaggtgtttagacataagtcaaccctcgtgcagcatgagtctatccacaccggcgagaacccctatgactgtagtgattgtggaaaaagctttggtcataagtacacactcataaaacatcagcgaattcacacggagagcaagcccttcgaatgtatcgagtgtggaaagttctttagtcggtcgagtgattacatagcccaccaaagggtgcacacgggtgagaggccattcgtgtgcagcaaatgtggaaaggacttcattcgtacatcccatcttgtgagacaccagcgagttcataccggggagagaccatatgagtgctccgaatgcgggaaagcctatagtctgagtagtcatctgaacaggcaccagaaagttcacactgcgggtagattatag

SEQ ID NO: 247288 - DNA, 1977 bp, synthetic construct
  misc_feature 1..1977: note = Description of Artificial Sequence: Synthetic coding sequence
  source 1..1977: mol_type = other DNA
atgactcccggagtacgcgtctctacagatccagaacaagtgacatttgaggacgtggtggtgggtttcagtcaggaggagtggggtcagcttaaaccagctcagcgtacactctaccgagatgtgatgcttgacacattcaggttgttagtcagcgtgggtcactggctgcccaagccaaacgtgatctcacttctggaacaggaggcagaactgtgggccgtggaatcccgcctaccccagggcgtgtatccagacctggagacacgccctaaggtcaaactcagtgttctcaaacagggtatcagcgaagaaatttcaaacagtgtgattttagtggaacgttttctgtgggatggactatggtactgcaggggtgaagatacagaagggcactgggagtggagctgtgagagtttggagagcttggctgtgcctgtggccttcactcccgtcaagacgccagtcctcgaacagtggcagagaaacggattcggtgaaaacatcagcctcaatccagatttgcctcatcagccaatgacgcccgagaggcaatctccacacacttggggaactagagggaagcgcgaaaagcccgatctgaatgtcctgcagaagacctgtgttaaggaaaaaccttataaatgccaggaatgcggcaaggcatttagccactcttcagccttgatcgaacaccaccgaacacacactggcgaacgaccttatgagtgccatgagtgtctgaaaggcttcaggaactcttctgcgttgaccaaacaccagcgtatccacacgggggaaaagccctacaaatgcacacagtgcggacgcactttcaatcaaatagctcccctgatccagcatcaaagaacccacacaggtgagaaaccttacgagtgctcagaatgcggaaaatcttttagcttcaggtctagcttttcccagcacgaacgtacacacacaggcgagaaaccttacgagtgcagcgagtgcggcaaagcctttcgccagagcatccacctgacacagcatttgcgtattcataccggcgagaaaccttaccagtgcggagagtgcgggaaggccttttcccattcatctagcttgacgaagcatcagagaatacacactggagaaaaaccttacgaatgtcacgagtgtgggaaggcctttacacagatcacccccttaatccagcatcaaagaactcacactggtgagaagccatacgaatgcggggaatgtgggaaggccttttcccagtccaccttacttactgaacacaggagaattcataccggggagaagccatatggatgcaacgagtgtggtaagacattctcccattcatcctccctttcacagcacgaacgtacgcacactggtgagaaaccgtacgagtgttctcagtgtggaaaggccttccgacagtctactcacctgacacaacatcagcgtattcacacaggcgagaagccttacgaatgtaatgactgcgggaaagccttcagccactcatcatcactgacgaagcatcaaagaatacacacgggcgagaaaccttatgagtgtaatcagtgtggcagggcattcagccaactggcacctctcatccagcatcagaggatacatacaggtgagaaaccatatgagtgtaaccagtgtggccgtgcctttagtcaaagcagtctcctcatcgagcatcagaggattcatactaaggagaaaccatacggatgcaatgagtgcgggaagagttttagtcacagctccagcctgtctcaacatgaacgaacacacaccggcgagaagccttacgaatgccacgactgcggaaaaagtttcagacaatctacccatttaacgcaacaccggcgaatccacaccggagagaagccctatgcttgccgtgattgcgggaaggcttttacacactccagtagcctcacaaaacaccagagaacccatactgggtag

SEQ ID NO: 247289 - DNA, 1173 bp, synthetic construct
  misc_feature 1..1173: note = Description of Artificial Sequence: Synthetic coding sequence
  source 1..1173: mol_type = other DNA
atggagctgggtagtagacggagaagcgtcgggtgccggtgtcggggactgtgcttggcggttcgaagggagcaagttacatttgaggatgtggttgtggggtttagccaagaagagtgggggcaacttaaacccgctcagagaacactctaccgagacgtgatgttggatacctttagactcttagtatctgtcggacactggctgcccaagcccaacgtcatttcgcttctggagcaggaagccgaactatgggctgtagagagccgcctcccccaaggtgtgtaccccgacctggaaacacgaccgaaggttaagctgtcagtgctgaagcagggcatctctgaggagatatctaacagcgtgatactcgtcgaacgatttctttgggatggtctgtggtattgcagaggagaagacactgagggacattgggagtggtcctgcgagtcactggagagcttggcagtgccagtcgctttcactcccgtaaaaaccccagttttggaacaatggcaacggaacgggtttggagagaacatttccctgaatccagacttgccacaccagcccatgactcccgaacgccagagcccacatacttggggcacccgcggtaagagggagaaacctgacctaaatgtactgcagaaaacctgcgttaaggaaaaaccatataaatgtcaggagtgcggcaaagcattcagccacagcagcgccttaatcgagcaccacagaacacacactggagaaaggccctatgagtgccacgagtgcttgaaaggattccgaaactcttccgcactcacaaagcaccaacggattcacacgggcgaaaagccctacaagtgcactcagtgcggccgtactttcaaccagattgcccctctgatccagcaccagcgaacccacaccggtgagaagccttatgaatgctcagaatgtggaaagtcattctccttcagatcctcattttcacagcatgagcgtacgcatacgggagaaaaaccctatgaatgttctgaatgtggtaaagcttttaggcagagcatccatctgactcagcacttgaggatccatactggagagaagccctaccagtgcggggagtgcggcaaagcattcacacactctagctccctcactaagcaccagagaactcacaccgggtag

SEQ ID NO: 247290 - DNA, 2049 bp, synthetic construct
  misc_feature 1..2049: note = Description of Artificial Sequence: Synthetic coding sequence
  source 1..2049: mol_type = other DNA
atggagctaggtagtcggaggaggagcgtgggctgtcgttgccgaggattgtgtcttgccgtaagaagagagcaagtgacctttgaggacgttgtcgtgggcttctcccaagaggaatgggggcagctgaagcctgcccagaggaccctctatcgcgatgttatgttggatacatttcggcttcttgtgtcagtaggccactggctacctaagccgaacgtaatctctctactcgagcaggaagccgaattgtgggctgtcgagtcacgactcccccagggcgtttaccccgagattaaaggccatttccagttcttgctgctaagcgatctggagacgcggcctaaagtgaagctgtccgtgttgaagcaaggcatctccgaagagataagcaactcggtcattctcgtggaaaggtttctgtgggacgggttatggtattgccgcggtgaggatactgaggggcactgggagtggagttgcgagtccctcgagtcccttgccgtccctgtggctttcacccctgttaagacgcctgttttggaacagtggcagcggaatggttttggcgaaaacattagtcttaatcccgacctgcctcatcagcctatgacacccgagcggcaatccccacatacttggggcactcggggaaaaagggaaaaaccggacctaaacgtgctacaaaagacctgcgtgaaggagaaaccttataaatgtcaggaatgtggaaaggcctttagccacagctctgcactgattgagcaccatcgcacacataccggggagcgtccctatgagtgccacgagtgcctgaaggggtttaggaattcctcggcactgaccaaacatcaacgcattcacacaggagaaaaaccttataaatgcacacagtgtggacgtacctttaatcagattgccccactgattcagcaccagcgcactcataccggagaaaaaccttatgaatgtagcgagtgcggcaagagtttctctttcagaagcagcttcagtcagcacgagaggacccatacaggggagaagccctacgagtgttccgagtgtggcaaggcttttcgtcagagtattcatctgacccagcacctgcgcatacacacgggtgagaagccttaccagtgcggcgagtgtggcaaggctttcagccactcgtcaagcctaaccaagcaccagcggattcacacaggagaaaaaccctatgagtgccacgagtgcggcaaggccttcacacagatcacgcccctgatacaacaccagagaacccatactggcgaaaaaccctacgagtgtggcgagtgcgggaaggcattctcccagtccactctactgaccgagcatcgccgtatccacactggggagaagccgtatggatgtaacgaatgcggaaaaactttctctcacagtagctccctctcccagcacgagagaactcatacaggggagaagccctatgagtgtagtcagtgcggaaaggctttcaggcagagcacccacttgacacagcatcagcgcattcacacaggcgaaaaaccatatgagtgcaacgattgcgggaaggcattcagccatagcagttccttgaccaagcaccagagaatccatactggggaaaaaccatatgagtgtaatcagtgcggcagagcctttagtcagcttgcgccactcattcagcaccaaagaattcataccggagaaaagccttatgaatgcaatcagtgcggcagggctttctctcaaagttcattgctcatagagcatcagagaattcataccaaggaaaagccttatggctgtaatgaatgcggcaaaagtttctcgcacagctccagcctgtcacagcacgagcggacccataccggcgaaaagccctatgaatgtcatgactgtggcaagtcatttagacaatccacacacctcacacagcataggcgcatccacaccggtgagaagccttatgcatgccgagattgcggtaaagcattcactcattctagtagcctgaccaagcaccaaaggacacacacgggatag

SEQ ID NO: 247291 - DNA, 1977 bp, synthetic construct
  misc_feature 1..1977: note = Description of Artificial Sequence: Synthetic coding sequence
  source 1..1977: mol_type = other DNA
atgacccctggcgtgagggtctccaccgaccctgagcaagtgacatttgaggatgtagtggtaggtttcagtcaggaggagtggggacagctcaagcccgcacaaagaacactctaccgtgacgtcatgctggataccttcagactgctggtatctgtaggccactggctacccaagcccaacgtgatctctctgttggaacaggaggccgaattatgggcagttgaatcccgcctgcctcagggagtgtaccctgacttggagaccaggccaaaagtaaaattgagcgttctgaagcaagggatcagcgaggagatctcaaactcagtgatcttagtggaacggtttctatgggatggactctggtactgcaggggggaagacaccgaaggacattgggagtggtcctgcgaatccctagagtcactggcagtccccgttgcctttaccccggtgaagacgcccgttctcgagcagtggcagcgtaatggctttggcgaaaacattagccttaaccctgatttaccccaccagcccatgacccccgagagacagtctccgcacacttggggtaccagaggcaaacgtgaaaaacctgacctgaacgtgctgcagaaaacttgcgtcaaagaaaaaccctacaagtgtcaggagtgcggaaaagccttctcccacagtagcgctctgattgagcaccatcgcacacacactggcgaacgcccatatgaatgccatgaatgcctgaaggggttccgaaactcttccgctctcacaaagcatcagcgaattcacacaggcgaaaaaccctataagtgtactcaatgcggacggacattcaaccaaatagcgcctctgatccagcatcagcgcacccacacaggcgaaaaaccttacgagtgcagtgagtgcggaaaaagcttttcatttaggtctagcttctcacagcacgaacgtacccacaccggtgaaaagccatacgagtgcagcgagtgtggaaaagcctttaggcagagcatccatctaacccagcacttacggattcatacaggagaaaagccgtatcaatgcggtgagtgcggcaaggcgttttcccatagcagctccctcacgaagcatcagaggatccacacgggggagaagccttatgaatgtcacgagtgcggcaaagcctttactcagatcactcctctgatccagcatcagagaacccacactggggagaagccatatgagtgcggtgaatgcggcaaagccttcagtcaatcaactcttctgacggaacatcgcaggatccacaccggggaaaagccttatgggtgcaatgaatgcggcaagactttctcacacagtagttcactgtcccagcatgagcggacacatacgggggagaagccctatgaatgtagtcagtgcggaaaagcattccgccaatcaacccaccttactcagcaccagaggatccacacaggggaaaaaccgtacgaatgtaacgattgtggaaaggccttctcacatagcagttccctgaccaagcaccagagaatccacactggagagaagccttacgagtgtaatcagtgcggacgtgcattttcacagctggcacctctgatccagcaccaacggatccacacgggtgagaaaccctacgagtgcaaccagtgtggcagggcgttctcccagtcttctctgctgatcgagcaccagcggattcacacaaaagagaaaccttatggctgcaacgagtgcgggaaaagcttttcacactcatcgtctctgtcccagcatgaacggactcatactggggaaaagccgtatgaatgccacgactgtggcaagagtttcagacagtcaacccacctgactcagcaccggaggattcacacgggggagaaaccttatgcctgtcgggattgcggaaaggcttttacgcattcttcaagtctgacaaaacatcaacgaactcacactgggtag

SEQ ID NO: 247292 - DNA, 1851 bp, synthetic construct
  misc_feature 1..1851: note = Description of Artificial Sequence: Synthetic coding sequence
  source 1..1851: mol_type = other DNA
atgctggacaccttcaggctgctggtcagcgtgggacattggctcccaaaaccaaatgtgatctccttactggagcaggaggctgagctgtgggccgttgagagtaggctcccccagggcgtctaccctgatctggaaaccagacccaaagtcaagctaagtgtgcttaagcagggaatatctgaggagatctctaacagcgtgattctggtcgagcgatttttgtgggacggactctggtactgcaggggggaagataccgaaggtcactgggagtggtcctgtgaatcactggaaagtctggctgtgcccgtagcgttcaccccagtaaaaacccccgttctggaacagtggcagcggaacggttttggagagaatatatcactcaatccggatctgccacatcagcccatgactcccgagcggcagagtccccatacctggggcaccaggggaaagagagagaagcccgacctgaatgttctacagaagacatgcgtcaaagaaaagccatataaatgtcaggagtgcgggaaggcgttcagtcattcttctgccctgatcgaacatcaccgcacgcacacaggggagcgtccatacgaatgccatgagtgcctgaagggatttaggaacagctccgctctgactaagcaccagcggattcacaccggcgagaagccatataagtgcacacagtgtgggcgaactttcaatcagattgcgcctttaattcagcaccagcgtacgcatacgggggagaagccctacgaatgtagtgaatgcggaaaaagtttctccttccggtcttcattctctcagcatgagaggacacacacgggagaaaaaccttatgaatgtagtgagtgcggcaaggcctttcggcaaagcatacacctgacacagcacctgagaattcacaccggcgagaaaccctatcaatgtggtgaatgtggaaaagcttttagccactcaagcagtctcactaagcaccaacgtatacacacaggggagaaaccgtatgagtgccacgagtgcggcaaagcatttacccagatcacacccctgattcagcatcagcgcacccacaccggggagaaaccctatgagtgtggcgagtgtggaaaggctttttcacagtccacgctgctgacagaacatcggagaattcataccggtgagaagccctacggttgtaacgagtgtggcaagaccttttctcattcgagcagcctgagtcagcacgaaaggacacacaccggcgaaaagccttacgaatgcagccagtgcgggaaggcttttcgccagtccactcacctgacccaacaccagcgtatacatacaggtgagaagccatatgagtgcaatgactgtgggaaagcgttctcacattcttcatccttaacaaaacaccagcggattcatactggagagaaaccgtatgagtgtaaccaatgtggcagggcattctcacagctggcacctcttattcagcaccaaagaatccacacaggggagaagccttatgagtgtaatcagtgtgggagagcattctcccagtcttccctgttaatagaacaccagaggattcatactaaagagaagccctatggatgcaacgaatgtggaaagagcttctcccatagcagctcactctcacagcacgagagaacccatacaggcgagaaaccctacgagtgccacgactgcgggaagtcatttagacagagcactcacttaactcagcacaggaggatccatactggggaaaagccttatgcttgccgcgactgcgggaaagcatttactcatagttcatctttgacaaagcaccagcggacccatactggatag

SEQ ID NO: 247293 - DNA, 2013 bp, synthetic construct
  misc_feature 1..2013: note = Description of Artificial Sequence: Synthetic coding sequence
  source 1..2013: mol_type = other DNA
atgacgcccggagtccgcgtcagcacagatcctgaacaggttacgttcgaagacgtggtggtgggctttagccaggaagagtgggggcagctgaagcccgcacaacggactctataccgcgatgtgatgcttgatacatttcggcttctggtgtcagtgggccattggctccctaagccaaacgtcatcagtctgctggagcaggaggctgagctgtgggcagtggagagcagacttccccaaggagtgtacccagaaatcaagggtcattttcagttcctcctgttatcggaccttgagacccgacccaaagtgaaactttcagtgttaaaacagggtatttctgaagaaatctctaacagtgtaattctcgtggaaagattcctgtgggacggcctgtggtactgtcggggtgaagacaccgaaggccattgggagtggagctgtgagtccctggagagcttagccgtgccagtggcatttaccccagtgaagacacccgtgctggagcagtggcagcggaacgggttcggcgaaaatatatcgctcaatccagacttgccccaccagccgatgacgcctgaaagacagtcccctcatacctggggcactagagggaagagagagaagcccgaccttaatgtcctccagaagacctgcgtgaaggagaagccatataagtgccaggaatgcggaaaggccttttcacacagcagtgctttgattgagcaccacagaacacatacaggcgagcgcccatacgaatgccacgaatgtcttaaagggtttagaaacagctctgcgctgacaaaacaccagcgcatccacacaggcgagaagccgtataaatgtacccagtgtggtagaacttttaaccaaatcgccccactcatccagcaccaaaggactcacacaggggagaaaccctatgaatgctctgaatgcgggaagagctttagcttccgaagctcattctcccagcatgaaagaacgcataccggcgaaaaaccatacgagtgcagtgaatgtggcaaggccttccgacagtccattcaccttacacagcatctgcggattcacacgggagagaaaccttatcaatgcggggaatgcgggaaggcattcagccattcctcaagcctgacaaagcaccagcggatccataccggagagaagccctatgagtgccatgaatgcgggaaagcctttacacaaatcacacctctgatccagcaccagaggacgcatacaggcgagaagccctacgagtgcggcgaatgcggtaaggcattcagtcaaagtacgcttctgacggagcatcgtaggatccacacaggggagaaaccctatggctgtaacgaatgcggcaagacattctcccactcatcatctctgtcacagcacgagcggactcacaccggggagaagccatatgagtgttctcaatgtggaaaggcgttcaggcagtccacccacctgacccagcaccagagaattcacacgggtgagaagccctacgaatgcaacgattgcgggaaggctttcagccattccagcagcttaaccaaacaccagcgcattcatactggggagaaaccttacgaatgtaatcagtgtggcagagcattttcacagttggccccactcattcagcaccagagaatccataccggcgaaaagccctacgaatgcaaccagtgcggaagagccttttctcagagcagtctgctaattgagcatcaaagaatacacactaaggagaaaccctatggctgtaatgagtgtggtaagtccttcagccatagttcctctctgagtcagcatgagcgcacccacactggagagaaaccctatgaatgtcatgactgtgggaaatccttccgccaatcaacgcacctcacacagcaccggaggatacacacaggtgagaaaccttacgcatgtcgggactgcggcaaagccttcactcattcctctagcctgaccaagcatcagaggactcatacgggatag

SEQ ID NO: 247294 - DNA, 2031 bp, synthetic construct
  misc_feature 1..2031: note = Description of Artificial Sequence: Synthetic coding sequence
  source 1..2031: mol_type = other DNA
tgacgcagcgtcggctgtaggtgtcgcggactttgtcttgccgtcagacgtgagcaggtaaccttcgaagatgtcgtggtaggcttcagtcaggaggagtgggggcaattgaaaccagcccagaggacactttacagggatgtgatgctggacaccttcaggctcctagtgtccgtcggacactggctgcctaaaccgaacgtgataagcctgctggaacaggaagccgaactttgggcagttgagtctaggctacctcagggtgtgtaccccgagatcaagggccacttccagttcctgctgctgtccgatctggaaacacgtcccaaagttaaactctcagtcctgaaacagggaatcagcgaagagatctcaaatagtgtaattctagtcgagcgcttcctatgggacgggctttggtactgccgaggcgaggacacagaagggcactgggaatggagctgcgaatccctggagtcgttagctgtgcccgttgcttttactccagtcaaaacacctgttcttgagcagtggcagcgaaatggcttcggggaaaatataagcctcaaccctgatctgccacatcagcccatgacgcctgaaaggcagtcaccccacacctggggcacccggggaaaacgggagaagcccgatcttaacgtcctccaaaaaacttgcgtcaaagagaaaccttataagtgccaggagtgcgggaaggctttctcccactcaagcgccttgattgagcatcacagaacccacacgggggaaagaccttacgagtgccacgaatgtctgaagggtttcaggaactcaagcgccctaaccaaacatcagaggatacataccggtgagaaaccctataagtgtacacagtgtggcagaacctttaaccagatcgctcccctgattcaacatcagcgcacacacactggagaaaagccctatgagtgctcagagtgcggtaaaagtttctcatttcggtcgtctttttcacaacatgagcggacccataccggagaaaagccatacgaatgcagcgaatgcggtaaagcttttcggcaatcaattcacttaacgcagcacttgcgaatccatactggggaaaagccttaccagtgtggagaatgtggaaaggcgttttctcactcttcctcattaaccaagcaccagaggattcacacaggcgagaagccgtatgaatgccacgagtgcgggaaggcttttacccagataacacccctgatccagcatcagagaacacacacaggcgaaaagccttatgagtgcggggaatgcggcaaggctttcagtcagtccacgcttctcaccgaacatcgcaggattcacaccggggagaagccctatggatgcaatgagtgcggtaaaacattcagccattcttcgtccctgtcacagcacgaaagaacacacacaggggagaaaccatatgagtgctcacagtgtggaaaggcatttcgccagagcactcaccttacacagcatcagcgcatccacaccggcgagaaaccctatgagtgcaatgactgtggtaaggctttttcacactccagtagcctgacaaaacatcaaagaattcacacaggggaaaagccctacgagtgcaaccagtgcgggagggccttctcgcagctggcccctctgatccagcaccagaggattcatacgggagagaaaccatacgagtgcaatcagtgcggtcgggcattctcccagtcgagcctcctgattgagcatcagaggattcatacaaaggagaagccctatggctgcaatgaatgtggaaaatccttcagtcattccagctccctgtcccaacatgagcgcacgcatacaggagaaaagccatatgagtgccacgactgtggcaagagctttagacagtccactcatctaacccagcaccgacgcatccataccggcgaaaagccctacgcctgtagagattgtggtaaggctttcacccatagcagcagcctcacgaagcatcaacgtactcatacagggtag

SEQ ID NO: 247295 - DNA, 1623 bp, synthetic construct
  misc_feature 1..1623: note = Description of Artificial Sequence: Synthetic coding sequence
  source 1..1623: mol_type = other DNA
atggacagtgttgccttcgaggatgtagatgtcaacttcacccaggaggagtgggctttactcgatccctcccagaagaacctgtatagggacgtgatgtgggagacaatgcggaatctcgcctctattggaaaaaagtggaaagaccagaacatcaaagatcattataagcatagaggcagaaatttgagatcgcatatgcttgagcggctgtaccagacgaaggacggttcccagcgcggaggcatcttttcccaattcgccaaccagaatttgtctaaaaagatccccggtgttaaactgtgcgaaagcatcgtgtacggcgaggtcagtatgggccagtcaagtctcaaccgacacattaaggaccatagcggccacgaacctaaggaataccaggagtacggggaaaagccagacacccggaaccagtgttggaagccatttagcagccatcacagctttaggactcatgaaatcatccacaccggagagaaactgtatgactgcaaggaatgtggcaagacctttttttctttgaagagaattcggagacatatcattacgcattctggctacacaccatataagtgtaaggtttgtgggaaggccttcgactaccccagccgctttagaacccacgagcggagccacaccggggaaaaaccctacgagtgtcaggagtgcggaaaggccttcacatgcatcacatccgtgagacgtcacatgattaagcatacaggcgacgggccttacaaatgtaaagtgtgcggtaagccatttcacagtttgtcgagcttccaggtccacgagaggattcacacaggcgagaagcccttcaagtgtaagcagtgcggcaaagctttttcctgcagccctaccttaagaatccatgagcgcacccacaccggcgaaaaaccgtatgaatgcaagcaatgcgggaaagctttctcctacttaccttctctcaggttgcacgaacgaattcacaccggagaaaagccctttgtttgcaaacagtgcggtaaagcgtttcgcagtgcctcaacattccaaattcatgagcgcacccacaccggcgagaaaccctatgagtgtaaggagtgcggggaggccttttcttgtatcccctctatgaggcggcacatgatcaaacacactggcgaaggaccttacaaatgtaaggtttgcggtaaacctttccacagtctgtcgcccttccgtatccatgagcgcacgcacacaggcgagaagccatacgtatgtaaacattgcggaaaagcctttgtgtcctcaacttccatacgtattcatgaacggacacacactggagaaaagccttacgagtgtaaacagtgcgggaaagcatttagttacctgaatagcttccgcacccacgagatgattcatactggagagaagccttttgagtgtaagcgctgtgggaaagcattccggtctagtagcagcttcaggttgcatgagcggactcacaccggacaaaaaccataccattgtaaggagtgtggaaaggcttacagttgtagagcctcctttcaaagacacatgctgacccatgctgaagacgggccaccctacaaatgtatgtgggaatcactatag

SEQ ID NO: 247296 - DNA, 1425 bp, synthetic construct
  misc_feature 1..1425: note = Description of Artificial Sequence: Synthetic coding sequence
  source 1..1425: mol_type = other DNA
atgctggaacgactgtatcagacaaaggatgggagtcagcggggaggcattttctcacagtttgccaaccagaacctgagcaagaaaattccaggagtgaaattatgcgagtctatcgtatacggggaagttagtatgggccagtcttcgctgaacaggcacatcaaagatcacagtggccatgaaccaaaagagtatcaggaatatggcgagaaacccgatactagaaaccagtgttggaaaccattcagttctcatcactcttttcgcacccacgagatcatccataccggggagaagctgtatgattgtaaggaatgcggaaagaccttttttagcctgaaacggattaggcgccatattattactcatagtggatatactccctacaagtgcaaggtgtgtggaaaggcttttgactatccttctagatttcgtactcatgaacgctcccatactggggaaaagccctacgaatgccaagagtgtggcaaggcctttacttgtatcacttctgtgcggaggcacatgatcaagcacactggggacggaccctacaaatgtaaagtgtgtggcaagcccttccacagcctttccagctttcaggttcatgagagaattcatacaggtgaaaagccgtttaaatgtaaacagtgcggcaaagcgtttagctgttctccgaccctgagaatacacgagcgaacacacacaggtgaaaagccctacgaatgcaaacagtgcggaaaggccttctcatacctgccgagtttgcgccttcacgaaagaattcacacgggggagaagcccttcgtgtgtaagcaatgcggaaaagcatttcgaagcgcttccactttccagattcatgagcggactcatacaggtgaaaagccatacgagtgcaaagagtgtggcgaggctttcagttgcatcccctcgatgagaagacatatgattaaacatacaggcgagggaccatataagtgtaaagtgtgtggcaagccattccatagcctttccccctttcgaatccatgaacggactcacacgggcgaaaaaccatacgtgtgtaagcactgtggcaaggcatttgtgagttccacatctatcagaatacacgaacgcactcacaccggagagaagccgtatgaatgtaagcaatgcggcaaggcctttagctacctgaatagcttcagaacccacgagatgattcacacaggcgagaaaccgtttgaatgtaagaggtgtgggaaggcgttcagatcctcctcgagctttagactccatgagcgtacgcatacaggtcaaaagccttaccattgcaaggagtgcggaaaggcctattcatgtcgagcctctttccaacgacatatgctgacacacgcagaagatggacctccttacaaatgcatgtgggagtccctatag

SEQ ID NO: 247297 - DNA, 960 bp, synthetic construct
  misc_feature 1..960: note = Description of Artificial Sequence: Synthetic coding sequence
  source 1..960: mol_type = other DNA
atgggccctctcacattcatggatgtggccatagagtttagcctggaggaatggcagtgtctcgatactgcccagagaaacgtgtacagacacgtgatgctggagaactaccgaaatttggtgtttcttgatctaatcacatgtttggagcagggaaaagaaccatggaacatgaaacgccacgaaatggtggtggctaaacattctgcactgtgcagtaggtttgcgcaggatctgtggttggaacagaacatcaaggacagcttccagaaggtgaccttgtcacgctatggcaagtacgggcataagaatctccaactgcggaaggggtgcaagtccgtggacgaatgtaagggtcatcagggtggttttaatggcctgaaccaatgcctgaagattacaacatcgaagattttccagtgtaacaaatatgtgaaggtaatgcacaagttcagcaacagcaatcggcacaagataagacacacagagaacaagcacttccggtgcaaagagtgcgataaaagcttgtgtatgctctctcgtcttacccagcacaagaagatacatacgcgagaaaacttctataaatgtgaggagtgtgggaagacatttaattggtcaaccaacctaagcaagccgaagaaaattcacactggcgagaaaccttataaatgcgaggtctgcggtaaggcctttcaccagtcgtccatcctaacgaaacacaagatcattaggacaggcgagaagccttacaagtgtgctcactgtgggaaggcctttaagcagtcaagccacctcaccagacacaagatcatccataccgaagaaaagccatataaatgcgagcagtgcggaaaagtctttaagcagagtccgacactgactaagcatcagattatatatacaggcgaagaaccctacaaatgcgaagagtgtggaaaagcgtttaatttatcgtag

SEQ ID NO: 247298 - DNA, 789 bp, synthetic construct
  misc_feature 1..789: note = Description of Artificial Sequence: Synthetic coding sequence
  source 1..789: mol_type = other DNA
atgaaacgacacgaaatggtcgtggccaaacactcagctctgtgtagcaggttcgcccaggatctctggctcgagcagaacatcaaagatagttttcaaaaagtgacgttaagtcggtatgggaaatatggacacaagaatctccagttgagaaaagggtgcaagtctgtagatgagtgtaaaggccatcagggcggatttaatggacttaatcaatgcctgaagatcaccactagcaaaatcttccagtgcaataaatacgttaaagtcatgcataagttcagcaattccaacaggcacaagatccgccatacagagaataagcactttcgctgtaaggaatgcgataagtccctgtgcatgctcagcagactcacccagcacaagaagatccatacccgggaaaatttctacaaatgcgaagagtgcggaaagacctttaactggagcaccaatctaagcaaacctaagaaaattcataccggagagaagccatacaagtgtgaggtctgtggcaaggccttccaccagagctcaatcctcactaaacacaaaattattcgcacaggcgagaagccgtataagtgcgcgcactgcggaaaggccttcaagcagtcctcgcaccttaccagacacaaaatcatccacacagaagagaagccgtacaaatgcgagcagtgcggtaaagtgttcaaacaaagccccactctgactaagcatcagatcatttacaccggggaggagccatataagtgtgaggagtgtggtaaggctttcaaccttagctag

SEQ ID NO: 247299 - DNA, 789 bp, synthetic construct
  misc_feature 1..789: note = Description of Artificial Sequence: Synthetic coding sequence
  source 1..789: mol_type = other DNA
atgaagaggcacgagatggtggttgcgaagcatagtgcactctgctcgcgattcgcacaggacctctggctggaacagaatataaaagattcattccaaaaagtcacgctcagtagatacggcaaatacgggcacaagaatctgcagcttcgcaaggggtgcaagagtgttgacgagtgcaaggggcatcaaggcggtttcaatggcttgaatcagtgtctgaaaatcacaacgagcaagatcttccagtgtaacaagtacgtgaaggttatgcataagttcagtaacagcaaccgccataagattcgccataccgaaaacaaacatttcaggtgtaaggagtgtgacaagagcctctgcatgctgtcgagacttacccagcacaaaaaaatacacacaagggaaaatttctataaatgtgaggagtgcggcaagacgttcaattggtctacaaatctgagcaaaccaaagaagatccacactggagaaaagccgtataagtgcgaagtgtgcgggaaagcattccaccaaagcagtattctgacaaagcacaaaatcattagaacaggcgagaaaccgtacaagtgcgctcactgtggtaaagccttcaagcagagcagccacctgaccaggcataaaattatccacactgaagaaaagccatataagtgtgagcagtgcgggaaggtctttaaacagtccccaactctgaccaagcatcagattatctacaccggggaagagccgtataaatgcgaagagtgtggaaaggcgtttaatctgtcctag

SEQ ID NO: 247300 - DNA, 864 bp, synthetic construct
  misc_feature 1..864: note = Description of Artificial Sequence: Synthetic coding sequence
  source 1..864: mol_type = other DNA
atggatgtcgccatcgagttctctcttgaagagtggcagtgcctcgacacggctcagcggaacgtgtatcggcatgtgatgcttgaaaactatcgcaacctggtcttcctggcattgtgttcacgatttgcccaagatctgtggctcgaacagaatattaaggactcgttccaaaaggtgactttgtcccgttacggtaagtatggccataagaatctccagctgaggaaggggtgcaaatctgtggatgagtgtaaagggcaccagggcggattcaacggacttaaccagtgtcttaagattactacaagcaaaatattccagtgcaataagtatgtgaaagtgatgcataagttttccaattccaaccgacacaagattaggcatacggagaacaaacatttcaggtgtaaggagtgtgacaagtctctttgtatgcttagtcgcctgacgcagcacaagaaaatccacacccgcgagaacttttacaagtgcgaagagtgtggaaaaacattcaactggtccaccaatctaagtaaaccgaaaaaaatccataccggagagaagccctataagtgcgaagtatgcggcaaggctttccatcagagtagcatacttaccaaacataagatcatccggaccggggagaaaccatataaatgtgcccattgtggcaaagcattcaagcaatcttcacacctcacgagacacaagatcatccatacggaggaaaaaccatataaatgtgaacagtgtgggaaagttttcaagcagtcaccgacacttacaaaacaccagatcatctacaccggggaggagccgtataaatgtgaggagtgcgggaaagctttcaaccttagctag

SEQ ID NO: 247301 - DNA, 882 bp, synthetic construct
  misc_feature 1..882: note = Description of Artificial Sequence: Synthetic coding sequence
  source 1..882: mol_type = other DNA
atgggcccactcacatttatggacgtggccatcgagttcagcctcgaggagtggcagtgtctcgatacagctcaacgcaatgtttaccggcacgtaatgctcgaaaactaccgcaacttggtattcttagccctatgcagccggtttgctcaggacctgtggctggaacagaatataaaggactctttccagaaagttaccttgagtcggtacggcaagtacggccacaaaaacttgcagctcagaaagggatgtaagtctgtggacgaatgtaagggacaccaggggggatttaatggactcaaccagtgcctgaaaatcacaacgtccaaaatattccagtgtaacaaatatgtcaaggtaatgcacaaattttcgaactccaaccggcataagatccgacataccgagaataagcatttcagatgcaaggagtgtgataaaagcctctgcatgctgagtcgtctaacacaacacaaaaaaatccatacccgggaaaacttctacaagtgcgaagagtgtggcaaaacgtttaactggtcaacgaatttgagtaagcccaaaaaaatccacacaggcgaaaagccgtacaagtgcgaggtgtgcgggaaggccttccaccagtcgagcattctgaccaaacacaaaattatccgcacaggggaaaaaccatataaatgcgctcactgcgggaaggcattcaaacagagctcgcacctcacacgccataagattattcatacggaagaaaagccttataaatgtgaacagtgcggaaaagttttcaagcagtcaccaacacttacgaaacatcagatcatttatactggagaagagccctacaaatgtgaagaatgtggaaaagcctttaacctcagctag

SEQ ID NO: 247302 - DNA, 381 bp, synthetic construct
  misc_feature 1..381: note = Description of Artificial Sequence: Synthetic coding sequence
  source 1..381: mol_type = other DNA
atgggacctcttacctttatggacgtggctatcgagttcagtctggaagaatggcagtgtctggacactgcccagaggaatgtgtaccgacacgtaatgctggagaactataggaatttagtgtttctggacctcataacctgcctggaacagggaaaggagccctggaatatgaagcggcatgaaatggtggtcgccaagcacagcgcagtcgcatttacttttgatttgtcagggttgaacatactgtcttttcagtccattctgccgtttgttagcgcgctctacgtaatgggcaatcgaaatcagtgcctgcagaaacacttggaggccagaaacaaggatctgtgcgtcctcgtgctccccaagacattcggatag

SEQ ID NO: 247303 - DNA, 1929 bp, synthetic construct
  misc_feature 1..1929: note = Description of Artificial Sequence: Synthetic coding sequence
  source 1..1929: mol_type = other DNA
atggatagtgtctcctttgaggacgtggccgtgaattttacgctggaggagtgggcgctgttggacagctcacaaaagaaattgtacgaggatgtcatgcaggaaacatttaaaaacctggtttgcctggggaagaagtgggaagaccaggacatagaggatgaccaccggaaccagggaaaaaacaggcgatgtcatatggtggagagattatgcgaaagtcgaaggggaagcaagtgtggcgaaactacatcgcagatgcctaatgtgaacataaacaaggaaacatttacgggcgctaagcctcacgaatgctcgttctgtggccgagatttcatacatcatagcagtctcaaccgacatatgaggagccacaccggtcagaagccgaatgagtatcaggagtacgagaaacagccttgtaagtgtaaggctgttggcaaaacattcagctatcaccattgtttccgcaagcacgaacggacccatactggagtgaaaccttacgagtgcaaacagtgcgggaaggctttcatctattaccagccctttcaacgacatgaacggacccatgccggacagaagccgtacgagtgcaaacagtgcggaaagactttcatttattaccagagcttccaaaagcacgcccatacgggcaagaagccttacgagtgcaaacagtgtggcaaagcattcatctgttaccagtctttccagagacacaagcgcactcataccggtgaaaaaccctacgaatgcaagcaatgcggaaaagcgttttcttgccctacctattttaggactcacgaaagaacccataccggagagaagccttataagtgtaaggagtgcggtaaggccttctccttcttaagttcttttcggagacataagaggacccatagcggggaaaagccttacgagtgtaaggagtgcgggaaggccttcttctattccgcatcgtttagagcgcacgtcattattcataccggggctcggccttacaagtgcaaggagtgtggcaaagctttcaattcatctaactcctgcagggtccacgaacggacacacatcggggagaagccctacgagtgtaaaagatgcggaaagtcgttttcatggtccattagcctgaggctgcacgagagaacacatactggggagaagccctacgaatgtaagcaatgccataagactttctctttttcctctagcctcagagagcacgaaaccactcacaccggcgaaaagccttatgagtgtaaacagtgcggaaagactttctccttctcaagttcactgcagcgccacgaacgcactcacaatgcagaaaaaccttacgaatgtaagcagtgtggtaaggcattccgttgcagcagttacttcagaatacacgagcgctcccacaccggcgaaaagccgtatgaatgcaaacagtgtggcaaagtgtttattcgatcgtcaagttttcgcctgcacgaacgcacacacacaggggaaaagccttacgagtgcaaactgtgcggcaaaactttttcattttcttctagcctgagggagcatgaaaaaatccataccggaaataaaccttttgaatgcaaacaatgcggcaaggcctttcttcgcagcagccagattagactgcatgaacggacacataccggcgaaaagccctaccagtgtaaacaatgtggaaaggcctttatctcttcaagtaagtttcggatgcatgaaagaactcataccggcgaaaaaccttacagatgcaaacaatgtggcaaggccttcagattcagctctagcgttcgtatccacgagcgcagccataccggagagaaaccctacgagtgcaaacagtgtggcaaagccttcatctcatcatcgcatttccggttgcacgagcgaacccatatgggagaaaaagtgtag

SEQ ID NO: 247304 - DNA, 1374 bp, synthetic construct
  misc_feature 1..1374: note = Description of Artificial Sequence: Synthetic coding sequence
  source 1..1374: mol_type = other DNA
atgtcccagggttctgtcacgttccgggatgtcgccattgacttcagccaggaggagtggaagtggctgcagccggctcagcgcgacctctacagatgtgtcatgctggagaactacgggcacttggtgagcctgggactttcaatctcgaagccagacgtggtgtccttattagagcagggcaaggagccatggctgggcaaacgtgaggtgaaaagggatctgttctctgtctctgagagctcaggggagattaaagattttagtccgaagaatgttatttacgatgattcgtcccagtatctgataatggaacgcattcttagccaggggccagtgtactcttccttcaaaggcggttggaagtgcaaggaccacaccgagatgctgcaagagaatcaaggatgcattcggaaggtgactgtttctcaccaggaagccctggcccagcatatgaatatcagcactgtagaaagaccttacggctgtcatgagtgtggcaaaacgtttggaagacgattcagcttagtgcttcaccagcgcacacacaccggagagaagccctatgcttgcaaggagtgcggaaagaccttctctcagatctcaaatctggtgaaacaccagatgattcacacggggaagaaaccacacgagtgcaaggattgcaacaaaacttttagctacctcagtttcttaattgagcaccaacgcacacacacgggtgaaaagccttacgaatgtacagaatgcggcaaggctttttcccgcgcatccaacttgacgcgacaccaacgcatccatattggcaagaagcagtacatttgcaggaagtgtggcaaggcttttagttctggcagtgaacttatcagacatcagataactcatactggagagaagccttatgagtgtatcgagtgtggcaaggcgttccgcagattcagccatcttacccgacatcagtctatacatacaaccaaaacaccttatgagtgtaatgagtgcagaaaggccttcagatgtcactcttttctaattaagcaccagagaattcacgctggtgaaaagctctatgaatgcgacgaatgcgggaaggtttttacatggcatgctagcctgattcaacacaccaagagtcacactggagagaagccctatgcctgcgctgagtgcgacaaggcattctcacgctcttttagcctcattctgcatcaacgcacccacactggggaaaaaccttacgtgtgcaaggtgtgtaacaaatctttcagctggtcctccaacttggcaaaacatcagaggacgcacacacttgacaatccttacgagtatgagaattcctttaattatcacagcttcctgaccgagcatcagtag

SEQ ID NO: 247305 - DNA, 351 bp, synthetic construct
  misc_feature 1..351: note = Description of Artificial Sequence: Synthetic coding sequence
  source 1..351: mol_type = other DNA
atgagccagggatcagtgaccttcagggatgtagcaatcgattttagccaggaagaatggaaatggttacagcccgctcagcgtgacttatatcgatgtgtgatgctggaaaattacgggcatctcgtttcactgggtttatctattagcaaacctgatgtcgtgtctctcctggagcagggaaaggaaccttggctggggaagagagaggtgaaacgcgatctcttctctgttagcgagtcttctggggaaataaaagatttttcacctaagaacgtcatttacgatgacagcagccagtacctgatcatggagcgaatcttaagtcagggccctgtctatagttcatag

SEQ ID NO: 247306 - DNA, 684 bp, synthetic construct
  misc_feature 1..684: note = Description of Artificial Sequence: Synthetic coding sequence
  source 1..684: mol_type = other DNA
acacatacgggggagaaaccgtacgcttgcaaggaatgtggcaaaaccttttcgcagattagcaatctggtcaagcaccagatgattcacactggtaagaaaccgcatgaatgcaaagattgcaataagactttcagctatctgtccttcctcatcgaacatcagcggacacatactggtgaaaaaccctacgagtgcacagagtgcggcaaagcattctcaagggcgtcaaatctgacccggcaccagcggatccacatagggaaaaaacagtacatctgtcggaagtgcggcaaggcgtttagctctggctccgaactgattcggcaccagattacgcacacaggcgaaaaaccctatgaatgcattgagtgtggaaaggcgtttcgcagattcagccacttgacaaggcaccagcggattcatgcaggcgaaaaactctacgagtgcgacgagtgcggtaaggtgtttacctggcacgccagtctgattcagcacactaagtcgcacacaggagaaaagccctacgcttgtgcggaatgtgataaagccttctctaggagcttttctctgatcctgcaccagaggacacacactggagagaaaccatatgtttgtaaggtatgcaacaagagcttttcatggtcatctaatttggcaaagcatcaaagaacgcacacctag

SEQ ID NO: 247307 - DNA, 1065 bp, synthetic construct
  misc_feature 1..1065: note = Description of Artificial Sequence: Synthetic coding sequence
  source 1..1065: mol_type = other DNA
atggaacgaatcctgagtcaagggccagtgtactcatcgttcaagggcggttggaagtgcaaggatcacacggaaatgctgcaggagaaccagggctgtataagaaaggtaaccgtgagtcaccaggaagccctggctcagcacatgaacatcagtaccgtggagcggccatacggctgtcacgagtgtggaaagacgtttgggcgacgcttttctctcgtgttgcaccagcgcacccacacaggagaaaagccctatgcttgcaaggaatgcggtaagaccttctcacagatcagcaatctcgtcaagcaccaaatgattcatactggaaagaagcctcatgagtgtaaagattgcaataaaaccttttcctacctgtcctttttgatcgagcatcagcggacccacaccggcgagaagccctatgaatgcaccgaatgcgggaaggctttctctcgtgcaagcaaccttacccgccatcagagaatccatattgggaagaagcagtatatttgtaggaagtgcggcaaagctttctctagtggatctgagctgatcagacaccaaatcacacataccggcgaaaaaccttatgagtgtatcgagtgtggaaaagcgttcaggagatttagccacctgacacggcatcaatcgatacatactacaaaaacaccttacgaatgcaacgaatgtagaaaagccttccgctgccattcttttctcatcaagcatcaaaggatacatgccggtgaaaaactgtacgagtgtgacgaatgcggtaaagtattcacatggcatgcctccttgattcagcatacaaaatcgcacactggggaaaagccctacgcttgtgcagagtgtgataaagccttctcacggagtttctccctgatactccatcaacgtactcatacaggcgagaaaccttacgtgtgcaaggtgtgcaacaaaagcttttcatggagttccaacttggccaagcatcaaagaacccataccctagataatccatacgagtatgaaaacagtttcaactatcatagctttctgacagagcaccagtag

SEQ ID NO: 247308 - DNA, 1425 bp, synthetic construct
  misc_feature 1..1425: note = Description of Artificial Sequence: Synthetic coding sequence
  source 1..1425: mol_type = other DNA
atggaattgctgacatttcgtgacgtagccatagagtttagtcctgaggagtggaagtgcctggatcctgaccaacagaatctctatcgggacgtgatgctcgaaaactatcgtaatctagttagcctgggcgtggctatcagtaatcctgacttagtaacctgtttggagcagagaaaagaaccatacaacgtcaagatccacaagattgtcgccaggccacctgccatgtgtagccatttcactcaggatcattggccagtccaggggattgaggattcatttcacaagctgatactgcgcagatatgaaaaatgtgggcacgataaccttcagttacgcaaagggtgcaaaagcttgaatgagtgcaaattgcagaagggcggttacaatgaattcaatgagtgtcttagcacaactcagtctaagatcctgcagtgtaaggcctctgtcaaagtggtttctaagttcagcaacagcaacaaacgcaaaacacgacataccggggagaagcacttcaaagaatgcgggaagagcttccagaaatttagccatctgacccagcataaagtcatacacgccggtgaaaaaccttacacctgtgaggagtgtgggaaggcatttaagtggtcgctgatatttaatgaacacaagcgaattcacaccggcgaaaaaccgtttacctgtgaagagtgcgggtcaatattcacgacatcgtctcactttgccaaacacaagataattcacaccggcgaaaagccttataagtgcgaggagtgcggaaaagctttcaatcgcttcactaccctgaccaagcacaagaggatccatgccggtgaaaagcccattacatgtgaagaatgtcggaagatattcacttcgtcctccaactttgccaaacacaagcgcatccataccggcgaaaaaccctataagtgcgaggaatgtggtaaggcctttaatcggagtactacacttactaagcacaaacgcatccatacgggcgaaaagccctacacttgtgaagagtgtggtaaagcgtttagacagagttctaagctgaatgaacacaagaaagtgcacaccggcgaaaggccttacaaatgcgacgagtgcggcaaggctttcgggaggtcccgggtcttaaatgaacataagaaaattcacacaggggaaaagccctacaaatgtgaagagtgcgggaaggccttccgtagaagcacggaccggtcacagcacaagaagattcactcggccgataaaccatataaatgcaaggagtgtgacaaggcctttaaacagttttcacttctctctcagcacaagaaaatacatacagtggataaaccatataagtgcaaagattgcgacaaggcctttaaacgcttctctcatctgaataagcataagaagattcatacatag

SEQ ID NO: 247309 - DNA, 606 bp, synthetic construct
  misc_feature 1..606: note = Description of Artificial Sequence: Synthetic coding sequence
  source 1..606: mol_type = other DNA
atggagctgttaacattccgtgatgtcgctattgagtttagcccggaggagtggaagtgtctggatcccgatcagcagaacttgtatcgcgatgtcatgcttgaaaattaccggaatctggtctccctgggcgtagccatttcaaatccggatttagtaacatgtctggagcagcgtaaggagccctataatgtaaagattcacaagattgtggccagacctccagcgatgtgcagccacttcactcaggatcattggcctgtgcaaggaattgaggacagctttcacaaactcatccttcgccgatacgagaaatgcggtcacgataatctgcagctgcgaaagggctgtaaatccctcaacgagtgtaaactccagaaagggggttacaatgaattcaatgagtgcctgtccaccacgcagagcaaaattctccagtgtaaggccagtgtgaaagtcgtctccaagtttagtaacagcaacaagaggaagactagacacaccggtgaaaagcattttaaagagtgcgggaaatcgtttcaaaagttctcacacctgactcaacacaaaaacagtagcatctccatgacaactagccctttttag

SEQ ID NO: 247310 - DNA, 5063 bp, synthetic construct
  misc_feature 1..5063: note = Description of Artificial Sequence: Synthetic coding sequence
  source 1..5063: mol_type = other DNA
atgactgacccccttctggactcacaaccggcaagcagcacaggggagatggatgggctgtgtccagaactgctcctgatcccaccaccgctgtccaacagagggatactggggccagtgcagtccccatgcccctccagagaccctgcccctattccgaccgaaccaggttgcctgctggtagaggcaaccgctaccgaagagggcccaggaaatatggagattattgttgagaccgtcgccggtaccctcactcccggagcacccggagagactcctgcccctaaacttccacctggggagagagagccttcacaggaagcgggtacacccctccccggacaggagaccgcggaagaggagaacgtggagaaagaggagaagagcgatacccagaaagatagtcaaaaggccgtggataagggccagggagcccagagactcgaaggtgacgtggtgtccggcactgagtctctcttcaagacacacatgtgcccagagtgtaaacggtgttttaagaaacggacccatctggtcgaacacctgcatttacactttcctgacccaagcctccagtgcccaaactgtcaaaagttcttcactagtaagtccaagctcaagacccatcttctgcgcgaattgggcgaaaaggcgcaccactgccctctgtgtcattattccgcggttgagcgaaacgccctcaatcgacacatggctagcatgcacgaagatattagcaacttctacagtgacacgtacgcgtgtcctgtgtgtagggaggagttccgcctcagccaagccctgaaagagcaccttaaatcccacacggcggcagccgctgcggaacctctacccctcaggtgcttccaggaaggctgcagttacgctgctcctgatcgtaaggcatttatcaaacaccttaaagagacccatggggtaagggcagtggaatgccgccatcatagctgtccaatgttgttcgctaccgcggaagccatggaggcccatcacaagtcccactacgcattccactgcccgcactgtgactttgcctgcagtaacaagcatctttttagaaagcacaagaaacaaggccaccccggaagcgaagaactgcgctgcactttttgcccttttgctacatttaatccagtcgcctaccaggatcatgtgggtaaaatgcatgcccatgagaagatccaccagtgccctgagtgtaattttgccacggcgcacaagagagtgctgatcaggcacatgctgctacacacaggcgaaaaaccccacaagtgtgaactgtgcgacttcacgtgcagagacgtttcctacctctccaagcatatgctgactcattctaacaccaaagactatatgtgcacagaatgtggctacgttactaaatggaagcattacctaagagtacacatgcggaaacacgcgggtgacttgcggtatcagtgcaatcaatgttcctacagatgccacagagcggaccagttgtcatcccacaagttgaggcaccagggcaagtctctgatgtgcgaggtttgtgcatttgcctgtaagcgcaaatacgaactgcagaaacacatggcctcacagcaccatccaggaacacctgccccactgtatccatgtcactattgctcctaccaaagtaggcataaacaggcagtcctctcccatgaaaattgtaagcacactcgcctgagagagttccactgtgcactgtgcgactataggacctttagcaacaccaccttactcttccataagagaaaggctcacggctacgtgccaggtgaccaggcctggcaattgagatacgcctctcaggaacctgagggggcaatgcagggcccaacccccccaccagactcagaaccctctaaccagttgtcagccaggccagagggccctggacacgaacctgggacagttgtggatcccagcctcgaccaggcacttcccgagatgtctgaggaagtcaatactggcagacaggaagggtccgaagccccacacggcggtgacctaggtggcagcccttcgccggctgaggtggaagaagggtcttgcaccctccacctggaggcattaggtgtcgagctcgaatctgtgacggaaccacccctggaggaagtcaccgagacagcgcctatggagttcagaccactagggctggagggacctgacgggctggaaggcccagagctttcatcatttgaggggattggaacctccgacctttctgctgaagagaaccctctgttggagaaaccagtgtccgagccctccaccaatccaccttctctggaggaagcgcctaacaattgggtaggcacatttaaaacgacacctcctgccgagaccgctcccctccccccactgcccgagagtgagagcctgttaaaagcacttcgcagacaagataaggagcaggccgaagctcttgttctcgaaggacgcgtccagatggtggttatccaaggcgaggggcgtgcgtttcgatgtccccactgtcccttcatcactcgtagggagaaggccctgaatcttcatagcaggacaggatgccaagggagaagagagccgttactatgccctgagtgcggcgctagtttcaaacagcagcggggactgagcacccacctgctcaagaaatgtcctgtgcttctgcggaaaaataaaggactgcccagacctgattcccccatcccactgcagcctgtgctccccggtacacaggcgtctgaagatacggaaagtggaaagcccccacctgctagtcaggaggccgagctcttgctgccgaaagacgcccctctggagctacccagagaaccggaggagacagaggaacccctggcaactgtgtcaggtagcccagtgccccctgcgggtaactccttgcctacagaggcaccaaagaagcactgtttcgatcctgtgcctcctgctggtaacagctccccaaccgaggcccctaagaaacaccacctggaccccgtaccgcctgcaggcaactcctcacctacagaggctttgaagaaacaccgattcgagcaggggaaattccactgtaattcatgccccttcctctgtagccggctgagcagcattacaagtcatgtggccgagggctgtaggggaggacgaggtggaggcggaaaaagggggacgcctcagactcagcccgatgtctcccccctatccaatggcgatagcgccccacccaagaatgggagtaccgagtcatccagcggcgacggggacacagtgctcgtccagaagcagaaaggggcacgctttagctgccccacgtgtcccttctcctgccagcaagaacgggcactacgcacccatcagattcgaggctgcccactcgaggaaagcggtgagttgcattgctctttatgtcctttcacggcacctgccgcaaccgccttgcggctgcaccaaaaaagacgccatccaacagccgctccggcaagaggacctagaccacatcttcaatgtggtgactgtgggtttacttgcaagcagtctagatgcatgcagcagcatcggaggttaaaacacgagggcgtcaaaccacatcagtgccctttctgcgacttctctactacccggaggtatcgattagaggcacatcaatcgcgtcataccggcatcggacggatcccctgctcctcctgccctcaaaccttcggcaccaacagtaagttgcgcctccaccgcctgagagtgcatgacaaaacaccaacgcacttttgccccctgtgcgactatagcgggtacctgagacatgatatcactcggcacgttaacagctgccaccagggcaccccagcctttgcctgcagccagtgcgaggcacagttcagtagtgaaaccgcgctgaagcaacacgcactgcgtagacaccccgaaccagctcagccggctccagggtcacctgcggaaaccactgagggccctctgcattgcagccgctgtgggctcctgtgtccttcacctgctagcctgcgaggccacacccgcaaacaacaccccaggctagaatgcggggcttgccaggaggctttccctagtagactggccctggacgaacaccgcaggcaacagcattttagccacaggtgccagctgtgtgactttgcagcacgggagagagtcggactagtcaagcactacctggaacagcacgaagaaacctccgccgcagtcgccgctagcgacggggatggcgacgccggacaacccccattgcactgtcccttttgtgacttcacgtgtcgccaccagttggtgttagatcaccatgtaaagggccatggtggcacaaggctgtataagtgtaccgattgcgcctattctacaaaaaatagacagaagatcacctggcactctcggatccacaccggagagaaaccctaccattgccacctgtgtccctacgcctgcgctgaccccagccgtctgaagtatcacatgaggatccacaaagaggagcgtaagtacctgtgtcccgaatgtggctataagtgcaagtgggtgaatcagctgaagtaccacatgacgaaacacacaggcctgaagccctaccagtgcccagagtgcgagtactgcaccaatagggctgacgcgctgcgggtgcaccaggaaacccgtcacagagaagcacgcgcatttatgtgcgaacagtgtgggaaggcctttaaaactcgcttccttctgcgaactcaccttcgcaaacatagcgaagctaaaccctacgtttgcaacgtgtgccacagagcctttaggtgggctgccggattgaggcaccatgctctgactcacaccgatcgacaccccttcttttgtcgactctgtaattacaaagctaagcagaagttccaggtcgtgaagcacgtccgtaggcaccatccggaccaggctgaccccaatcagggagtcggaaaagacccgactaccccgacggtccacctgcatgatgttcagttagaagacccaagccccccagccccagcagcccctcataccggacctgaaggata

SEQ ID NO: 247311 - DNA, 45 bp, synthetic construct
  misc_feature 1..45: note = Description of Artificial Sequence: Synthetic coding sequence
  source 1..45: mol_type = other DNA
atgactgaccccctgttggatagccagccggctagctcaacctag

SEQ ID NO: 247312 - DNA, 5063 bp, synthetic construct
  misc_feature 1..5063: note = Description of Artificial Sequence: Synthetic coding sequence
  source 1..5063: mol_type = other DNA
atgaccgaccccctgcttgactcgcagccagcttctagcaccggtgagatggacggtctctgccctgagctgctgctaatcccgcctccactgtccaatagaggcattctgggcccagtccagtccccgtgccccagcagagatccagccccaatccctaccgaaccaggatgcttactcgtggaggccaccgctaccgaagaaggaccagggaatatggaaattattgtggaaacagtggccggtaccttgactccaggtgctcccggagaaacccccgcacctaaactgccacccggagagagggaaccatctcaggaagcagggacaccactgccaggacaagaaacagccgaagaggaaaacgtcgagaaagaagagaaaagtgacacccaaaaggactcccaaaaggcggtcgacaaaggccagggggcacagaggttagaaggcgatgtggtgagcggcaccgagagcctgttcaagacgcacatgtgccctgaatgcaagcgctgcttcaaaaaacggacacacctagtggaacacctccacctgcatttccccgatcccagcctgcagtgccccaattgtcagaagttttttaccagcaaatccaaactgaaaacacatctcctgcgggagttgggtgaaaaagcacatcactgcccactgtgccattattctgcagtggagaggaacgcccttaatcgccacatggcctctatgcacgaggatatttccaacttttattctgatacttatgcttgtccagtgtgtagagaagaatttagattatctcaagccctgaaagaacacctgaaatcccataccgctgctgccgcagctgagcctcttcccctgcgctgtttccaagaggggtgtagttatgcagctcctgatcgcaaggcttttattaaacacttaaaagaaacccacggcgtccgggctgtcgagtgtcggcatcactcatgtccgatgttgttcgcaacggctgaagccatggaggcccaccacaagtcccattacgcctttcattgcccacactgtgatttcgcctgttccaacaagcacctgttcaggaagcacaaaaaacaggggcaccctggcagcgaagaactgcggtgcaccttctgccccttcgcaacgtttaatccagtggcttatcaagaccacgtggggaagatgcacgcccatgaaaaaatccaccagtgtcctgaatgtaattttgccacggcccacaaacgtgtgcttataaggcacatgctgctgcataccggggaaaaacctcataagtgcgaactatgtgactttacatgccgggacgtttcatacctgtcaaaacacatgctaacgcacagcaacacgaaggactatatgtgcactgagtgcggctatgtcacaaagtggaaacattacctacgtgtccacatgagaaagcatgcaggtgacctaaggtaccaatgtaaccagtgctcatatcgctgtcaccgggctgatcaactgtcctctcataagctgagacatcagggtaagagtctgatgtgtgaggtgtgtgccttcgcttgcaagaggaagtatgagctccagaagcatatggccagccagcatcatcctggcacccctgctcccctgtatccatgtcactactgctcataccagagcagacacaaacaggctgtgctgagccacgagaactgcaaacacactaggctcagggaatttcactgcgcactgtgtgattatagaacatttagcaacacaaccctactctttcataagcgcaaggcccacggttatgtgccaggggatcaggcctggcaactgaggtacgcatcccaggaacctgagggagcaatgcagggcccaactccacctccggatagcgaacctagcaaccagctatctgcacgtccggaaggcccaggacacgagccaggtacggtggtggatccttccctcgatcaggcccttccagagatgtcagaggaggttaatacaggcaggcaggagggatctgaggctccacatggcggtgatctggggggaagtccttctccggctgaggttgaagaagggtcctgcacgctccatctggaagccctgggcgtggaactggagtccgtcacggaacctcctctagaagaggtgacagaaacagcccctatggaatttaggccattggggctggagggcccagacggattagagggacctgagctcagttccttcgagggaatcgggacttctgatctgagcgcagaggaaaacccactcctggaaaagccggtttcagagccgagcacaaaccctcctagtctagaggaagcaccgaacaactgggtcggtactttcaagactaccccccctgcggaaaccgctcctctcccacctctgcccgaatctgagagcctgctgaaggctttgaggcggcaggataaggagcaggctgaggctctcgttctcgagggcagagtccaaatggttgtgattcagggagagggccgtgcttttaggtgcccgcattgtccattcatcacacgcagagaaaaggctctaaacctgcatagcagaactggttgtcagggaaggcgcgagcctcttctatgccccgaatgtggtgcctcattcaaacagcaacgaggccttagcactcatctgttgaaaaaatgtccagtgctgcttcgtaaaaacaagggtctgccaagacctgactcaccaattccgctgcagcccgttctgccaggcacccaggcttccgaggatacagagagtggaaaacctccacccgcaagccaggaagccgagcttctcttgccaaaagatgccccattggagctgcccagagagcccgaggagaccgaagaaccacttgccacagtttccggaagtccagtgccccctgccggtaactccttaccaactgaagcccctaaaaaacattgtttcgaccccgttccgccagccggaaacagcagtccaactgaagccccaaagaaacatcatctcgacccggtgcctcccgcaggcaactccagccctaccgaggctttaaaaaagcataggtttgaacaaggcaaatttcactgcaactcgtgcccattcttatgctccagactcagctcaattaccagccacgtcgcagagggctgtaggggtgggcgtgggggaggtggtaaaaggggtaccccccagacacagccagacgtcagccctctctctaacggagattcggcccctccgaagaatggctccaccgaaagctcttcaggcgacggcgacaccgtcctcgtgcagaagcaaaaaggggcacgcttcagttgccccacgtgccccttctcatgccaacaggagcgcgctctgagaacccaccagataagagggtgccctttggaggaatctggcgagctgcactgcagtctatgtcctttcaccgcccctgccgcaactgccctgcggctgcaccagaagaggagacaccccacggctgctccggctcgagggcctcggcctcacttacagtgcggggactgcggcttcacatgtaagcagtccagatgcatgcaacaacacaggcggttaaagcatgaaggcgtgaaaccccaccagtgccctttttgtgattttagcactacccggaggtaccgtctggaggctcaccagtcccggcacacaggcatcggcaggattccctgctccagttgccctcagacttttggcaccaatagcaagctcagactccatcggttgagggtccatgataagacccccacgcacttttgtcccttgtgtgattactctggttatctgcgccacgacattacgcggcacgtgaactcctgccatcagggcacgccagccttcgcttgctcccagtgtgaggcacagttctcctctgagacagccctgaaacagcatgccttaagacggcatcccgaaccagcacagcctgctcctggatctcccgctgagaccaccgagggccctctccactgcagtcgctgcggactgttatgccccagtcccgcaagcttgaggggccatacccggaaacagcaccccagactggagtgcggcgcatgccaagaagcattccccagtcggctggcactggatgagcatcgcagacagcagcatttttcacacaggtgtcagttgtgtgacttcgcagcacgagagcgggttggactggtcaaacactatctggagcagcacgaggaaacatctgccgcagttgccgcttccgacggggatggggacgctggtcagccccctctgcattgcccattctgtgatttcacttgcaggcaccagctggtgttggatcatcacgtcaagggacacgggggaactcgtctttacaagtgtacagactgtgcatacagtaccaaaaaccggcagaaaattacgtggcattcacgaatccacactggggagaagccctaccactgccatctgtgcccttacgcatgcgctgacccttcgcgtttgaagtatcacatgaggatacacaaagaagagaggaaatatctctgtccggagtgtggttacaaatgcaaatgggtcaatcagcttaaataccacatgaccaaacatacgggcctgaagccatatcaatgtccagagtgcgagtactgcactaatcgggctgatgctctgcgagtacaccaagagacccgtcacagagaggcacgtgctttcatgtgtgagcagtgtggaaaggcgtttaagacacgctttcttctacgaactcaccttcgtaagcacagtgaggctaaaccctacgtgtgcaacgtgtgtcaccgagctttcaggtgggccgcagggctgcggcatcacgcgttgacccacacggatcgccaccccttcttttgcagactgtgtaactacaaggccaagcagaagtttcaagtggtgaaacacgttcggcgacatcaccccgaccaggcggaccccaaccagggagtgggtaaggatccgaccacacctacagtacacctccatgacgttcagctggaggatcccagccctccggcaccagccgcaccccacacagggccagaaggcta

SEQ ID NO: 247313 - DNA, 81 bp, synthetic construct
  misc_feature 1..81: note = Description of Artificial Sequence: Synthetic coding sequence
  source 1..81: mol_type = other DNA
atgactgaccccttgttggactcccagcctgcgagctctacaggtgaaatggacgggctgtgccccgagctgctcctatag

SEQ ID NO: 247314 - DNA, 1824 bp, synthetic construct
  misc_feature 1..1824: note = Description of Artificial Sequence: Synthetic coding sequence
  source 1..1824: mol_type = other DNA
atgctgttggcacagatcaaccgcgacagccaggggatgaccgagttccctggcggtggcatggaagcgcaacatgtcactctgtgtctgaccgaggcagtcacagtggctgacgcaaagttgatagacggacaggttattcaactcgaggatggcagtgcagcttacgtgcaacacgtgcctattcctaaatccaccggagattcgctccgccttgaagacggacaggccgttcagctcgaagacggaacaacagcgttcattcatcacacctcgaaggattcttacgaccagagtgccctgcaggcagtccagctcgaagacggtaccaccgcctacatccaccacgccgtccaagtgccccagtctgatacaatcctcgctattcaagccgacggcactgttgccggactccacaccggcgatgctactatcgacccagatacaataagcgcattggaacagtatgctgcaaaagttagtatcgacggcagcgaatctgtggcgggtactggcatgattggcgagaatgaacaggagaaaaagatgcagatcgtgctccagggtcatgccaccagggtcacagccaaatctcagcaatctggcgaaaaagccttccgttgcgaatacgacggttgcggtaagctctacactaccgcccaccatctgaaagttcacgaaaggagccacactggagatcgcccatatcagtgcgagcacgcaggatgtggcaaagccttcgcgaccggctatggacttaagagccacgtgagaacccacacaggtgaaaaaccttaccgctgctccgaggacaactgtacgaaatcttttaaaacatcaggcgatctgcagaagcacattagaacgcataccggcgaaaggccctttaaatgtccatttgaagggtgcggacggtctttcactacctccaacattcgtaaggtccacgttaggacacataccggtgaaagaccgtactactgcactgagcccggatgtggacgggcttttgccagcgctacaaactacaaaaaccatgttaggatccacacaggtgagaagccctacgtctgcactgtcccgggttgtgacaagcggttcacagagtattccagcctgtataagcatcacgtggtgcacacacacagcaagccatacaattgcaaccattgtggcaaaacctataagcagatttccacactggctatgcataaacggacggctcataacgacaccgaacccatcgaggaggagcaggaggccttttttgaacctccaccaggtcagggggaagatgtgctcaaggggtcacagataacgtacgtgactggtgttgaaggcgatgacgtagtgtccactcaagttgccaccgtcactcagagtggccttagtcagcaggttaccttgatcagccaggacggcacgcagcacgtgaatatctcgcaggcagacatgcaggcaatcgggaataccatcacaatggtcacacaggatggaacacccataacggttcctgcccatgatgcagtaattagctccgccggtactcactctgttgcaatggtgaccgccgagggtactgagggcgagcaggtggctattgtggcccaggatctggctgcattccataccgcttcctctgagatgggccaccagcagcatagtcaccacctggtaactaccgagacaagaccactcactttggttgctactagcaacggtacccagattgcggtgcaactgggggaacagccctcgttggaagaggccatccgtatcgcctcacgcatccagcagggagagacacctggccttgacgattag

SEQ ID NO: 247315 - DNA, 1917 bp, synthetic construct
  misc_feature 1..1917: note = Description of Artificial Sequence: Synthetic coding sequence
  source 1..1917: mol_type = other DNA
atgttgcttgctcagattaatcgggactcgcagggaatgaccgagtttcccggaggcggtatggaggcccagcacgtcaccctctgcctgactgaagccgtaactgttgccgacggagataaccttgaaaatatggaaggcgtttctctgcaggccgttactttggcagatggatccacagcctatatccagcataattcaaaggacgccaaactcatcgacggccaggtgattcagctggaggacggtagcgccgcatacgtccaacacgtgcccatccccaagtccactggcgactccctgcggctagaggatgggcaggccgttcaattggaagacggaactacagcgttcatccatcacactagtaaggactcgtacgaccaatccgccctccaggccgtgcaacttgaggacgggactacagcctacattcatcatgccgtgcaggtgccccagtccgataccatcctcgctatccaggcggatggaacagtggcaggactgcatactggcgacgcaacaatcgacccggatactatctccgctcttgaacagtatgcagccaaggtctctatcgacggatctgagtctgtggcgggaactggcatgatcggcgagaatgagcaggaaaagaagatgcagatcgtactccaaggacacgctacgcgcgtcaccgcaaaatcccagcagtccggagagaaagcctttaggtgcgagtacgacgggtgcggaaagctgtacaccactgcccaccatctaaaggtccacgaacgctctcataccggagacaggccatatcaatgtgagcatgccggttgcgggaaggcctttgccacgggctacggcctgaaatctcacgtgagaactcatacgggtgagaaaccctaccgatgctcagaggacaattgtactaagagttttaagacatccggcgacttacagaagcacataagaacccacaccggcgagcggccatttaaatgtccattcgagggttgtggcaggtcattcacaacctccaacatcaggaaggttcatgtaaggacccacacaggtgagcggccttattactgcactgagcctggctgtggcagagcatttgcctccgcaaccaactacaagaaccacgtgcggattcataccggagagaaaccatatgtctgcacagtccccggttgcgacaagaggttcactgaatactcatccctgtacaaacatcacgtcgtccacactcactcaaagccatataactgcaaccattgtggtaaaacgtataaacagatctcaaccttggcaatgcacaagagaacagcccacaatgacacagaacccatcgaagaagagcaggaggcctttttcgaacctccgcctggacagggtgaggacgtacttaagggctctcagataacctatgtgacaggtgtagagggagacgatgtagtgtctactcaggtggcaactgttactcagagcggcctgtctcagcaagtgacactgatttctcaggatggcacacagcatgttaatatttcccaagctgacatgcaggccatcggcaacactatcaccatggtgacacaggatggtacaccgatcacagtccccgcacacgatgcggtgatttcctctgctggaactcacagcgtcgctatggtaacagcagaagggactgagggcgagcaggtcgctatagtcgcccaggatctcgcagcgttccacaccgccagtagtgagatgggtcaccagcagcactctcaccatctggttacgactgagacccgtcctcttacccttgtggccacctcaaatggaacccagatcgcagtccagctgggagaacagcctagtctcgaagaggcaattagaattgcctcccgtatacagcagggggagacacctggcctagatgactag

SEQ ID NO: 247316 - DNA, 429 bp, synthetic construct
  misc_feature 1..429: note = Description of Artificial Sequence: Synthetic coding sequence
  source 1..429: mol_type = other DNA
atgttgcttgcccagattaacagggactctcagggcatgacggagttccctggcggagggatggaggctcagcatgtgactctatgcctgacagaggccgtgactgtagcggacggcgacaatctcgaaaatatggagggcgtttccctgcaggctgttacactcgcagacggttctaccgcatacattcaacacaacagtaaagatgcgaagctgattgatggacaagtgatccagctcgaggacggatctgcggcttatgtgcaacacgtgcctataccaaaatcacgtgacagtctgcgactcgaggatggccaggcagtgcagctcgaagacgggaccacagcgttcatccaccacacatccaaagactcatatgaccagtctgccctacaggccgtccaactcgaagacgggactacagcctag

SEQ ID NO: 247317 - DNA, 255 bp, synthetic construct
  misc_feature 1..255: note = Description of Artificial Sequence: Synthetic coding sequence
  source 1..255: mol_type = other DNA
atgttgttagctcagattaatagagacagtcagggtatgaccgagttcccagggggtggcatggaggcacaacatgtgaccctctgcctgaccgaggcagtgacagttgctgatggagacaacctggaaaatatggagggggttagccttcaggccgtgaccttggccgacggtagcacggcatacattcagcataacagtaaggacgcaaagctgatcgatggacaggtcattcagttggaagacgggagttag

SEQ ID NO: 247318 - DNA, 222 bp, synthetic construct
  misc_feature 1..222: note = Description of Artificial Sequence: Synthetic coding sequence
  source 1..222: mol_type = other DNA
atgctgctggcccagattaatcgtgatagccagggcatgacggagtttcccggtggtggcatggaggcacagcatgtaaccctgtgcctcactgaggcagtgacagtggcggacggggacaatctggaaaacatggagggagtgtctctgcaagctgtcaccttggcagatggctcaaccgcatacatccagcacaacagcaaggacgccaaactgatctag

SEQ ID NO: 247319 - DNA, 573 bp, synthetic construct
  misc_feature 1..573: note = Description of Artificial Sequence: Synthetic coding sequence
  source 1..573: mol_type = other DNA
atgttactggctcagatcaatcgggattcacagggaatgactgagtttccgggtggaggcatggaggcccaacacgtcactctgtgcttgaccgaggctgtgacagtggctgatggggacaacctcgaaaatatggagggtgtcagcctccaggctgttaccctcgctgacggatccaccgcatacatccagcataactccaaggatgccaaactcatcgacggccaggtgatccagctagaggacggatccgcagcatacgtgcagcacgtccctatacccaagagtactggggatagcttgaggctggaggacgggcaggctgtccagctggaggacggaacgaccgcgttcattcaccatacatccaaggattcttacgaccaatccgccctccaggctgtccagctggaggacggtaccacggcctacatccaccacgctgtgcaagtgccccagtctgacaccatcctcgccatccaagctgatgggacagtggcaggcctccacaccggcgacgcgaccattgatcccgacacgatcagcgctctggaacaatacgccgcaaaatag

SEQ ID NO: 247320 - DNA, 411 bp, synthetic construct
  misc_feature 1..411: note = Description of Artificial Sequence: Synthetic coding sequence
  source 1..411: mol_type = other DNA
atgctgctcgcccagatcaacagggattcccagggtatgaccgagttccctggtggcggaatggaagcacagcatgtaacgctgtgcctaaccgaagcagtcacagtcgccgatggagataacctggaaaatatggagggcgtgagcctccaggccgtgactctcgctgacggctccacagcatacattcagcacaattctaaagacgccaagctgatcgacggccaggtcatccagctggaggatggctccgccgcttacgtgcagcacgtccccatccctaagtccacgggcgattccttgcggctggaagatggacaagccgtgcaactggaggacggcacgaccgccttcattcaccataccagtaaggattcttatgatcagagcgcacttcaagcagtccagtag

SEQ ID NO: 247321 - DNA, 528 bp, synthetic construct
  misc_feature 1..528: note = Description of Artificial Sequence: Synthetic coding sequence
  source 1..528: mol_type = other DNA
atgctgttggcccagataaaccgggatagtcaaggaatgacggaattccccggtggcggaatggaggcgcagcatgtcacactctgtcttacagaagctgtgaccgtggcagatggcgacaatctcgaaaacatggaaggagtaagcctgcaggccgtgacccttgctgatggctccactgcatatattcaacataattccaaggatgcaaagctgatagacggccaagttatccagctggaagacggatcagcagcttacgtgcagcacgtgccaattcccaaaagcaccggtgactccctacgcctcgaagacggacaagcagtacagctcgaagatggtacgactgcattcatccaccatactagcaaagatagctacgaccagtcagcattacaagcagttcagctcgaggatggcacaacagcctacatccaccatgcggtccaagtcccccaatccgataccattctcgccatccaggccgatggcacagtggcaggactgcataccggagacgctacctag

SEQ ID NO: 247322 - DNA, 879 bp, synthetic construct
  misc_feature 1..879: note = Description of Artificial Sequence: Synthetic coding sequence
  source 1..879: mol_type = other DNA
atgtcacatctctctcagcaaagaatatactcgggtgaaaacccttttgcatgcaaagtctgcggtaaggtattttctcacaagtctaatctcacggagcatgaacactttcacaccagagagaagcccttcgaatgcaacgagtgtgggaaagccttttctcaaaagcaatacgtaattaaacatcagaacactcacactggagaaaagttgttcgaatgcaacgaatgcgggaagtctttttcccagaaagaaaatcttctgactcatcaaaaaatacatacaggcgaaaaaccatttgaatgtaaagactgcggaaaggcattcattcagaaatctaacctgattagacaccagcgcacgcacaccggagaaaaaccctttgtttgcaaagagtgtggtaagacttttagcgggaaatccaacttaacagagcacgaaaaaatccatataggcgagaaaccttttaaatgttctgagtgcggaacggcgttcggtcaaaagaagtaccttatcaaacatcaaaatatccacacgggcgaaaaaccatatgaatgtaacgaatgtggcaaggccttcagccagcggacgagtttgattgtgcacgtcaggatccactccggagacaagccctatgagtgcaatgtctgtggaaaggcgtttagtcagtcttcaagtctcacggtgcacgtgagaagccacacgggcgagaaaccttacggttgcaatgagtgcggaaaggctttctctcagttcagtacattggccctgcatctccggattcacacaggaaaaaagccctatcagtgttcagaatgtgggaaagccttcagccagaaaagccatcatatccggcaccaaaaaattcatacacattag

SEQ ID NO: 247323 - DNA, 879 bp, synthetic construct
  misc_feature 1..879: note = Description of Artificial Sequence: Synthetic coding sequence
  source 1..879: mol_type = other DNA
atgtcccacctgtcacaacagagaatttattcaggggagaatccattcgcctgcaaggtctgtgggaaggtgttcagccacaaatctaatttgactgagcatgagcattttcacacccgtgagaaaccgtttgagtgtaatgaatgtggaaaagccttctcccagaaacaatatgttataaagcaccagaacacacatacgggtgagaagctgttcgaatgcaacgaatgcggtaaatctttctcccaaaaggagaacttgctcacccaccagaagatccataccggagagaagccctttgaatgcaaggattgcggcaaggcgttcattcagaagtccaacttaattagacaccaacgcacacacaccggagaaaaacccttcgtttgcaaagagtgtgggaaaactttctctggcaaaagtaatctgacggagcacgaaaagattcacattggcgagaaaccctttaagtgtagtgaatgtggcaccgcattcgggcaaaaaaaatacctgataaagcatcagaacatccacactggtgaaaagccctacgagtgcaacgaatgcggaaaagccttttcgcagcgcacttctttgattgtgcatgtccgaatccactccggagacaaaccctatgaatgtaatgtgtgtggcaaggcgttcagccagtctagcagtctgacggtgcacgttaggtcccataccggagagaaaccctacgggtgtaacgaatgcggcaaggcattttcacagttttccaccctggccttgcatcttagaattcacacgggtaaaaaaccttaccagtgcagtgagtgcggtaaggctttcagtcagaaaagccatcatattagacaccagaaaatccacacccactag

SEQ ID NO: 247324 - DNA, 2385 bp, synthetic construct
  misc_feature 1..2385: note = Description of Artificial Sequence: Synthetic coding sequence
  source 1..2385: mol_type = other DNA
atgaacatcgatgacaagctcgaaggactattcctaaagtgtgggggaatagatgaaatgcagtcctctaggaccatggtcgttatggggggagtctccggccagtctacagtaagcggggagttgcaggactccgttcttcaggatcgaagcatgccacatcaggaaatactcgccgctgacgaggtcttgcaggaatcagagatgcggcagcaagatatgatatcccatgacgaactcatggtgcatgaagagacagtgaaaaacgatgaagagcagatggaaacccacgagagactgccacaaggactgcagtacgcgctgaatgtacctatctcagtcaagcaagagattacttttactgatgtctccgagcaactgatgagagataaaaaacaaatacgcgaacccgtggatcttcaaaaaaaaaaaaagcggaagcagcgtagccccgctaagatcttaacaattaacgaggacgggagtttaggactcaagacaccgaaaagtcacgtctgcgaacattgcaacgccgcttttcgcaccaattaccaccttcaacgccacgtttttattcatacgggagaaaagccttttcaatgtagtcaatgtgacatgaggtttatacagaagtacctgctgcagcgtcatgagaagatccataccggtgagaagccatttaggtgtgatgagtgcggcatgagattcatccagaagtaccatatggagcggcacaaaagaacacactccggtgagaagccataccagtgtgaatactgcctgcaatatttctcgaggacagatcgcgtgctgaaacacaagcggatgtgtcatgagaatcacgataaaaaactgaaccgttgtgcaatcaagggaggcttgctgacgagcgaggaagacagcggtttctccacaagcccgaaagacaactcgttgcctaagaaaaagaggcaaaaaaccgagaagaagagctccggtatggacaaggaaagtgcactcgataaatctgaccttaaaaaagacaaaaacgactacctgccgttatatagctccagtaccaaagtcaaggacgaatatatggtggcagagtacgccgttgagatgccgcactcctctgtgggaggttcacacttggaagacgcttctggtgagatccacccaccgaagttggtgctgaagaagatcaactccaagaggtctctgaagcagcctctggaacagaaccagacaataagtcctcttagcacatacgaggagagcaaagtgtcaaaatacgcattcgaattagtggataaacaggccttattggatagcgagggaaatgccgatatcgaccaagtcgacaacctgcaggagggaccctcaaaacctgtgcactctagcactaactatgacgacgctatgcagttccttaaaaaaaaacgctatctccaggctgctagcaataatagccgggagtacgcgctgaatgtaggcacaatagctagccagccctcggtcacccaagcagcggttgcctccgtgatcgacgagtctaccactgcgagcattcttgaatcacaggccctcaatgtggagatcaagagtaatcacgataagaacgttattccagatgaggtgcttcagaccttgctagatcattactctcacaaggccaacggtcagcatgaaataagcttctctgtggcggataccgaggtcacctcatccatctctatcaattctagcgaggttcccgaggtcaccccatcggaaaatgtcggatctagcagccaggcgagcagttctgacaaagccaacatgcttcaggagtattcaaaatttttgcagcaggccctggatagaaccagtcaaaatgacgcttatctgaattcaccaagcctgaacttcgtcactgacaatcagaccctgccgaaccagccagcattctcctccatcgataaacaggtgtacgccaccatgcccatcaattcattccgttccggcatgaattctccgctgaggactactcccgataaaagccatttcggcctaatcgtgggtgactcccaacacagctttccattctctggggacgagaccaatcacgccagtgccacatctacacaggacttcttagatcaggtaacctcacagaaaaaagcagaggcccaacctgttcaccaagcgtaccagatgtcttcttttgaacagcctttccgcgcaccttatcatggatctcgcgcaggcatcgccacccaattctcaacagctaatgggcaggtcaaccttcggggacctggtactagcgccgagttctctgaatttccgttagtcaatgtgaacgacaacagggcagggatgacttcaagccccgatgctactaccggccagaccttcggctag

SEQ ID NO: 247325 - DNA, 252 bp, synthetic construct
  misc_feature 1..252: note = Description of Artificial Sequence: Synthetic coding sequence
  source 1..252: mol_type = other DNA
atgaatatcgatgacaagttggaagggttgtttctgaagtgtgggggaatagatgaaatgcaatcttccaggacgatggtggtgatgggcggtgtgtcaggacagtccacagtctcgggggagttgcaggattcagtgctacaggaccgaagcatgccccatcaagagattctggccgctgacgaggtcctgcaggagtcagaaatgcgtcagcaggatatgataagccatgacgaattaatggtccattag

SEQ ID NO: 247326 - DNA, 435 bp, synthetic construct
  misc_feature 1..435: note = Description of Artificial Sequence: Synthetic coding sequence
  source 1..435: mol_type = other DNA
atgaagggcgagaaacccttccagtgttcacagtgcgacatgagattcatccagaaatacctgctgcagcgtcacgagaagattcacactggcgagaagccctttagatgcgatgagtgcggcgacgagacaaaccacgcaagcgcaaccagtacgcaagattttcttgaccaggtcacctcacagaagaaagccgaggcgcagccagtccaccaggcataccagatgtctagctttgagcaacctttccgcgcaccataccatgggtcccgagctggtattgctacacagttttcaactgcaaatggacaggttaatttgaggggcccagggacctctgccgagttttcagagtttccactggtgaacgtcaacgacaacagggctggaatgaccagttcccccgatgctacgacgggtcaaacatttggctag

SEQ ID NO: 247327 - DNA, 78 bp, synthetic construct
  misc_feature 1..78: note = Description of Artificial Sequence: Synthetic coding sequence
  source 1..78: mol_type = other DNA
atgaacattgatgacaagctggagggactgtttctgaaatgcgggggtattgacgagatgcaaagtagtcggacttag

SEQ ID NO: 247328 - DNA, 2385 bp, synthetic construct
  misc_feature 1..2385: note = Description of Artificial Sequence: Synthetic coding sequence
  source 1..2385: mol_type = other DNA
atgaatatcgacgacaaacttgagggcttgtttctcaaatgcggaggaattgacgaaatgcaatccagtagaaccatggtggttatgggaggtgtcagcgggcaaagcactgtgagtggagaacttcaagatagtgtgcttcaagacagatctatgccacatcaagaaatacttgctgccgacgaggtgctgcaggaaagcgaaatgagacaacaggacatgatcagccacgatgagctgatggtgcatgaggagacagttaaaaatgatgaagaacagatggagacacacgagcgcctgcctcagggactccagtatgccctcaacgtcccaataagtgtgaaacaggagattacgttcaccgacgtgagcgagcagttgatgcgggataaaaaacagattcgcgaacctgttgacctgcaaaagaaaaaaaaacgaaaacagcggagcccggctaagatactgactatcaatgaagacgggagcctcggcctcaagacacctaagagtcacgtgtgtgagcactgtaatgccgcttttcgcactaactatcatttgcagaggcatgttttcatccatactggcgagaagcctttccagtgctctcagtgcgatatgcggtttatacaaaagtatttgctgcagagacacgagaagattcataccggtgaaaagccttttcgctgtgatgaatgtgggatgcgatttattcaaaagtaccacatggagagacacaaacgcacacactccggcgaaaaaccataccagtgtgagtactgcctgcagtacttttctagaacagaccgcgtcctgaagcacaagcgcatgtgccacgaaaatcacgataaaaaactgaacagatgtgccatcaagggcggtctgcttaccagcgaagaggacagcggattctccacgagccctaaagataactcccttcccaagaaaaaaagacagaagacggagaagaagtcaagcgggatggataaggagagcgccctggataaaagcgacttgaaaaaggataagaacgattacttacctttatattcttccagcactaaggtcaaggacgaatacatggtcgccgagtacgccgtagagatgccccactccagtgttggaggcagccatctggaagatgccagcggcgagatccaccctcctaagctggtgctcaagaaaattaacagcaaacggagtctgaaacagcctttggagcagaatcagacaatctctccactgagtacttacgaggaatctaaggtgtcaaaatatgctttcgagctagtggataaacaggctctattggatagtgaaggcaatgccgacatcgatcaggtcgacaatctgcaggagggcccatctaagcccgtgcactcctcaacgaactatgatgacgctatgcagttcctgaaaaaaaagcgctacctgcaggcagccagcaataactcacgggaatacgccttaaacgtgggtaccatagcctcacaaccttccgtgactcaagctgccgtcgcatcagtaatcgacgagagtaccacagcgagcatcttggaaagccaagctctgaacgtggaaatcaaatccaaccatgataagaatgtgatccctgatgaggtacttcagaccctgctagatcactactcgcataaggctaacgggcagcacgaaattagcttttccgtcgctgacaccgaagttacatcatctatcagcattaattcttccgaagtgcctgaggtgacaccatctgaaaatgtcggctccagtagccaggcttcttcctcggacaaggcaaacatgctccaggagtatagcaagtttcttcagcaagctttagacagaaccagtcagaatgacgcttacctgaactcgccgtccctcaacttcgtgaccgacaaccagaccctcccaaatcagccagccttttccagtattgacaagcaggtctatgctaccatgccgatcaacagcttccggtctggcatgaattctcctctgcgcacgacacccgacaagagccacttcgggctgattgtgggcgacagccagcattccttcccctttagtggagacgagactaatcacgcctctgccacctctacccaggactttttagaccaggtgacttctcagaaaaaagcagaggcccagcccgttcaccaggcataccaaatgtccagtttcgagcagccctttagggcaccgtaccatggatctagggccggaattgctacccaattctcaaccgctaatggacaggtgaacctgcggggtccaggcactagtgccgagttctctgaatttccactggtcaacgtcaacgacaatcgtgcagggatgacctcaagccctgatgccaccaccggccagacgttcgggtag

SEQ ID NO: 247329 - DNA, 2385 bp, synthetic construct
  misc_feature 1..2385: note = Description of Artificial Sequence: Synthetic coding sequence
  source 1..2385: mol_type = other DNA
atgaacatagacgacaagctcgagggtttgttcctgaaatgtggtgggatcgacgagatgcaatcaagtcgcacgatggtagtcatgggaggtgtctcaggccagagcaccgtgtccggcgaactgcaggattcagtgctgcaggaccggtccatgccccaccaagagatattggccgctgacgaagtgctgcaggagtctgagatgaggcagcaggacatgattagtcatgacgaactgatggttcacgaggaaacggtgaagaacgacgaagaacagatggagacacacgaaagactcccccagggacttcaatatgccctgaatgtgcctatcagcgtgaagcaggagataacctttactgacgtgtcggagcagctcatgagggacaagaagcagatacgtgagccagttgacttgcaaaagaaaaaaaaaaggaagcaacggtctccagcgaagattctcactattaatgaagatggaagtctcggcttgaagacacccaagagtcacgtgtgcgaacactgcaacgctgcattcagaaccaactaccacctgcaacggcatgtgtttattcacactggagagaagccgtttcagtgtagccaatgtgatatgagatttattcagaagtacttactccagagacacgagaaaatccatactggcgagaagcccttcaggtgcgatgagtgtggaatgcgatttatacagaaataccatatggaaagacataagcggacacactctggggagaagccgtatcagtgcgagtattgcttgcagtactttagtaggaccgaccgggtcttgaagcataaaaggatgtgtcacgagaatcatgataaaaagctgaaccgctgtgccatcaagggcggtctgctgacatccgaggaggactctgggttttcgacgtcacctaaagacaactctcttcccaagaaaaagaggcaaaaaactgagaagaagagcagcggaatggacaaggagtccgcattggataagagtgacctgaagaaggacaagaacgactatctgcccctatactcatcatctacgaaagtgaaagacgaatatatggtggccgaatatgctgtggagatgccccatagttctgtgggtggtagccaccttgaggacgcctccggcgagattcatcccccaaaactggtccttaaaaagataaatagcaaaaggtctttgaaacagccccttgaacagaatcaaactatctctcccctgtctacatatgaagaaagcaaagtgtctaagtatgcctttgagctggttgacaaacaagcactacttgatagcgagggcaacgcggacatagatcaggtggataacctgcaggagggcccaagcaagcctgtccactcatctactaattatgacgatgccatgcagtttctgaaaaagaaacgatatttacaagcggcatctaacaattccagggaatatgccctgaacgttggcaccatagcctctcaaccaagcgtgactcaggccgctgtggcctctgtcatagatgaatctaccactgcgtctattctggaatctcaagcactgaatgtcgaaatcaaatccaatcatgacaagaatgtgataccagatgaagtattgcaaaccctgctcgatcattactcacacaaggcaaacgggcagcatgaaatctctttctctgtcgcggatacggaagtgacatccagcatctccataaattccagcgaagttcccgaagttactccctcagaaaatgtgggatcttcttcccaagccagctcatccgacaaagcgaacatgctgcaggaatattccaaatttctgcagcaagcactcgataggaccagtcagaatgacgcctatctgaactctcccagcctgaactttgtgacagacaaccagactctccccaatcagcctgcctttagcagtattgataaacaagtgtatgcaactatgccaattaacagcttcagaagcggtatgaattccccactacgcacgacacccgataagagtcacttcggactgattgtgggtgattctcaacactctttccccttctcaggggatgagaccaatcacgccagcgccacctccacccaagattttcttgaccaggttaccagccaaaaaaaagcggaggcccaacccgtccatcaggcctatcaaatgtctagcttcgagcagccatttagagccccatatcatggttccagggccggtatagccacccagtttagtaccgccaatggtcaagttaacctccgcggaccaggcacttccgccgaattcagcgaattccccctggtcaacgtaaacgataacagggcgggaatgacatcaagccccgacgcaactacaggccagacgtttggttag

SEQ ID NO: 247330 - DNA, 2385 bp, synthetic construct
  misc_feature 1..2385: note = Description of Artificial Sequence: Synthetic coding sequence
  source 1..2385: mol_type = other DNA
atgaatatcgacgataagttggaagggctgtttctgaagtgcgggggtatagatgaaatgcaaagcagtcggacgatggtggtcatggggggtgtctctgggcagtctaccgtaagtggcgagctgcaagactctgtcctccaagacagatcaatgcctcaccaagaaatcctggctgctgacgaagtccttcaggaatccgagatgcgacaacaggacatgatcagccatgacgagctcatggtgcacgaggagacggtgaagaatgacgaggagcagatggagacccacgagagactcccccaaggactgcagtacgccttaaacgttcctatctcagtcaagcaggagatcacctttactgatgtatctgagcaactaatgagagataagaagcaaatcagagaaccagtggacttgcagaagaaaaaaaaacggaagcaaaggtcccctgccaagatccttacgattaacgaagacggaagcctaggcctcaagacccccaagagccacgtgtgtgagcactgcaacgccgctttccgcactaactaccacctacagcggcatgtgtttatacacacaggcgaaaagcctttccagtgttcacagtgtgatatgaggttcattcaaaagtatctgctgcagcggcatgagaagatacacaccggtgaaaagcctttcagatgtgatgaatgtgggatgcgatttatccagaaataccatatggagaggcataagaggacccactctggagagaagccttatcagtgtgaatactgtctccagtacttctcgagaacagatcgcgtgctcaagcataagagaatgtgtcacgagaatcacgataagaaattgaacagatgtgctattaaagggggtctgctgacttcagaggaagactccgggtttagtacaagtccgaaggataattcactcccaaagaaaaaacgccaaaagaccgaaaaaaagtccagtgggatggataaagaaagcgcacttgacaaatctgatctgaagaaggataaaaacgattacctaccactctatagctcctccactaaggtgaaagatgaatatatggtagctgaatacgccgtcgagatgccacacagctccgtcgggggatctcatttggaggatgccagcggagagattcaccctcctaagttggttctgaagaagattaacagcaaacggagtctcaaacaacccttagaacagaatcagacgatctctcccttgagtacctacgaggaatccaaagtttcaaagtacgccttcgagctcgtagacaagcaggccctgctggattccgaaggaaacgcagacattgatcaggtggacaatcttcaggagggcccttccaaacctgtgcattcctcaacaaattacgacgatgcgatgcagtttttaaagaagaagagatacctgcaggccgcttcgaataactctagagagtatgcccttaacgtgggaacaatcgcatctcagcctagtgtaacccaagctgcagtggcctcagtcatcgacgagtcaaccaccgcttctatcctcgagtcccaagccctgaacgtggagattaaatccaatcacgacaagaatgtgatcccagatgaagttctgcaaacactacttgaccattactctcacaaggctaacgggcaacacgaaatcagcttttctgtggctgacaccgaggtgacgtcctctatcagtataaactcgtccgaagtgcccgaggtaacacccagcgagaatgtaggatctagcagtcaggccagtagttcagataaggcaaacatgctgcaggagtattcaaaattcttgcagcaggcgttggatagaacatctcagaacgacgcctatctcaacagtccatcccttaactttgtgaccgataatcagaccttgccaaatcagcccgctttctctagcatcgataagcaggtgtacgccaccatgccaatcaactcctttcggtccggtatgaactcacctctcaggacaactcctgataaaagtcattttggcctcattgtcggtgactcgcagcactcatttccgtttagtggggacgagacaaaccacgcctctgccaccagtacccaggatttccttgaccaggtgacaagccagaagaaagcagaggctcaacccgttcatcaggcataccagatgagctccttcgagcagccgtttcgggctccctaccacgggagtcgggctggcattgctacccagtttagtacagcaaacggtcaggtcaacctgcgaggacctgggacatcagccgaattcagcgaatttccactggtaaacgtgaacgacaaccgcgctggaatgacttctagccctgatgctaccacaggccagacctttggctag

SEQ ID NO: 247331 - DNA, 228 bp, synthetic construct
  misc_feature 1..228: note = Description of Artificial Sequence: Synthetic coding sequence
  source 1..228: mol_type = other DNA
atgaatatcgatgataaactggagggattgtttctcaaatgtggagggattgatgagatgcagagcagtagaactatggtggtaatgggaggcgtttctggccagtctaccgtgtcaggagagctgcaggatagcgtgctgcaagatcgcagcatgccacatcaggaaattcttgccgcagacgaggtactgcaagagtcagaaatgcggcagcaggatatgatctag

SEQ ID NO: 247332 - DNA, 1365 bp, synthetic construct
  misc_feature 1..1365: note = Description of Artificial Sequence: Synthetic coding sequence
  source 1..1365: mol_type = other DNA
atgaacattgacgacaagttggagggcctgtttctgaagtgtgggggtatagacgagatgcagtccagcaggactatggtggtcatggggggtgtgagcggtcaaagtaccgtgtctggagagttgcaggattcagttctccaggaccggagtatgcctcatcaagaaatcctcgctgcagacgaggtcctacaagagtccgagatgaggcagcaggacatgatttctcacgacgaactgatggtgcacgaagagaccgtgaaaaacgacgaagagcagatggaaacccatgaacggctgcctcaaggattgcaatacgctctgaatgtgcctatatccgtgaagcaggaaatcacgttcacagacgtgtccgagcagttaatgcgggacaaaaagcagataagggaaccggtggatcttcagaaaaagaaaaagcgaaagcagaggtccccagcaaaaattctaactattaacgaagacggtagccttggcctgaagacacctaagtcccacgtgtgtgagcattgcaacgctgcatttaggaccaactaccacctgcaacggcatgtgttcattcacaccggtgagaagccattccagtgctcacagtgtgacatgcgctttattcagaaatacctcctacagagacatgagaaaatccacactggagagaagcctttccgatgcgacgagtgtggcatgcggtttatccaaaagtatcacatggaacggcataagaggactcactcaggcgagaagccttaccaatgcgaatattgcctgcagtacttctctagaaccgatcgcgtgctaaagcacaagcgcatgtgtcacgagaaccatgacaaaaagctgaacagatgtgcaatcaaaggtgggttgctcacgtccgaggaggattctggcttctctacttcacctaaggacaattctctgcccaagaaaaaacggcagaagactgagaaaaaaagtagtgggatggacaaggaaagtgcgcttgacaaatccgacctgaagaaggataagaacgattatctgcccctttacagcagctcgactaaggtcaaagatgaatatatggtggccgagtacgcagtggaaatgccacactccagtgtgggtggatcacatttggaagatgctagcggtgagattcacccgcctaagctggtgctcaagaagatcaacagcaagcggtcattaaagcagccactggagcagaaccaaacaatctctccattgagcacatacgaggaaagcaagttccagtctatgctgctcaacctgtggatcaacaggttatactggacccagaaggccatgctcactttgatccgactcatcatctgcaggcgtgcccagtag

SEQ ID NO: 247333 - DNA, 396 bp, synthetic construct
  misc_feature 1..396: note = Description of Artificial Sequence: Synthetic coding sequence
  source 1..396: mol_type = other DNA
atgcgcttcatccagaagtacctgttgcaaagacacgagaaaatccacaccggagagaagccatttcgttgcgacgagtgtggagacgaaactaaccatgcctccgccactagcacacaggattttctagaccaggtgacaagtcaaaaaaaagccgaggcgcagccagtgcatcaagcctatcagatgtcttcgttcgagcagccgttcagagcaccatatcatggatctcgggcagggatcgctacccagttttcgacagctaacggacaggtcaatctgcgcggacccggaaccagcgcagagttttccgaattcccactggttaacgtcaacgacaaccgtgctggaatgacaagttcacctgatgcaaccaccggccagacatttggatag

SEQ ID NO: 247334 - DNA, 432 bp, synthetic construct
  misc_feature 1..432: note = Description of Artificial Sequence: Synthetic coding sequence
  source 1..432: mol_type = other DNA
aagacacactataattgtggagaacacacaaaagcattctctgggaagcatacactagtgcaacagcagaggaccttgaccaccgagagatgctatatatgcagcgagtgtggcaagtccttttcgaacaagtccaatctgattaaacatcggcgtgtgcacacaggagaacggccttatgagtgttcggagtgcggcaaaagcttttcgcaacgctcagcgctgctgcagcataggggcgttcacaccggggagcggccttacgagtgctcagagtgtgggaagttttttacatatcacagcagcctcattaaacaccaaaaagttcactctgggagtaggccttatgagtgtagtgagtgcggcaagtcatttagtcagaactcctcgttgatcgaacatcatagggtgcatacaggggaacgcccttag

SEQ ID NO: 247335 - DNA, 1314 bp, synthetic construct
  misc_feature 1..1314: note = Description of Artificial Sequence: Synthetic coding sequence
  source 1..1314: mol_type = other DNA
atggccgctgctaccctcagaactcccacccaggggaccgtgacttttgaagacgtcgccgtgcatttctcttgggaagaatggggcctgttggatgaggcgcagcgctgcctctaccgtgacgtgatgctggagaatctagccctactaacaagcctggacgtgcaccaccagaaacagcacctgggagaaaaacactttaggagcaatgtgggcagagccctgttcgttaagacttgcactttccatgtgtcaggcgaaccctctacctgtcgcgaggtggggaaagattttcttgctaaactgggctttttacatcagcaggccgctcacacgggagaacagagcaatagtaaaagcgatggcggtgcgatcagtcatagaggcaaaactcactataattgcggtgagcataccaaggcatttagcggcaagcacactttagtacagcaacagagaaccctgactacagaacgctgctacatctgctcagagtgcggcaagagctttagtaaatcttatagtctgaacgatcactggcgactgcacactggcgaaaagccatacgagtgcagggaatgtggcaaatctttcagacagtcttcttctcttatccagcaccgcagagtgcacacagccgtgaggccacacgaatgcgatgagtgtgggaagctgttcagcaataaatccaatctcattaagcaccgcagagtgcacacaggagagaggccctatgagtgctcggagtgtggaaagtcctttagccagaggagcgcccttttacagcatcgcggtgttcataccggggagcggccatatgagtgctcagaatgcggcaagttcttcacctaccactccagtctgattaagcaccagaaggtgcatagcggcagcagaccatacgaatgctctgaatgtggcaagagttttagtcaaaattccagccttatcgagcaccacagagtgcacaccggggaacgtccctacaaatgctccgagtgtggaaaatctttctcgcagcgtagcgcactactacagcaccgtggcgttcataccggggagagaccttacgaatgttccgaatgtggaaaattctttccgtattcttcctcccttaggaagcatcagagggtccacaccgggtcgcgaccctacgaatgcagcgaatgcgggaaaagcttcactcagaactccgggctgatcaaacacagacgcgtgcacactggagagaagccctacgaatgtacagagtgcggaaaatctttctcacataactcatctcttataaaacaccagaggatacactcccgatag

SEQ ID NO: 247336 - DNA, 1314 bp, synthetic construct
  misc_feature 1..1314: note = Description of Artificial Sequence: Synthetic coding sequence
  source 1..1314: mol_type = other DNA
atggctgcagctacactgcgcacccctacccaaggcacagtaaccttcgaggatgttgccgtccacttcagttgggaagagtggggactactagacgaggcacagcgctgcctctatcgggatgttatgctggaaaatcttgccctcctgactagcctcgacgtgcaccatcagaaacagcacctgggagaaaagcattttcgttctaacgtcgggagagcactgttcgttaaaacatgcacattccacgtctcaggagaaccaagcacatgccgagaggtggggaaggactttttggctaaactgggattcctgcaccagcaagcagcacacacaggcgagcaaagcaactcaaaatccgatggcggagccattagccacagaggtaagacacattataactgcggggaacacaccaaggctttctccgggaaacacacgttagtgcagcaacagagaaccttaacaactgagaggtgttacatttgttccgaatgcggaaagagtttctctaagtcatactccctcaacgatcactggagactccatacgggcgagaaaccttatgagtgcagagaatgtgggaaatcatttcgacagtctagctccttaatccaacaccgtagagtgcacactgcggtccgccctcatgagtgcgacgagtgcggaaaactgttttcgaacaagagcaatttgattaagcaccgcagagtgcatacaggagaacgcccttatgagtgttcagagtgtggaaagtctttttcacagcgtagtgctctgctgcagcacagaggagtgcacacaggtgagcgaccctacgaatgtagcgaatgcggtaagttttttacttatcacagctctctaatcaaacatcagaaggtgcatagcgggtcccgaccctatgagtgttctgagtgcggaaagagtttctcccagaacagtagcttgatcgaacaccaccgtgttcatacgggagagagaccctataagtgtagcgagtgcgggaagtcctttagccaaagatctgcgctcctgcagcacaggggggttcatactggcgaacggccatacgaatgcagcgaatgtggaaaattctttccatatagctctagtctgaggaagcatcagcgtgtgcacaccgggtctagaccttatgagtgctccgagtgcggaaagtcatttactcaaaactctggactgattaaacataggagggttcatactggagagaaaccctatgagtgtacagaatgtggaaaatcatttagtcataattctagcctgatcaagcaccagcggatccatagtaggtag

SEQ ID NO: 247337 - DNA, 1617 bp, synthetic construct
  misc_feature 1..1617: note = Description of Artificial Sequence: Synthetic coding sequence
  source 1..1617: mol_type = other DNA
atgacaacttttaaggaggcggtgacattcaaggacgttgccgtggtgttcaccgaagaggagctgggacttcttgatccagcacagagaaagctgtacagggatgtgatgctcgagaacttccggaacctgttgtccgtggggcatcagccctttcaccaggacacttgccactttctgcgagaagagaagttttggatgatggggacggcaacccagagggagggaaactcgggaggaaagatccagacagagttggagtccgtaccagaggccggtgcacacgaagaatggtcgtgccagcagatctgggaacagatagcaaaagatttgactagatcccaggacagcattattaacaactctcagttttttgagaacggtgacgttccgagtcaggtcgaggctggcctccccaccatccataccggacagaagccttcacaggggggaaagtgtaagcaatcaatctccgacgttccaatatttgatcttccccaacagctgtactcggaggaaaaaagttacacttgcgacgaatgtgggaagtccatctgctacatcagcgctttgcatgtgcaccagcgcgtgcatgtgggggagaaactctttatgtgcgatgtgtgtggtaaagagttctcccaatctagccatcttcagacccaccagagagtacacacgggtgaaaagccgtttaaatgtgaacagtgtgggaaagggttcagcaggcgctctgcactgaacgtacaccgcaaactccacacaggtgaaaagccctatatctgtgaggcctgtggaaaggcatttatccacgacagtcagctgaaagaacacaaaagaatccacacaggagagaagccatttaagtgtgatatttgcggaaagactttttactttcgcagtagactgaagtctcattcaatggttcatacgggggagaaacccttccgctgcgatacgtgtgataaaagtttccatcagcggtctgcactcaatagacattgcatggtgcatacaggtgagaaaccataccgttgtgagcagtgcggcaaaggtttcatcggcagactcgatttctataaacatcaggttgtgcacacaggagagaagccatataattgtaaagaatgcgggaaaagtttccggtggtcatcatgcctcttgaatcaccagcgcgtgcattccggagagaagtcctttaagtgcgaggagtgcggcaaagggttttatacaaatagccaattgagctcccaccaacgctctcatagtggcgagaagccctataaatgcgaggagtgtgggaagggttacgtgactaagtttaacttggatctgcaccagcgggtgcacacaggcgagaggccctataattgcaaggagtgcggtaaaaatttctctcgtgcctccagtatccttaatcataagcgcctccactgccagaagaagccttttaagtgtgaagactgcggcaagcgccttgttcatagaacctataggaaggatcagcccagagattacagcggcgagaatccttctaaatgcgaggattgtggaagaaggtacaagaggaggcttaacctggacatcctgttgtcccttttcttaaacgatacctag

SEQ ID NO: 247338 - DNA, 1650 bp, synthetic construct
  misc_feature 1..1650: note = Description of Artificial Sequence: Synthetic coding sequence
  source 1..1650: mol_type = other DNA
atgattaagcgttcaaaggtcctcgttttttgctcaaagatcatggaagaggctgtgacatttaaggatgttgccgtagtgttcacagaagaggaactggggctcctggaccctgcccaacgcaagctataccgcgacgtcatgctggaaaatttccggaatctgctttctgtgggtcatcagccgtttcaccaggacacatgtcatttcctgagggaggaaaagttttggatgatgggtaccgctacacaacgggagggcaacagtggtgggaagattcagactgaactagaatccgtgcctgaggcaggggctcatgaagagtggtcatgccaacaaatttgggaacagattgcaaaggatctgacgagatctcaagacagtatcatcaacaactcacagttttttgaaaacggtgatgtgccatcacaagtcgaagccggattacccacaatccatacgggccaaaagccatctcagggagggaagtgtaagcagagcatttctgatgtcccaatttttgatttgcctcagcagctgtactccgaggaaaaaagctacacctgcgatgaatgtggcaagagcatttgttacatcagcgccttgcacgtgcaccagcgagtgcacgtaggggagaagctgtttatgtgcgacgtctgtggcaaggagttcagtcagtcctctcacctccagactcatcagagagtccatacaggtgagaaacctttcaagtgcgagcagtgtggcaagggattctcgaggaggagtgcattaaacgtgcaccgaaagttgcatactggtgaaaagccctatatttgtgaagcatgtggaaaagccttcatccacgatagccagttaaaagagcataaacgcatccatacaggagagaagccattcaaatgcgatatctgcggtaaaacattttactttaggagcaggcttaagtctcactccatggttcataccggagagaagccatttcgctgtgacacttgtgacaaatcatttcatcagagatccgccctgaacagacattgcatggttcacaccggagagaaaccttataggtgcgagcagtgcggcaagggtttcatcggaaggctggacttctataaacaccaggtcgtgcatactggggaaaagccgtacaactgtaaggaatgcggcaagtcgtttagatggagtagttgcctgctaaaccatcagcgagttcactccggagaaaagtcattcaagtgtgaggagtgtgggaaagggttctacacaaattctcagctgtcgtcccaccagagaagtcactcaggcgagaagccctacaaatgtgaggaatgcggtaaggggtacgtgactaagtttaatctggacctgcaccagagagtgcacaccggtgagagaccgtacaactgcaaagagtgtgggaagaattttagccgagcctccagcattctgaatcacaagcgcttgcactgccagaagaaacccttcaaatgcgaagattgtggcaagagattagttcacaggacctataggaaggaccagccccgagactacagcggcgagaatcctagcaaatgtgaagattgcggcagaagatacaaaaggagactgaatctagatattcttctgagccttttcctgaacgacacatag

SEQ ID NO: 247339 - DNA, 693 bp, synthetic construct
  misc_feature 1..693: note = Description of Artificial Sequence: Synthetic coding sequence
  source 1..693: mol_type = other DNA
atggtgatgagtcctccgagactgaagcaagactatccacagttcattcaggatcgcaacctgccacgggttggcagcgttaactctccatctgtgatgttcccatcacttatttttctgtctagctacactcagaaacgtagtctgattcatgtcatgtctgtggagaaagcctccgtcacttctcaacttttcatgttcattagggaatctacatgggagcggaacagtctatgcgtgatgtgtgtggcaaggaacctagtcaaggcacacatctgcaagttaattcgggagtccaccctggagaggaatcactcaaacgtgtccaacgtcggtaaggtctcagtggtggatcagcacttgatgtttatagtcaattatacacaagaaagaaatctgacctttgtgagacacgtgggacgaccctcgtttatgatcccgtctcttagaaacatacgagagagtattctgggtcgcaatcactcgaacgttatctacgtcgtgcgtccatccatactgggacaggaccttagagcgataccttggttcacacaggaaaagaatcacctcggagtaattcacgtgataagagctttcatccgggaccagcacttgattgggattgcttggagtacacaggaaagaaaccgcacagacgtgtctagcgtggagaaggctctgctggtgggctag

SEQ ID NO: 247340 - DNA, 1521 bp, synthetic construct
  misc_feature 1..1521: note = Description of Artificial Sequence: Synthetic coding sequence
  source 1..1521: mol_type = other DNA
atgccagccaatggtacctcaccccagagattcccagccttgatacctggagaacccggaaggtctttcgaggggtctgtctctttcgaagacgtcgcggtggattttactcgccaggagtggcacagattggatcctgcccagcgtaccatgcacaaagacgtcatgttggagacatattctaacctggctagcgtggggctgtgcgtggccaagccggagatgattttcaagctagagcggggagaggagctatggatcctcgaggaagagagctcaggacacggttacagtggaagtctttctttgctgtgtggtaacgggtctgtgggtgacaacgcgctgcgccacgacaacgacctactccaccaccaaaagattcagacattggatcagaatgtagaatataacggatgtcgcaaagcctttcacgagaagacaggatttgtgaggaggaagcgaaccccaaggggtgataagaactttgagtgccacgagtgcggcaaggcctattgccgtaagagcaatctggtcgaacaccttcggatccatacgggcgagaggccgtatgagtgtggcgaatgcgcgaagactttcagcgctaggtcctatctgatcgcccatcagaagacccacacaggcgagaggcctttcgaatgtaacgaatgtggtaagagttttggcaggaagtctcaactgattctccataccagaacccacaccggcgaaagaccgtacgagtgcacagagtgcgggaaaaccttctcggagaaagctacattgactatccatcagagaacccacacgggggaaaaaccttacgagtgcagtgaatgcgggaagactttcagggtgaagatcagcttaacacagcatcatcgtacccacacaggcgagaagccgtacgagtgcggtgaatgcggcaaaaatttcagagcaaaaaagtctctgaatcagcatcagcgcatacatactggggagaagccatatgagtgcggagagtgcgggaaattttttagaatgaagatgactctgaacaatcaccagcgaacccacacgggtgagaagccctaccagtgcaacgaatgtggaaaatcctttcgtgtgcacagttccttaggaatacaccagaggattcacaccggcgaaaaaccctatgaatgcaatgagtgtggtaatgccttttatgtcaaagcacgcctcatcgagcaccaacgcatgcactcaggggagaagccttatgaatgctccgagtgtggaaaaattttctctatgaaaaagagcctgtgtcaacaccgtcgtacacacactggcgagaagccctacgagtgctcagaatgcggtaacgccttctatgttaaggtacgcctgattgagcaccagcggatccacaccggcgagaggccctttgagtgtcaggagtgcggcaaagctttttgtcgtaaggcccacctgactgagcatcagcgcacacatatcggctggtcttggcgttgtaccatgaagaaagcttctcactag

SEQ ID NO: 247341 - DNA, 2049 bp, synthetic construct
  misc_feature 1..2049: note = Description of Artificial Sequence: Synthetic coding sequence
  source 1..2049: mol_type = other DNA
atgccatctctgcgcactcggagggaggaggcagaaatggagctcagcgtcccgggaccctcgccgtggacccctgcagctcaggcacgggtgagagatgccccagcagtgactcatcctggctccgcagcatgcggaacaccctgctgtagcgacaccgaattggaggcaatttgtccacactatcaacagccagattgtgacaccagaaccgaggacaaggaattcttgcacaaagaagacattcatgaggatctggaaagtcaggctgagatttcggagaactatgctggggacgtttcccaggtgcccgaactaggtgatctgtgcgacgatgtctctgagcgcgattggggcgttcccgagggccgacgcctaccccagtcactgtctcaagaaggtgactttacccctgctgccatgggactgctgaggggtcctctcggagagaaagatctggattgcaatggctttgactcccgcttttccctgagtcccaatcttatggcctgccaggagattccaaccgaagaaagaccccatccttatgatatgggtggccaatcctttcagcattctgtggacctgaccggtcacgaaggcgtgcccactgcagagagtccattgatttgtaacgagtgcggcaaaactttccaaggaaaccccgatcttatccagaggcaaatcgtgcacaccggggaggcaagctttatgtgcgacgactgcggaaagactttcagccagaatagcgtactcaaaaaccgccacagaagtcacatgagcgagaaggcctaccagtgcagcgagtgcggcaaagcctttaggggtcattccgatttctcgcggcatcagtctcatcattcaagtgaaaggccttacatgtgtaatgagtgtggtaaggctttcagccagaactcctctctcaagaagcaccagaaaagccatatgagcgagaagccctatgaatgcaacgagtgcgggaaggcctttcgtagatccagtaacttgatccagcatcagcgtatccattctggcgaaaaaccatacgtgtgttccgaatgcgggaaggccttcaggaggagtagtaacctaattaagcatcatagaacccacacaggagaaaagccatttgagtgcggagagtgtggcaaagctttttcacagtctgcccacctacgcaaacaccagagggtgcatacaggtgaaaaaccttacgagtgcaatgactgcggtaagccattctccagagtgagtaacttgatcaaacatcaccgggttcatacgggagagaaaccatataagtgcagcgattgcggaaaagccttcagccagagttcgtcccttatccagcatcgcagaatccacaccggggagaaacctcacgtttgcaacgtgtgtggcaaagctttctcttattcctccgtcttaagaaagcaccagatcatccatactggcgagaaaccttatcgctgctcggtttgcggcaaagccttttcacattcctcggctttgatccaacaccagggggtgcacacaggagacaagccctatgcctgtcatgaatgtggcaagactttcggcaggtccagcaacctgattctgcaccagcgcgtgcatactggtgaaaaaccttacgaatgcactgaatgcggcaaaacattctctcagtcgagcacacttatccagcaccagcgcattcataatggcctaaagccacatgaatgtaaccagtgtgggaaggcttttaatcggtcatccaacctgattcaccatcaaaaagtgcacaccggagaaaaaccttatacttgtgttgagtgtgggaaagggttcagccagtcctcacatctcatacaacaccagattatccacacaggtgagagaccgtacaagtgtagcgagtgtggtaaagccttctctcaaaggtccgtacttatccaacatcagcgaatccataccggcgtcaagccttatgactgcgctgcatgcggcaaggctttttcacaacgctccaagctgattaagcaccagttaatccatactcgggagtag

SEQ ID NO: 247342 - DNA, 2049 bp, synthetic construct
  misc_feature 1..2049: note = Description of Artificial Sequence: Synthetic coding sequence
  source 1..2049: mol_type = other DNA
atgccttccttaaggacccggagggaagaggctgaaatggagctctccgtgcccggaccttccccctggacaccggctgcccaggcacgggtgcgggacgctcccgctgtgacccaccctggttccgcagcctgcggtacaccgtgttgctccgatactgagttggaagccatctgccctcactatcagcagcccgactgtgatacaaggaccgaggacaaagagttcctgcacaaggaggacattcacgaggacttagagagccaggcagagatcagcgaaaactatgctggggatgtgagccaggttccagagctgggagatctctgtgacgatgtcagcgagagagactggggggttcccgagggccgtcgcctgcctcagtccttatcacaggaaggggatttcacacctgccgctatgggcctgttaagaggacccttaggcgagaaagacttggattgtaacggttttgactcaagattctccctgagtcctaacctaatggcctgccaggagataccaaccgaggagagacctcacccctatgacatgggcggtcagagtttccaacactccgtggacttgactggtcacgagggggtccctaccgccgagtcacctttaatttgtaatgaatgcggtaaaaccttccagggaaaccctgatctgatccagcgacaaattgtgcacacaggcgaggcaagcttcatgtgtgatgactgcggcaaaacatttagccagaatagcgtattgaaaaatagacatcgaagtcacatgagcgaaaaggcctaccagtgttccgaatgtggcaaagcgtttagggggcactctgatttttctcggcaccagtcccatcactcatcagaaaggccctacatgtgcaacgagtgtggaaaggccttcagtcaaaatagttctctgaagaagcaccaaaagtctcacatgtctgaaaaaccatacgaatgcaacgagtgtgggaaggccttccggcgttcgagcaatctgatccaacatcagcgtattcatagcggcgaaaagccatacgtgtgttccgaatgtggcaaggcttttaggcgatcttcgaatctgattaagcaccatcgcactcacaccggagaaaaaccgttcgagtgtggcgagtgtggcaaggcctttagccagtccgcccacctgcgcaagcaccaacgcgtgcatactggggagaagccatacgagtgtaatgattgtgggaagcccttttcccgagttagtaatctaattaaacaccatagagtacataccggcgaaaaaccctataaatgttccgactgtggtaaagcattttcccaatcaagttccctgatacagcacagacgaatacatacaggagaaaaaccacacgtgtgcaatgtgtgtggaaaagcattcagctactctagcgtcctgcggaaacatcagattatacataccggggagaagccctataggtgttccgtctgtggcaaggcgtttagccactcctctgcattgattcagcaccaaggcgtgcacacaggggataagccctacgcttgtcacgaatgtggcaagaccttcgggaggtcaagcaacctcattcttcaccaaagagtgcacacaggggaaaaaccttacgagtgtaccgagtgtggtaagacgttctcacaatcaagcaccctgattcagcatcagcgaatacataatggcctgaagcctcatgagtgtaaccagtgcggaaaggcgtttaatcggtcatcaaacctgatacaccatcaaaaagtgcatacgggggagaagccttatacttgcgttgagtgcgggaagggattcagtcaatcaagccaccttatccagcaccagatcatccatacaggagaacgtccctacaagtgctccgagtgtggtaaggctttcagccagagatcagtgctcattcaacaccagcggatacacacgggggtgaaaccctacgactgcgccgcttgtggcaaggcattcagccagcggtccaaattaattaagcatcagctgattcatactagggagtag

SEQ ID NO: 247343 - DNA, 444 bp, synthetic construct
  misc_feature 1..444: note = Description of Artificial Sequence: Synthetic coding sequence
  source 1..444: mol_type = other DNA
atggccctcactcaagtgaggctcacgtttcgggacgtcgctatcgaatttagccaggaagagtggaagtgccttgatcccgcacagaggatcctgtaccgggatgtgatgctcgaaaattactggaacctggtgagcctcggtctgtgccatttcgatatgaatatcataagtatgctcgaagaagggaaagaaccgtggactgtgaaatcttgcgtgaagatagcgaggaaaccgagaacccctgaatgcgttaagggcgtcgttactgaccttctccggaggtggaagcattggctcctcttgctcggtatttgttgccccaaaccacatggacgggtgtcttctaggctgagactatctaggagccttggccacttttttcattcagcttttgccacattcatgggggtctgtgataaacgcgtcgggtcgatcttctag

SEQ ID NO: 247344 - DNA, 2457 bp, synthetic construct
  misc_feature 1..2457: note = Description of Artificial Sequence: Synthetic coding sequence
  source 1..2457: mol_type = other DNA
atggcactgacccaggtgcgtcttacttttcgtgatgtcgctatcgagtttagtcaggaggaatggaaatgcctggatcctgcacaaagaatactgtacagagacgtcatgctggaaaattactggaatctcgtgtcattagggttgtgccactttgacatgaatatcatctcgatgttagaagaaggaaaagaaccttggaccgtgaaatcctgcgttaaaatcgcacggaagccaagaactcccgagtgcgttaaaggtgtcgtgactgacatcccgccaaaatgtactattaaagacctcctgccgaaggagaagagtagcactgaggctgtcttccataccgtggtgttggagagacatgagtcacctgatatagaagatttttcctttaaagaacctcagaaaaatgtacacgattttgagtgccagtggcgggatgacaccggcaactataaaggcgtgttgatggcgcagaaggagggaaaaagggatcagcgagaccgtagagatatcgaaaataaactaatgaacaaccagctcggggtctcttttcatagtcacctgcctgagcttcaactgtttcagggtgagggaaaaatgtacgagtgcaaccaggtggaaaagtccacgaataatgggagctcagtgtccccattgcagcagatccctagtagtgttcagacccaccgatccaaaaaatatcacgaactcaaccactttagtctgctgacacaaaggaggaaggccaattcgtgcgggaaaccatataagtgcaatgaatgcggcaaggcttttactcaaaactccaatcttactagtcatcgtcgaatccactccggagagaaaccctacaaatgctctgaatgtgggaagacttttacagtgcgatcaaatcttaccatacatcaggtcatccacaccggtgaaaagccgtataaatgccacgagtgtggcaaggtgttcaggcataattcttaccttgccactcataggaggattcacactggcgagaaaccttacaaatgcaacgaatgcgggaaagccttccgaggccactctaatctgaccactcaccagcttattcacaccggtgagaagccatttaagtgcaacgagtgcggcaagctgtttactcagaacagccatttgatatcgcattggcgcatccacactggcgagaagccctataagtgtaatgagtgtggcaaggcattctcagtgcgttcctctctggcaatacaccagaccatacacacaggcgaaaagccctataagtgcaacgaatgcgggaaggtgtttagatataattcgtacctcgggaggcacagacgagtacacactggtgaaaaaccctataagtgtaacgaatgcggaaaggccttcagcatgcattccaatttagccactcaccaagtcatccacaccggcaccaagccatttaagtgcaacgaatgctcaaaagtattcactcagaactcgcagttagccaaccaccggagaattcacactggggaaaaaccatacaagtgtaatgagtgtggcaaagccttttctgtcaggagcagcctaaccacacaccaggcaattcacagcggcgaaaagccatacaaatgtattgagtgtggtaaaagtttcactcagaagagccacctgagatcccaccggggtattcacagcggcgagaagccctacaaatgcaatgaatgcggaaaagtgttcgcacagacgtcacagctggctagacactggcgggttcacacgggagagaaaccatataagtgcaatgactgcgggcgagccttctctgacagatcatcccttacgttccatcaagccatccacacaggagagaaaccctacaagtgccacgagtgtgggaaagtctttaggcacaacagctaccttgctactcaccgcagaatccataccggagaaaagccttacaagtgtaacgaatgcggcaaggccttttccatgcactccaatctgactacccataaggtgatccacacgggtgagaagccctataagtgtaaccagtgcgggaaagtcttcacccaaaactcacatctggccaaccaccagcggacacatactggagagaagccatatcggtgtaacgaatgcggaaaggcgttctcagtgcgttcttcccttacaactcaccaggccattcacactgggaagaaaccgtacaaatgtaatgagtgtggaaaggtatttacccagaatgcccatctggctaatcacagaagaatccatactggggagaaaccataccgatgtaccgaatgcggtaaggcttttcgtgtgcgaagcagcctgaccactcatatggcgatccacaccggcgagaagcgttacaagtgtaatgaatgtggtaaggtgttccgccagtcatctaacttggcttcgcatcaccggatgcacaccggggagaagccctacaaatag

SEQ ID NO: 247345 - DNA, 2457 bp, synthetic construct
  misc_feature 1..2457: note = Description of Artificial Sequence: Synthetic coding sequence
  source 1..2457: mol_type = other DNA
atggcgttgacgcaagtgcggctgactttcagagacgtggccatagaattctctcaggaagaatggaaatgtttggaccccgctcagaggattctctacagagatgtgatgctggagaactattggaatttagtttctctgggcttatgccactttgatatgaacattatcagcatgctggaggaggggaaggagccgtggaccgttaagtcttgcgtgaagatcgctaggaagccaagaactcctgagtgtgtgaagggcgtcgtaacagatattcctccaaaatgcacgattaaggatctgctgcctaaggagaagagtagtaccgaagcagtctttcacaccgttgtgttggagcgacatgagtcccctgacatcgaagatttttcctttaaggagccacaaaagaatgtgcatgatttcgagtgccagtggcgggacgacaccggaaattataaaggagttctaatggctcagaaggaggggaaaagggatcagagggatcgaagagacatcgagaataagcttatgaacaatcagctcggggtttctttccatagtcatcttcccgagttgcagctatttcagggcgagggcaagatgtacgaatgtaatcaggtggagaagagcacaaataatggatctagcgtgtcaccactgcagcagataccatcttcagttcagacccacagatccaagaagtaccacgagctgaaccatttctcactgctgacccaacggcgtaaggctaattcctgtgggaagccctacaagtgtaacgaatgcggtaaggccttcacacagaactcgaacctgacatcacacagacggattcactccggagagaaaccctacaagtgctccgagtgtggaaaaacatttactgtgaggtccaatctcaccatccaccaggttattcatactggggaaaagccctacaagtgtcacgaatgtggcaaggtgttcaggcacaacagttacctggccacacatcggagaatccacactggcgaaaagccgtataagtgcaatgagtgcggtaaagcttttagggggcacagcaatctcactactcatcagctcattcacaccggagaaaagcctttcaaatgcaacgaatgcggcaagctgttcacccagaactctcatctcattagccattggcgaattcacaccggagagaaaccatataaatgcaatgaatgtgggaaagcgttttccgtccgcagcagcttagctatccaccaaacaatccataccggcgagaagccctataaatgcaacgagtgtgggaaggtgtttcggtataacagctatttaggcaggcatcgccgtgttcacaccggagagaagccatataagtgcaatgagtgcgggaaggccttctcgatgcactcgaacctggcaacgcatcaagtgattcacacaggtaccaaaccatttaaatgtaatgaatgttctaaggtgtttacccaaaactcacaattggctaaccaccgaaggatccacaccggcgaaaagccgtacaagtgcaacgagtgtggcaaagccttttcagttcgctcatctctcacaactcatcaggccatacatagcggagaaaagccgtacaaatgcatagagtgtggcaaatctttcacacaaaagtcccatctgaggagccatcggggtatccatagcggcgagaagccttacaaatgcaatgaatgcgggaaagtgttcgcccaaacgtcacagctagctcgccattggcgcgttcatactggcgaaaaaccatacaaatgtaatgattgcggacgtgcatttagtgacaggtctagtctgacttttcaccaagccatccataccggagagaagccttataagtgtcacgaatgtggcaaagtgtttagacataactcgtacctggctacccaccggaggattcacaccggcgagaaaccctacaagtgtaacgagtgtggaaaggctttttccatgcactccaatctaacaactcacaaggtgatccacactggcgagaaaccttacaaatgtaatcaatgcggaaaggtatttacacagaactcccacctcgcaaatcatcagcgaacccacacaggggaaaaaccctaccgctgtaatgaatgtggaaaggctttttcagtgagatcgagccttacaacccaccaggctatccataccgggaagaaaccctataaatgtaatgagtgtgggaaggtgtttactcaaaacgcccacctggccaatcatagaaggatccacactggcgaaaaaccctacaggtgcactgagtgcgggaaggcctttagagtccggagtagccttaccacccacatggctatccacaccggcgaaaagaggtacaaatgtaacgagtgcggcaaggtctttcggcagtcatcgaatctggcgtcccatcacaggatgcacactggagaaaaaccatacaaatag

SEQ ID NO: 247346 - DNA, 2457 bp, synthetic construct
  misc_feature 1..2457: note = Description of Artificial Sequence: Synthetic coding sequence
  source 1..2457: mol_type = other DNA
atggcactcacccaggtacgcctgacgttccgggacgtggctatcgaattcagccaggaagagtggaagtgtctggatcccgcacagcgtatcctctaccgcgatgtgatgcttgagaactactggaacttggtttccctgggtttgtgtcacttcgacatgaatatcatcagtatgctggaagaaggcaaggagccatggactgtgaaatcatgcgtcaaaattgcccgaaaaccccgaactcctgagtgtgtgaagggtgtagtaaccgacatcccaccaaaatgtaccattaaggacctgcttccaaaagagaagagtagcaccgaggcagtcttccatactgtcgtcctcgagcggcatgaaagccctgacatagaggattttagttttaaggagccccaaaagaacgtgcacgatttcgaatgtcaatggcgcgatgacaccggaaattacaaaggcgtcttaatggctcaaaaggaaggaaaaagggaccaacgggataggagagatatcgaaaataagctcatgaacaatcagctgggagtgagtttccactcacacctgccagaactgcaactcttccagggcgaagggaaaatgtatgagtgtaatcaggtggagaagagcaccaataatggtagttctgtgtcccccctgcagcaaatcccttccagcgtgcagacccaccggtccaaaaaatatcacgaactgaaccacttctctcttcttacacagcgcaggaaagctaattcctgcggaaaaccctataaatgtaacgaatgtgggaaggccttcacccagaatagtaatctgacctcacacaggaggatccacagtggggaaaagccgtacaagtgcagtgagtgcggcaaaaccttcaccgtgcgaagtaacctgactatacaccaggtaatccatactggggaaaaaccctacaagtgccatgaatgtggaaaagtgttcaggcacaacagctaccttgcaacacacaggcgtatacataccggagaaaagccgtacaagtgcaatgaatgcggtaaggcatttagaggtcactctaacttgacaacacatcagcttatccacaccggcgaaaagccttttaaatgcaacgaatgtggaaaattgttcacacaaaactcccatctgatcagccactggaggatacacactggagaaaaaccttacaagtgtaatgaatgcggaaaggccttttctgttcgtagttcgctcgcgattcaccagaccatccacaccggtgagaagccctacaagtgtaatgaatgcgggaaggtctttcgctacaacagctatctggggagacatagaagggtgcacacaggagaaaagccctataagtgtaacgaatgcggcaaggctttcagcatgcactccaacctagcaacgcatcaagtaatccacactggcaccaaaccctttaaatgcaacgagtgtagcaaggttttcacacagaactcgcagctggccaatcatcggaggatccacaccggcgagaagccgtataagtgtaacgagtgtggaaaagctttctctgttcgcagctcgcttacaacccaccaggccattcatagcggcgagaaaccttataaatgcatcgagtgtggtaagtcattcactcagaaaagccatctgcgatctcaccgcggaatccattccggagagaagccttacaagtgtaacgagtgtggtaaagtgtttgcccagacgtcccagctggccaggcactggcgggtccacacgggggagaaaccctataaatgcaacgattgcggtagagccttctctgatcgcagctccctgacatttcatcaggctatccataccggtgaaaagccatataagtgccacgagtgcgggaaggtgttcagacacaactcatacctggccacccatagaagaattcatacgggggagaagccttataagtgcaatgagtgtggaaaagctttctctatgcactctaatctaactacgcataaggttatccacactggcgaaaagccctacaaatgcaaccagtgcggcaaggtgtttacacagaatagccatctggctaaccatcagagaacccacacgggcgagaaaccttaccgatgcaatgagtgcgggaaggccttttcagtgaggtcttccctcacaactcatcaagccattcataccgggaagaaaccctacaagtgtaatgaatgcgggaaggtgtttacccagaatgctcacctggcgaatcaccgccgtatccacacaggggaaaagccataccgctgtacagaatgcgggaaggccttcagggttcggtcaagccttacaacccacatggctattcacactggagaaaaaagatataagtgcaacgagtgtggaaaggtgtttcgacagtcctctaacttagccagccatcataggatgcatacaggagaaaagccttacaaatag

SEQ ID NO: 247347 - DNA, 1350 bp, synthetic construct
  misc_feature 1..1350: note = Description of Artificial Sequence: Synthetic coding sequence
  source 1..1350: mol_type = other DNA
atggagttcttcatcagcatgtccgaaactatcaaatacaatgacgatgaccataaaacactcttcttgaaaactttgaacgaacaacgcctcgagggcgaattttgcgacatcgcgatagttgttgaggatgttaaattccgcgctcacaggtgtgtgttagcggcatgctccacctacttcaagaaactctttaagaagcttgaagtagactcctccagcgtgatagagatcgactttctccgcagcgatatatttgaagaggtcctaaactacatgtacactgcgaagatttcagtgaagaaagaagatgttaacctgatgatgtcgagcgggcagattttgggcatacgctttcttgataaactgtgttcccaaaaacgcgacgtgtcatctccagatgagaataacggtcaatccaaaagcaaatactgtctgaaaatcaaccgacctattggtgacgcggcagacactcaggacgacgacgtcgaggaaataggcgaccaggatgacagcccttcagatgacacagtggaggggacgcccccatctcaggaggacggaaagtccccaactactactctccgcgtgcaggaagccattctcaaggaactcgggtccgaagaggtgcgcaaggtcaattgctacggtcaggaggttgagagtatggaaaccccagagtctaaagacctagggtctcagacgccccaagcactgacattcaatgatgggatgagtgaagtgaaggacgagcaaacacccggatggaccactgctgcctcagacatgaagtttgaatacctgctatatggtcaccaccgcgagcaaattgcctgccaagcatgtgggaagacgttcagcgatgagggtcgccttcggaaacatgagaaactgcacacagcagaccgaccttttgtttgtgagatgtgcactaaggggtttactactcaagcccatttgaaagagcacttgaaaattcacacaggctacaagccgtattcttgtgaggtctgtggcaagagctttatcagggcccctgacttaaagaaacatgagagagttcactccaatgaacggccatttgcctgtcatatgtgcgataaagcatttaagcataagtcccatctgaaggaccacgagcgcagacaccgcggagagaaacctttcgtttgtgggtcctgcaccaaagcattcgctaaagcctctgatctcaaacggcatgagaacaatatgcattcggaacgcaaacaggtgactccaagcgccattcaatcagagaccgaacagctgcaggccgctgccatggccgctgaagctgagcagcaactcgagacaatagcatgttcatag

SEQ ID NO: 247348 - DNA, 1350 bp, synthetic construct
  misc_feature 1..1350: note = Description of Artificial Sequence: Synthetic coding sequence
  source 1..1350: mol_type = other DNA
atggagtttttcatctccatgagtgagacgattaaatacaatgacgacgaccacaaaaccttatttcttaaaacactgaacgagcaacggctggagggtgagttttgcgacatcgccatagtggtggaagatgtgaaattccgagcacataggtgtgtgctcgctgcctgcagcacatattttaagaagctcttcaagaaactcgaagtggacagttcaagtgtcattgaaatcgatttcttaaggagcgatattttcgaggaggtgctcaattacatgtatacggccaaaataagcgtgaagaaggaagacgtgaatctgatgatgtcttccggacaaattctcgggatccgttttctggataaattgtgcagtcagaaaagagatgtgagttctcctgacgagaataacggacagagtaagtctaaatactgtctcaaaatcaatcggccaatcggcgatgccgcagacacccaggacgatgacgtggaggagattggggaccaggatgattcacctagcgatgataccgtggaagggacacctcccagccaggaggatggcaagagccccacaaccacccttcgtgttcaggaggcaattctgaaggagctgggcagcgaagaggttcgcaaggtgaattgttatggccaagaagttgaatctatggaaacacctgaatctaaagatttaggctcacagacacctcaggccttaacatttaacgatggcatgagtgaggtcaaggacgagcagactccaggatggacaaccgcagccagtgacatgaagttcgaatacctcctgtacggccaccatcgagagcagatcgcctgtcaggcatgcggtaaaacctttagcgacgagggcagactaagaaaacatgagaaactgcacacagcagacaggccgtttgtgtgtgaaatgtgtaccaaggggtttacgacccaggctcatcttaaggagcacttaaaaatacacacaggctataaaccttactcatgtgaggtatgtggcaagtcctttattagggcacctgatctgaagaaacacgaaagagtgcactctaacgaaaggcccttcgcctgccacatgtgcgataaggccttcaagcataagtcccaccttaaagatcacgaacgcaggcaccgcggtgagaagcccttcgtctgcgggtcctgtaccaaggccttcgctaaggcctccgacctcaaacgccatgagaacaatatgcatagcgaaaggaaacaggtgacaccttctgcaattcagtcggagactgagcagctgcaggctgcagcaatggcagctgaggctgagcagcagctggaaacgatcgcctgtagctag

SEQ ID NO: 247349 - DNA, 1458 bp, synthetic construct
  misc_feature 1..1458: note = Description of Artificial Sequence: Synthetic coding sequence
  source 1..1458: mol_type = other DNA
atggctactgagccaaaaaaggctgcagcccagaatagtcctgaagacgaaggactgctgatcgtcaagatcgaagaggaggagttcatccacggccaggatacttgcttgcaaaggtccgagctgttgaagcaagagctctgtagacagcttttccgtcagttctgctaccaggactctcctggcccaagggaggctctcagcaggttgagagagctgtgttgtcagtggctcaaacccgagatccacactaaggaacagatactagagctcctggtgctcgaacagttcctcactattcttccgggagacctgcaagcttgggtgcacgaacattatccagaaagtggagaggaggctgtgaccatcctcgaggatctggaacggggaaccgacgaggccgtgctgcaggtgcaggcccacgaacatggccaagagatttttcaaaagaaggtgtctccccctggacccgcactgaatgtaaagcttcagccggtggagactaaggcacacttcgatagcagcgaaccacagctgctttgggattgtgataacgagagcgagaattctagatctatgcctaaactcgaaattttcgagaagatcgaatcacagcgaataatctcaggcaggatctccgggtacatcagtgaggcttcgggggagtcccaggacatttgcaagtccgctggcagagtgaaacgtcagtgggaaaaagagtccggggagtctcagcgtctgagtagtgcacaagatgagggttttgggaagattttaacgcacaagaacacagttaggggcgagattatctctcacgacggatgcgagcgccgtctgaatctgaattctaacgagttcacacatcagaaatcctgcaagcatggcacttgtgaccagtcattcaagtggaattccgatttcataaaccatcagattatttacgctggtgagaaaaatcatcagtacgggaagagcttcaaaagccccaagctcgcaaagcacgctgcggtgttttccggagataagacccaccagtgtaacgagtgcggcaaggccttcaggcacagtagcaaactagcacgtcaccaacggatccataccggggaaaggtgttacgagtgcaacgagtgcggcaagagtttcgcagaatcctcggatctgactcgccatcggaggatccacaccggtgaaaggccattcggttgtaaagaatgcggccgtgcgttcaatctcaacagtcatctgatccggcaccagcgtatccataccagggagaagccatacgagtgctctgaatgtggcaagacctttagagtgtcctctcacctgattaggcatttccggatccacactggagaaaaaccgtatgagtgtagcgaatgtggccgagcgttctctcagagcagcaacctgagccagcaccagagaattcacatgagggaaaatctgctgatgtag

SEQ ID NO: 247350 - DNA, 1239 bp, synthetic construct
  misc_feature 1..1239: note = Description of Artificial Sequence: Synthetic coding sequence
  source 1..1239: mol_type = other DNA
atgtcacttgggggttctgataccatgctgaaaggcgctgacactagtgaaagtggcgcagtcatcaggggaaattatcgactcggattaagtaagaagagctccctgttctcgcatcaaaagcaccacgtttgtcccgagtgcggcaggggattttgccagagatcggatttgatcaaacaccagagaacacacacaggcgagaagccctatctttgcccagagtgcgggaggcgattctctcagaaagcttccctgtcaatccaccagaggaagcacagcggggaaaagccttatgtgtgtcgtgaatgcggtcggcacttcagatatacaagctccctcaccaaccacaagcgcatccatagcggagaacgacctttcgtctgccaggagtgtgggagaggcttcaggcaaaaaatcgcgctccttctgcaccaaagaacccatttggaggagaaaccttttgtgtgtcctgagtgcggaaggggcttctgccaaaaggccagcctcctgcagcatcagagcagccacactggtgaacggcctttcctgtgtttggagtgcggcaggtcttttcgacagcagagcttgctcttgtctcaccaggtcacccattcaggagaaaagccgtatgtgtgcgccgaatgcgggcattcttttaggcagaaggtgacactcatccgccaccagcggacacatacgggagagaagccctacctgtgcccccagtgcggcagaggtttctctcagaaggtaactctaatcggacaccagagaacacatacaggcgaaaaaccatatctatgcccggattgcggcagaggttttggccaaaaagtcaccctgatcagacaccagcgcacgcatactggggagaaaccttatctctgtcctaaatgcggtcgcgcttttggattcaaatctttgctaacacggcaccaacgcacccacagcgaagaggaactctatgtggacagagtttgtggacaggggttggggcaaaaatcccacctgattagtgatcagaggacccacagcggagaaaagccatgtatttgcgacgaatgcggtcggggatttggttttaaatcggcactcatcaggcaccagcgaacacacagtggtgagaaaccatatgtctgcagagaatgcggacggggattctctcagaaatcccaccttcacagacatagaaggactaagtccggtcatcagctcttgccccaagaagtcttctag

SEQ ID NO: 247351 - DNA, 291 bp, synthetic construct
  misc_feature 1..291: note = Description of Artificial Sequence: Synthetic coding sequence
  source 1..291: mol_type = other DNA
atgtcgcctggattgcttactaccagaaaggaggcactcatggcattcagggacgttgccgtggcctttacacagaaagagtggaaactactgagctctgcccaaagaactctgtatagagaagtcatgctcgaaaactactcccacttggtgagccttggtatcgcattcagcaagccaaaactgattgaacagcttgaacaaggagacgagccctggagggaagaaaacgaacacctactggatctgtgccccggaaggcgcattacacggtctggagtcagagattag

SEQ ID NO: 247352 - DNA, 1812 bp, synthetic construct
  misc_feature 1..1812: note = Description of Artificial Sequence: Synthetic coding sequence
  source 1..1812: mol_type = other DNA
atgagcccgggactgttgacgacgcgcaaggaggccctgatggccttccgcgacgtggctgtcgcattcacccagaaagagtggaagctcctgtcttccgcacagagaaccctatatcgcgaggtcatgctagaaaattactcccacttagtgtctctgggtatcgcttttagtaagccaaaacttatcgaacagttagaacaaggcgatgaaccatggcgagaagaaaatgaacatcttctggatctctgccctgaacctcgtaccgagttccagccaagtttccctcatctggtggcattcagtagtagtcagttgctccggcaatatgccctgagcggccacccaacacagatctttcctagcagcagtgccggaggggacttccagttggaggctccgagatgcagttccgaaaagggtgagagtggcgagaccgagggccctgacagctcattgcgaaagaggccaagtagaatttccagaacatttttctcaccccaccagggcgatcctgtggaatgggttgagggaaatagagagggcggaacagatctgcgcctagcgcagcggatgtccctgggcggatctgacacaatgcttaagggcgctgacacttcagaaagcggagccgtcattcgcggaaactatcgactgggattgtcaaaaaaatcatccctgttttcccaccagaagcatcacgtgtgccccgagtgtggcagaggtttttgccagcgaagcgacttaattaaacaccagcgcacgcacactggtgaaaagccgtatctttgtcccgagtgcggaagacgtttctcccaaaaggccagcctatccattcatcagagaaaacacagtggtgaaaagccttacgtgtgtcgcgagtgtggccgtcacttccgatacacaagttctctgaccaaccacaagcgcatccattccggtgaacgcccattcgtgtgccaggagtgcgggagggggtttaggcagaaaattgccttgctcttgcatcagcgaacccacttagaggagaagccattcgtgtgtcctgagtgtggacgcggtttttgccaaaaggcgtctctgctccagcaccagagtagccatacgggagaacgtccgttcctttgcctggaatgtggcaggtcctttaggcagcagtctttactgctgagccatcaggtgacccactccggcgagaagccttatgtttgcgctgaatgcggccattcattcaggcagaaagtaaccctcatccgtcatcagcgaacacacactggggagaagccctacctctgcccccagtgcggaagaggtttctcccaaaaggtaactcttatcggacaccagcgcacacatacaggggagaagccatacttgtgtccggactgtggcagaggcttcgggcaaaaggtgaccttaatcaggcaccagagaacccatacaggagaaaagccctatctgtgtcccaagtgcggtagggcattcggcttcaagtccttgttgacccgccatcagcgcacacactcagaagaggagctgtatgttgacagggtttgcgggcaaggcttgggacagaagtcccatctcatcagtgaccagaggactcactctggcgaaaagccctgtatctgtgacgaatgtggacgtgggttcgggtttaagtcggctcttatccggcaccaacgcacccacagcggtgagaaaccatacgtttgtcgtgaatgtggtcgtgggttcagtcagaagtcccacctccaccgccacaggcggacaaagtcaggtcaccagttgctccctcaagaggtgttttag

SEQ ID NO: 247353 - DNA, 1224 bp, synthetic construct
  misc_feature 1..1224: note = Description of Artificial Sequence: Synthetic coding sequence
  source 1..1224: mol_type = other DNA
atggccgctaaaatggagatcaccctaagctcgaacactgaagcatctagtaagcaggagcggcacattatcgccaagttagaggagaagcggggacctcccctacagaaaaattgcccagacccagaactttgtcgacagagcttccggaggttctgctaccaggaggtttccggcccacaggaagccctctcacagctgcgccagttgtgtaggcagtggttacaaccagagttacacacgaaggaacagatcctggaactccttgttatggaacaatttctgaccattctcccgccagaaatacaggcgagggttaggcataggtgccccatgtcctccaaggagatcgtcaccctggtggaggattttcatcgtgcttccaagaagcctaagcagtgggttgccgtgtgtatgcagggacagaaggtattgctcgagaagaccggctcacagcttggggaacaggaactgccggatttccagcctcaaacccccaggcgcgacttgcgagagtcaagtccagcggaaccttctcaggctggggcatatgataggctgtctccacaccattgggagaaaagtcccctcctgcaggagcctacccccaaactggcaggcaccgaggctccccgaatgaggagcgacaataaagagaacccgcaacaggaaggagcaaagggtgccaaaccatgcgcagttagtgcgggaagaagcaaaggtaacgggctgcagaaccccgagcccaggggcgcaaacatgtcagaacctcggctgagtcgtcgacaggtgagctctcccaacgcacagaaaccattcgcccactaccaacggcattgccgtgtggaatacatcagtagccctttgaagagccatcccctcagggagctgaagaagtccaagggaggaaagcgttctctgtcaaatagactgcagcatctgggccatcaacctacccggtccgccaagaaaccatacaagtgcgatgattgtggtaagtccttcacttggaactctgagctcaagcggcacaagcgggtacacacaggcgagagaccatatacatgcggtgaatgcggtaattgttttggtcgtcagtcgacactcaagcttcaccaacgaattcataccggcgagaaaccataccaatgtggccagtgcgggaaaagcttccggcaaagtagcaatcttcatcaacatcaccggctgcaccacggggactag

SEQ ID NO: 247354 - DNA, 705 bp, synthetic construct
  misc_feature 1..705: note = Description of Artificial Sequence: Synthetic coding sequence
  source 1..705: mol_type = other DNA
atggccgctaaaatggaaattacactgagcagcaacacggaggcgtcctccaagcaggaaagacacattatagcaaagctcgaagaaaagcggggtccccctttacagaagaattgccccgatcctgagctctgccgccagtcattccgtcggttttgttaccaagaagtgtcaggccctcaagaagccctgagccaactgaggcagctatgtcggcagtggcttcaaccagaactgcacaccaaagaacagatcctagaactgctcgtcatggagcagtttctgacaatactgccccctgaaatccaggccagggtccgacatcgttgccccatgagctctaaagagattgtaactttggtggaggattttcaccgggctagtaaaaagcctaagcagtgggtggcagtgtgcatgcaggggcagaaagtcctgctcgaaaagaccggatcacagctcggcgaacaggaattgcctgacttccagcctcagacccctagacgggacctgcgtgagtcatccccagccgagccaagccaggccggtgcctatgaccgcctgagcccacatcactgggaaaaatctccgttactccaggaaccaacccctaaactcgcagggaccgaactgctgattgaaaagactgatccgaacatggccactgacgaactcccctgcaagctctggctctcgttcattgcctag

SEQ ID NO: 247355 - DNA, 2136 bp, synthetic construct
  misc_feature 1..2136: note = Description of Artificial Sequence: Synthetic coding sequence
  source 1..2136: mol_type = other DNA
atgccagcagacgttaacctgtctcagaaacctcaggtgctggggccagagaagcaggatgggagctgcgaggcgtctgtgagcttcgaggacgtgactgtcgactttagcagggaagagtggcaacagctggatccggcacagaggtgtttgtatcgggacgtcatgttggagctgtacagtcatctttttgccgtcggttaccacatcccaaaccctgaagtcatattccgcatgctgaaggagaaggaaccgagagttgaggaagctgaggtctcccatcagcggtgccaagaaagggaatttggcctcgaaatcccgcaaaaagaaattagtaagaaggcatccttccagaaagacatggtgggagagtttacacgcgacgggtcttggtgctctattctagaagaattacggctggatgcagacagaactaaaaaggacgaacagaatcaaattcaacctatgtcccactccgcgttctttaataagaaaactctaaacactgaatcgaattgtgagtacaaggacccgggtaaaatgattcggacccgaccacatcttgcctctagtcagaaacaacctcagaaatgctgtctgttcactgagtcactgaagctgaacctcgaggtgaatggccagaatgaatccaacgacactgaacaactggatgacgtggtaggcagcgggcagctgttcagccactcttcctcggacgcctgtagtaagaatattcacaccggggagacattttgcaagggcaatcaatgccggaaggtgtgcggccacaagcagtctttgaagcaacaccagattcatacccagaagaagcctgacggctgctctgagtgcgggggatcttttacccagaaatcccacttgttcgcccagcagaggattcacagcgtgggtaatctgcacgagtgcggaaaatgtggcaaagccttcatgcctcagctgaagctgagtgtgtaccttacagaccatacaggagacatcccttgtatatgcaaggaatgtggtaaagtgtttatccagagaagcgagctgctgactcatcaaaaaacacacacccggaaaaagccatataagtgccacgactgtggtaaggccttcttccagatgctatcgctgtttaggcaccagcgaactcacagcagggagaaactgtatgaatgtagcgagtgtgggaaaggtttcagccaaaactccacgctgatcatccatcagaaaatccataccggggaacgtcaatacgcatgcagcgagtgcggaaaggccttcacccagaagtcaacgctgtccctgcaccagcgcattcattccggccagaaatcctacgtgtgcattgaatgtggccaggcatttatccaaaaggcccacttaatcgtgcaccagcgctctcataccggagagaagccttaccagtgtcacaattgtgggaagtctttcatctctaaaagccagcttgacatccaccacagaattcatacaggagagaagccgtatgaatgtagcgattgcggaaagactttcacacaaaaaagtcacctgaatatccaccagaagattcacactggcgagcgacatcatgtgtgttctgagtgtggtaaggcttttaaccagaaaagtatcctaagcatgcaccagcggatccacacaggtgagaagccctataaatgctccgagtgtggaaaggcatttactagcaagtctcagtttaaagaacatcagagaatccacaccggagagaaaccctatgtatgcaccgaatgcggaaaagccttcaatggtcgctccaattttcataaacatcaaatcacacacactagggaacggccattcgtatgctacaagtgcggcaaggccttcgtgcagaagtcagagctgataacccaccagaggacacacatgggagagaagccatatgaatgtcttgactgtggcaaaagtttctccaaaaaacctcagctgaaggtgcatcagcgcatccacacaggtgagcgcccttacgtatgctctgagtgcggtaaggccttcaataaccgtagcaattttaacaagcatcagacgacgcatacccgggataagtcatacaagtgtagctattctgtgaaaggctttactaagcagtag

SEQ ID NO: 247356 - DNA, 966 bp, synthetic construct
  misc_feature 1..966: note = Description of Artificial Sequence: Synthetic coding sequence
  source 1..966: mol_type = other DNA
atggcagccggatggctgactacttggtcccaaaattctgtgacttttcaagaagtcgccgtggacttcagtcaggaggaatgggccttactggacccagcccagaagaatctttataaggatgttatgcttgaaaactttcgcaacctggcatccgttgggtaccagctctgcaggcattcgctcatcagcaaagttgatcaagaacagctgaagactgacgagcggggaatcctgcagggagactgtgcagactgggagacacagttgaagcctaaagacacaattgccatgcaaaatatccctggaggaaaaacttcgaacggcataaacactaactgtgtgcggactcatagcggtgagatgccatatgaatgctccgactgcggcaaagccttcatttttcagagttctctgaagaagcacatgcgaagccatactggcgagaaaccttatgagtgcgatcactgcgggaagtcattttcccaaagctcacacttgaatgtccacaagaggacacacaccggagagaagccctatgactgtaaggagtgtgggaaggcattcaccgtgccttcatctctgcaaaagcacgtaaggacccacacaggggagaaaccctacgagtgcagcgattgcggtaaagcattcatagatcaatctagccttaaaaagcacacgcggtcccataccggggaaaaaccgtatgagtgtaaccagtgtggaaagtctttctcaacaggaagctacttaattgtacacaagcggactcatactggagagaagacctatgaatgtaaagagtgcggtaaagcctttaggaattccagctgtctccgggtgcacgtgaggacgcacaccggagaaaagccttataagtgtatccaatgcgaaaaagcattctcaaccagtacaaatctcatcatgcacaagcgcatccacaacggccaaaaactgcacgagtag

SEQ ID NO: 247357 - DNA, 1446 bp, synthetic construct
  misc_feature 1..1446: note = Description of Artificial Sequence: Synthetic coding sequence
  source 1..1446: mol_type = other DNA
atggccgctggctggctgaccacttggtcccagaactctgtgaccttccaggaggtcgccgttgatttctcccaagaggagtgggccctgttggacccagcacagaaaaacctgtacaaagatgtgatgctggaaaacttcaggaatcttgcctcagtcggatatcagctatgtaggcattctctgatctctaaggttgaccaggaacagttgaaaactgacgagcgcggaatcctgcagggcgactgtgccgattgggaaacccagctgaagcctaaggatacgatcgccatgcagaatataccagggggaaagacttcaaacggtatcaacacggcggaaaatcaacccggagagcatagcctggaatgcaatcactgtggcaagttccgaaagaacacccgatttatttgcacgaggtattgcaagggcgaaaagtgttacaaatatatcaaatactctaaagtgtttaatcatccaagtacactgcggtctcacgtgtctatccatatcggagagaagaccttagagtttacggattgtcggaaagcctttaatcaagagagctcactccgtaaacatttacgcactcccactggccagaagtttcaggagtacgagcaatgtgacatgagctttagccttcactctagctgcagtgttcgggaacaaataccaaccggcgaaaaaggcgatgagtgttcagattacggaaaaatctccccgctgagcgtccacactaaaactgggtccgttgaggaggggctcgaatgcaacgaacacgaaaagacttttacagatccgctttccctccagaactgtgttaggactcattcaggcgagatgccatatgaatgcagtgactgcggtaaagcttttatcttccaaagctcactgaagaaacacatgagatcgcatactggggaaaaaccatacgagtgcgaccactgcggaaaatccttttctcagtcatcccacctgaacgttcacaagaggacccacaccggggaaaagccctacgattgcaaagaatgcggcaaggccttcacggtgcctagtagcctgcagaaacacgtgcgtacccacactggagaaaaaccatatgagtgcagtgattgcggaaaagccttcatcgatcagtcctctttgaagaagcacaccaggtctcataccggggagaaaccttatgagtgcaaccagtgtggaaaatccttctccactggaagctatctcattgtgcacaagaggacccataccggtgaaaagacttacgaatgtaaggagtgtgggaaggcctttcgcaactcctcatgtctcagggtgcacgttcggacacacaccggtgagaagccctataagtgcatccagtgtgagaaggctttttctaccagcactaaccttattatgcataaaaggattcacaatggtcagaagttgcacgagtag

SEQ ID NO: 247358 - DNA, 363 bp, synthetic construct
  misc_feature 1..363: note = Description of Artificial Sequence: Synthetic coding sequence
  source 1..363: mol_type = other DNA
atggcagcgggttggttgaccacttggagccagaacagtgtgacttttcaggaggtggcagttgatttcagtcaagaggagtgggcgttgctggatcccgcacagaagaatttatacaaggacgtgatgctcgagaactttaggaacctcgccagcgtcggataccagctgtgtcgtcactccttgatctcaaaggtggatcaggaacagttgaagacagatgaaaggggcatattgcagggtgactgtgctgactgggaaacccaactgaaacctaaggacaccattgccatgcagaacattccaggtggcaagacttccaacggaataaacaccaatccacatggacgggagtttttgtag

SEQ ID NO: 247359 - DNA, 966 bp, synthetic construct
  misc_feature 1..966: note = Description of Artificial Sequence: Synthetic coding sequence
  source 1..966: mol_type = other DNA
atggccgctggctggctcacaacttggtcgcaaaattccgtaaccttccaagaagttgccgtagatttcagccaggaagagtgggcactcctggacccagcccagaaaaatctttacaaggacgtgatgctcgaaaactttagaaatctggctagtgtggggtatcaattgtgccgacattctctcatctccaaggttgatcaagagcagctgaaaaccgacgaaaggggaatcctgcagggggactgtgccgattgggaaacccagctcaagccgaaggatacgatagcaatgcaaaatattcccggaggaaagaccagcaacggcatcaataccaattgcgtgcggactcacagtggtgagatgccttatgaatgcagtgattgtggtaaagccttcatctttcagtcgtcattaaagaagcatatgaggagccacaccggcgaaaagccttatgaatgtgaccattgcgggaaaagcttcagtcaatccagccatctgaatgttcataaacgtacacatactggagagaagccatacgattgtaaggagtgcggcaaggcttttacagtgccatcttctctgcagaaacacgtgcgaactcacacaggagagaagccctacgagtgctccgactgtggaaaggcctttattgaccagtcctcgctgaaaaagcatactcgcagccacaccggggagaaaccctacgagtgcaatcagtgcgggaagtcattctctacggggtcttatcttatcgtgcacaagaggacccatactggcgaaaaaacatatgagtgtaaggagtgtggcaaggcattcaggaattcgtcctgtctcagggtacatgtacgcactcacactggcgagaagccttataaatgcatccagtgtgagaaggcattttctacatccacaaatctgatcatgcataagcgtatacacaacgggcaaaaattgcacgaatag

SEQ ID NO: 247360 - DNA, 1650 bp, synthetic construct
  misc_feature 1..1650: note = Description of Artificial Sequence: Synthetic coding sequence
  source 1..1650: mol_type = other DNA
atgccagtagatctgggtcaggcgttggggctcctcccttctctcgccaaggcagaagattcccagttttctgagtccgacgccgctctgcaagaagaactgtcttctcctgagaccgcaaggcaactcttcaggcagttcagatatcaagtgatgtccggccctcatgagacactgaaacagctaaggaagctgtgcttccagtggcttcagcccgaagtacataccaaggaacagattctggaaattttgatgctcgagcagttcttaactatcctgcctggtgagattcaaatgtgggttaggaaacagtgtccagggagcggcgaagaagcagtcaccctagtggagtctctgaaaggggacccccagcggctgtggcaatggatttccattcaggtgctcggtcaggatattttgagtgagaagatggagtcgccatcctgccaggtgggtgaggtcgaacctcacctcgaagtggtaccacaggaactgggccttgagaactcatcttctggccctggtgagctgcttagtcacatcgtgaaggaagagagcgatactgaagctgagctcgctctggctgcttcccagcctgctaggctagaggaacgcttgattcgggaccaagatctgggcgcttctcttttgcccgctgccccacaagagcagtggcgccaattagattcaacccagaaagagcaatattgggaccttatgctcgaaacttacggcaagatggtctccggagcaggcatctctcaccctaaatccgacctcacaaatagcatcgaattcggagaagagctggcgggtatatacctccacgtgaacgagaaaatcccaaggccaacttgtatcggagatagacaggagaacgacaaagagaatctaaatctggaaaaccaccgagaccaagaattactgcacgcatcttgtcaggcctcaggcgaagtaccctcacaagccagcctgagaggattttttactgaggacgagccaggatgcttcggggaaggtgaaaatttgcccgaggcactgcagaatatccaggatgagggtacaggagagcagttatcccctcaggaacgtatatccgagaagcagctaggccagcatctgccaaatccacattccggggaaatgtccactatgtggctggaggagaagagagaaacaagccaaaagggacagccacgcgctcctatggctcaaaagctccctacctgccgtgagtgcggaaaaactttttatcgaaattcacaattaatcttccaccagcgcacccatacgggagagacctactttcagtgtaccatctgcaagaaagcattcctacggtcatcagattttgttaaacaccagcgcacccataccggagagaaaccatgcaaatgtgactattgtggcaaagggttctccgatttcagtggtcttagacaccacgaaaagattcacaccggcgaaaagccatacaagtgtccaatctgcgagaagtcattcatccagcgttccaactttaataggcaccagcgggtgcacactggtgagaagccttacaaatgcagccactgtggaaaatccttcagttggagcagctccctggataagcaccaaagatcccatctggggaagaaacccttccaatag

SEQ ID NO: 247361 - DNA, 1650 bp, synthetic construct
  misc_feature 1..1650: note = Description of Artificial Sequence: Synthetic coding sequence
  source 1..1650: mol_type = other DNA
atgcctgtcgatctcggccaggccttggggcttttgccctcacttgccaaagctgaggattcccagttctccgagagcgacgccgcactgcaggaagagctgagttccccagaaactgccaggcagcttttccgtcagtttcggtaccaggtcatgagcggacctcacgaaaccctgaagcaattacgaaagctgtgtttccaatggttgcaacccgaagtacacacaaaggaacagatccttgaaatcctgatgctcgaacaattcctgaccattttacctggagagatccagatgtgggtgaggaaacagtgccctggctccggggaggaagcagtcactctggttgaatctttgaagggcgatccccagcggctctggcagtggatctcgatacaggtactgggacaagacattctgagtgaaaagatggaatcacctagctgtcaggtcggagaggttgagccacaccttgaggtcgttccccaggaactcgggctggaaaattcctcctccggcccaggcgaacttctgtcacatatagtgaaggaggaatccgatacagaggccgagctggccctggctgcctctcagccggcaagattagaggagcgcctgatccgggaccaggacctgggggcttcacttttgcctgccgctcctcaagagcagtggaggcagctagacagcacccagaaagaacaatactgggacctgatgctggaaacttatggcaaaatggtatctggagccggtatcagtcaccccaagtccgacctgacaaattctatcgaattcggagaggagctagctggaatctacctgcacgtgaatgagaaaataccgaggcccacatgcatcggggatcgccaggaaaatgacaaggaaaaccttaacctggaaaatcacagggaccaagaactgctgcacgcatcatgtcaggcgagcggagaggtaccatctcaggcctcactacggggatttttcacggaagacgagcccggatgcttcggcgagggagaaaacctgcctgaggcgctccaaaacatccaggacgaaggaacgggggagcaactcagtccccaggagcggatttccgagaagcagttaggacagcatttgcccaatccccactcaggagaaatgagtaccatgtggcttgaggagaagcgggagacctctcagaagggacagccccgagcaccgatggcgcagaagctgcctacttgcagggaatgcggtaagactttctatagaaactcacagctcatttttcatcaacgaacacacaccggcgaaacctactttcaatgcaccatctgcaagaaggccttcctgaggagctcagacttcgtgaagcaccagcgaacacataccggcgagaaaccatgtaaatgtgactactgcgggaaaggatttagcgacttttctggtctccgacaccatgaaaaaatccacactggagaaaaaccttacaagtgtcccatctgcgagaagagttttatccagcgatcaaatttcaacaggcaccagcgagtgcatactggtgaaaagccatacaagtgctcccattgcggcaagtccttctcttggagcagctccttggacaaacaccaaagatcacacctcggcaaaaagccattccagtag

SEQ ID NO: 247362 - DNA, 1959 bp, synthetic construct
  misc_feature 1..1959: note = Description of Artificial Sequence: Synthetic coding sequence
  source 1..1959: mol_type = other DNA
atgattaatgcccaggagctgttgaccctcgaagacgtaactgtggaatttacctgggaagagtggcagctgttaggaccatttcagaaagacctgtatcgggatgtgatgcttgaaatctacagcaacctgcttagtatgggctaccaggtcagcaaacctgatgccctgagtaagctggaacgaggagaggagccctggacgatggaagatgagcgacattccaggatctgccctgaaaacaacgaggtggatgaccatttacaggatcatctggagaaccagaggatgctcaaatccgtggagcagtaccatgaacacaatgcttttggaaacaccgccagccagacaaagagcctgtgtctattcagagaaaaccatgataccttcgagttgtatattaaaacattaaaatcaaacctgtccctagttaaccagaacaagagctgcgagattaacaattcaaccaagttttcaggtgatggaaagagcttcctccacggaaactatgaagagctgtattccgccgctaaattttccgtgagcacaaaagcgaatagtaccaagtcccaggtaagtaaacatcagaggacgcacgaaatcgaaaagaatcatgtatgcagcgagtgcgggaaagcctttgtcaaaaagagtcagctgactgaccacgagcgagtccatactggagagaaaccatatggctgtaccctctgcgctaaggtgttttctcggaaatctcgtctgaatgaacatcagcgcattcataagagggagaaaagcttcatttgtagcgagtgcggtaaagtgttcactatgaagtctaggcttatcgagcaccagagaactcacacaggggagaagccctacatctgcaatgaatgcgggaagggatttccaggaaagcgcaacctcattgttcatcagcggaaccacaccggtgagaaatcgtacatatgcagcgagtgtgggaagggatttacaggaaagagtatgctcattatacaccagcgtacacacactggagaaaagccttatatctgttcagagtgcggtaagggttttacaacgaaacactatgtcataatccaccagcgaaaccacacaggcgagaagccgtacatatgcaacgaatgcggcaaggggtttaccatgaaatcccgaatgatcgagcaccagcggactcatactggagagaagccttatatttgtagcgagtgtggtaaaggattcccaagaaaaagcaacttgatcgtccatcagaggaaccataccgtcgagaaaagctatctgtgtagcgaatgcggcaagggctttacagtgaagtccatgttgatcattcatcagcgcacacacaccggcgaaaagccttacacttgctctgagtgtggtaaaggatttcccttgaagtctagactcattgtgcaccagcggacccatacgggggaaaagccataccgctgcagtgagtgcgggaaaggattcatagtgaacagtgggctaatgcttcaccagagaacccatactggtgagaagccctatatttgcaacgagtgcggaaagggtttcgcctttaagtccaacctggtggtacaccagcgaacccacaccggggagaaaccatttatgtgttcagagtgtggaaaaggcttcacaatgaagagatacttaatcgtacatcagcaaatccacactgaagagaagagttgcatctgtagcgagtgcggtagagggttcgccaaagaaactgaactcgccctccacaaacaggtgcataccggcgagaagccatatgggtgtaacgaatgtggaaaagggtttactatgaaaagcaggctgatcgtgcaccagaggacccataccggtgaaaaacctttcgtgtgtagtgagtgccgcaaggctttctcgtccaagcgcaatcttattgtgcaccagcggacacacaacggtaataaaccgtag

SEQ ID NO: 247363 - DNA, 2004 bp, synthetic construct
  misc_feature 1..2004: note = Description of Artificial Sequence: Synthetic coding sequence
  source 1..2004: mol_type = other DNA
atgagagcttgcgcaggctctactcgcgaggccggatcaggggctcaggatctttctactcttctgtgtctggaggaaagcatggaggaacaggacgagaagccccctgagccccctaaggcctgcgcccaggagggggtgaattttaagatcgtcactgtggattttacaagggaggaacaggggacctggaatcctgcgcagagaacactcgatcgtgacgtgatcctggaaaaccaccgcgacctggtttcgtgggacctggcaaccgctgtcgggaagaaggattccacatctaaacaacggatttttgacgaggaacccgctaatggtgtcaaaatagagcgattcacacgagacgacccatggctgtcatcctgtgaggaggtggatgattgtaaagatcagcttgaaaaacagcaggagaaacaggaaatactgctccaggaggtggccttcacacaaaggaaagcggtgatccacgagagggtgtgcaagtctgatgaaactggggagaaaagcggactgaattcttccttgttttcctcgccagtgatccctattcgcaatcatttccacaagcacgtcagccacgcaaaaaaatggcatcttaatgccgcagtgaacagccatcagaaaatcaacgagaatgagacgctctacgagaataacgagtgcggaaaaccccctcagagcatacacttgatacagttcacacgcacgcaaaccaaggataagtgttatggcttctcagacagaatccagagtttttgccacgggaccccgctgcatatccacgagaagatccatggcggtggcaagacttttgactttaaagagtgcggccaggtgttgaaccccaagatcagccacaatgagcaacagcggatacccttcgaagagtcgcaatacaaatgcagcgagacctctcacagttccagcctaacgcagaacatgcgaaataactctgaagagaaaccctttgagtgtaatcaatgtggtaagagcttctcttggtcctctcatctggtggcccatcagcggacccacaccggggagaagccttatgaatgcagcgagtgtggaaaaagtttttcacgttcttcacacttagtgagccaccagagaacccacacgggtgaaaaaccttataggtgtaaccagtgcggcaaatccttctctcagagttacgttttagtggtgcaccagagaacccacacgggagagaagccatacgagtgcaatcagtgcggcaaaagcttccggcagagctataaactcatcgcccatcagcgcacacacactggcgagaagccttatgaatgtaatcagtgtggcaagtccttcatacagtcctataagctgattgctcaccaaagaatacacaccggggaaaaaccctatgagtgcaatcagtgcggtaaaagtttttcacaatcttacaaattggtggctcaccagcggacacacactggggaaaagccgtttgagtgtaatcagtgcgggaagtcattttcgtggtcttctcagctggttgcacatcagaggactcatacgggcgagaagccatacgaatgttccgaatgcggaaaatcgttcaaccgatcatcgcatctggtgatgcaccaacggatccacacaggcgaaaaaccatacgagtgtaaccaatgcggcaagtcctttagccagagttatgttctggtcgtgcatcagcgcacccacactggggaaaagccctacgaatgttcacaatgcgggaaatcattccgtcaatccagctgccttactcagcaccaaagaactcacaccggtgagaagccattcgagtgtaatcagtgcgggaagacatttagcctgagtgcaagacttatcgttcaccagcggacccatacgggcgagaaaccctttacctgcattcaatgcggtaaggcattcattaactcctacaagctaatcaggcatcaggccacgcatactgaagagaagctttacgaatgtaactag

SEQ ID NO: 247364 - DNA, 1848 bp, synthetic construct
  misc_feature 1..1848: note = Description of Artificial Sequence: Synthetic coding sequence
  source 1..1848: mol_type = other DNA
atgccacaactgcagtaccctgaaggatacctggcgccaaacagatgtctggtgtctaattgcggtgtaaacaaaatgtcgaacgatgagctggtgggacagaatcacggaatggagggtgaggcctgtattggaggcgatgtgactttcaacgatgtcgccattgactttacacacgaggaatggggatggctatcttcagcgcagagagatctctacaaagacgtaatggtgcagaattacgaaaatctggtgtcggttgctggactgtctgtcactaagccttatgttattacgttgctggaagatgggaaagagccatggatgatggagaagaaactgagcaaaggtatgattcctgattgggaaagtcggtgggaaaacaaagaactgtccacaaaaaaggacaattatgatgaggattcaccacagacagtcataatcgagaaagtggtgaaacaatcatacgagtttagcaatagtaaaaaaaatctggaatacatcgagaagctggagggcaagcacggaagccaggtcgaccacttccgcccagcaattctgacttctagggaaagtcctactgctgatagcgtttacaagtacaatatctttagatccacctttcattcaaagtccacattgtcagaacctcagaagatctctgccgaaggaaactctcacaagtatgacattcttaaaaaaaaccttcctaagaaatcggtcatcaagaatgagaaggtcaacgggggaaaaaagctgctcaactcaaacaaatctggcgctgcgttcagtcagggaaagtccttgacactgccgcaaacgtgtaaccgcgagaagatttacacgtgctctgaatgtggcaaggcgttcgggaagcagagtattttgaataggcattggagaatacacaccggagaaaagccatatgaatgcagagagtgcggtaagacattttcacacggttcctcactcacccggcacctgatctcacacagcggggagaaaccttacaaatgcattgagtgtggaaaagccttctctcacgtgagctccctgaccaaccaccagtccactcacacaggggagaagccctacgagtgtatgaactgcggcaagtccttctcgcgcgtctcacacctcatcgagcaccttcgcattcatactcaagagaagttgtacgaatgtaggatttgcggcaaggcatttattcatcgttcctcccttatccaccatcagaaaattcacacaggagaaaaaccctatgagtgcagagagtgtggtaaggctttttgctgttccagccacctcactaggcaccagaggattcatacgatggagaagcaatacgagtgtaataaatgcctcaaggtgttctcatctcttagcttcttagtgcagcaccagtcgatccacactgaggagaaaccatttgaatgccagaagtgtaggaaaagtttcaaccagcttgaatccctgaatatgcacctaaggaaccatatccgtttaaagccatatgagtgtagcatctgtggcaaggcgtttagccatagaagcagccttctgcaacatcaccgaattcatactggcgagaaaccatatgagtgcatcaagtgtggtaaaactttcagctgctcatcgaacctaaccgtccatcagaggattcacaccggcgagaaaccttataaatgtaatgaatgcggtaaagcattctcaaagggttctaatttgactgcccatcaaagggtgcacaatggtgaaaagcccaacagtgtcgtgagtgtggaaaaaccccttgactatatgaaccattatacatgtgagaaatcttacagacgcgagactgtatag

SEQ ID NO: 247365 - DNA, 1404 bp, synthetic construct
  misc_feature 1..1404: note = Description of Artificial Sequence: Synthetic coding sequence
  source 1..1404: mol_type = other DNA
atgccacaggtgaccttcaacgatgttgcgatcgactttacccacgaggagtggggctggctgtcatctgcgcagcgggacctgtataaggacgtgatggtgcagaactacgagaatttggtgagcgtcgggctctcagtgactaaaccctatgtgattaccttgcttgaagatggcaaagagccctggatgatggagaagaaattatctaagggcatgatacctgattgggagtctaggtgggaaaataaggaactctctaccaagaaagataactacgacgaggattccccgcagacagtgataattgagaaggtcgttaaacagagctatgagttttctaatagtaagaaaaacctggagtacattgaaaaactggagggtaaacatggtagccaggttgatcatttccggcctgctattctcaccagccgagaatcgccgacagccgatagcgtctacaaatataatatattccggagcacttttcattccaaatcgaccctttccgaaccccagaaaatatcagctgaaggtaatagtcacaagtacgacattctgaagaagaacctgcccaagaagagtgttattaagaatgagaaggtgaatgggggaaaaaagctccttaactctaataaaagcggtgcggcatttagtcaggggaagtctctcactctgccacagacctgtaaccgtgagaagatttacacttgttcagaatgcgggaaggcattcggtaagcaatccatcctgaacaggcattggcgcattcacactggagaaaagccttatgagtgtcgggaatgtggcaagactttctcgcacggctcaagcctgacaaggcacctcatatcccactcaggcgagaagccttacaagtgcatagaatgcggaaaagccttctcccacgtgagctccctgacaaaccaccagtctactcacacaggcgagaaaccatatgagtgcatgaattgcggaaagtcttttagtagagtgagccacctgattgagcacttgcggatccatacgcaagaaaagctctacgagtgtcggatctgtggcaaggcctttattcaccgctcgtctcttatccaccatcagaagatccacacaggggagaagccttacgagtgccgggagtgcggcaaggcattctgctgtagtagtcaccttaccaggcaccaaaggatccataccatggagaagcagtatgagtgtaataagtgtctgaaagttttcagctctctatcctttctggtgcagcatcaaagcattcacacagaagagaagccttttgagtgtcagaagtgtcgcaagtccttcaaccagttagagtccctgaatatgcatttgcgaaaccacatcgagactctcaggatgcagtacatgtgggagagtttgtag

SEQ ID NO: 247366 - DNA, 1713 bp, synthetic construct
  misc_feature 1..1713: note = Description of Artificial Sequence: Synthetic coding sequence
  source 1..1713: mol_type = other DNA
atgcctcaagtgaccttcaatgacgtcgcgatcgattttacccacgaggagtggggctggctttcatccgcgcagagggatctatataaggatgtgatggtccagaactacgagaatttagtctccgtgggattgagtgtcacaaagccttatgtaatcaccctgcttgaagacggcaaagaaccttggatgatggagaagaagctgtccaaaggaatgatacctgactgggaatctcgttgggagaacaaggaattatctaccaagaaggataactacgatgaagactcccctcaaaccgttataatcgagaaggttgtgaaacagtcctacgaatttagcaacagcaagaagaatctcgagtacatagaaaagctcgaaggaaagcacgggagtcaagttgaccacttcaggccagcaattttgaccagtagggaatctccaacagctgactcagtctataagtataacatcttcagaagtacattccacagcaagtccacgctgagcgaaccacagaagatctctgctgagggtaattcgcacaaatatgatattttaaagaagaatctgcctaaaaaaagcgtcatcaaaaatgagaaagtgaatggaggaaagaagctgctgaattccaataagagcggagccgctttttctcaaggcaagagcctgaccctgccccagacatgcaacagggaaaaaatttatacctgctctgagtgcggtaaggcattcggcaagcagagtatcctgaatcgtcattggagaatccacactggggagaaaccctacgagtgtagagagtgcggaaaaacgttcagccacggtagctcgctcacgcggcatctgattagccactcaggcgaaaaaccatacaagtgcatcgaatgcggaaaggccttttcacacgttagctccttaacaaatcaccagtccactcatacaggtgagaagccatatgagtgcatgaattgcggcaagagtttctctcgggtcagccacttgatagagcatctgcgcatccatacccaggaaaaattgtatgagtgtcgtatctgcggtaaggccttcatccaccggtcctccctgatccatcaccagaagatccacacaggggaaaaaccatacgaatgcagagagtgtggcaaggcattttgctgctctagccatttaactcgtcatcaaagaattcatacaatggagaagcagtacgagtgtaacaagtgcctgaaagtcttcagctctctctcatttttagtgcaacaccagagcatccacaccgaggagaaaccttttgaatgccagaagtgccggaagtctttcaaccagttggagagcctaaatatgcatctacggaatcacatcagactgaaaccatacgaatgttctatatgcggtaaagcttttagccatcggagtagtcttctgcagcaccatcggatacacacgggagaaaagccctacgagtgcattaagtgcggaaaaaccttttcctgtagctcgaatttgacagtgcaccagaggattcacaccggcgagaagccttacaaatgcaacgaatgtggcaaagctttttccaaagggagcaatctgaccgctcatcagcgcgtgcacaatggcgagaaaccaaacagcgtcgttagcgttgagaaacctttggactacatgaaccattatacctgcgaaaaaagctatcgcagggaaacagtatag

SEQ ID NO: 247367 - DNA, 1716 bp, synthetic construct
  misc_feature 1..1716: note = Description of Artificial Sequence: Synthetic coding sequence
  source 1..1716: mol_type = other DNA
atgcctcaggtgacattcaacgacgttgctatcgattttacacatgaggaatgggggtggctttcctccgcccaaagagatctatacaaagacgtgatggtgcagaactacgaaaatctggtctccgtggcgggattgtccgtcaccaagccgtacgtgataactctgctggaagacggtaaggaaccttggatgatggaaaaaaagctctccaaggggatgattccggattgggaaagcaggtgggagaataaagagctctctactaagaaggacaattacgatgaggacagtcctcagaccgtgatcattgaaaaagtggtaaagcagtcctatgagttctctaattcaaaaaagaatctggaatatatcgaaaagctggagggaaaacatggatcccaggttgatcactttagacctgccatcttaactagcagggagtccccaactgctgacagtgtatacaagtataacatatttagaagtaccttccactcaaaatcaaccttgagtgagccccagaaaatcagcgccgaaggaaattcacataaatacgacatcctgaaaaagaacttacctaagaagtccgtgataaaaaatgaaaaggtcaatggcggtaagaagctgttgaactcaaataagagtggggcagctttttctcagggcaagtccctgaccctcccacagacttgcaaccgcgaaaaaatatacacatgctccgagtgcggcaaggcatttggcaaacaatccattctgaaccggcactggcgcatccacacaggtgagaagccatacgagtgtcgtgagtgcgggaagactttttcccacggcagctcactgacccgccatctcataagccacagcggcgaaaaaccttataagtgcatcgagtgtggcaaggcattctcacacgtgagcagtctgaccaatcatcaatcaacacacacaggtgaaaaaccttacgaatgcatgaactgcggtaaatcattttctcgagtcagccatttaatcgagcacttgaggatccacacacaggaaaagttgtacgagtgccggatctgtggcaaggcatttatccatagatcaagcttgattcaccaccaaaaaatccacaccggcgagaagccatacgagtgtcgcgagtgtggtaaggccttctgttgttcctctcatctcaccaggcaccaaaggatccacactatggagaaacaatatgaatgtaacaagtgccttaaagtgtttagctctttgtcctttttagttcagcatcagtcaattcacactgaagaaaagccattcgaatgccagaagtgtagaaagtcatttaaccagttagagtctctgaacatgcatctgaggaaccacatccgactgaaaccgtacgagtgttcaatctgcgggaaggcgttcagtcaccgctcttctctgctacaacaccatcggatccacaccggtgagaaaccttacgaatgcattaagtgcggtaagaccttcagttgctcctcaaatctaaccgtccatcagagaatccacactggagaaaagccctataagtgcaacgagtgcgggaaagctttctctaaaggatccaacctcacagcccaccagcgtgtgcacaacggtgaaaaacctaattctgtagtgagcgttgagaaaccactggactacatgaatcattacacgtgcgaaaaatcctaccggcgtgaaacagtgtag

SEQ ID NO: 247368 - DNA, 1920 bp, synthetic construct
  misc_feature 1..1920: note = Description of Artificial Sequence: Synthetic coding sequence
  source 1..1920: mol_type = other DNA
atgacacccgcttccgcatcaggtgaggattctggcagcttctacagctggcagaaggccaagcgcgaacaaggactcgtgactttcgaggacgtcgccgtcgattttacgcaggaagaatggcaatatcttaaccccccacagagaaccctgtatcgcgatgtcatgctggagacctactccaaccttgtgttcgtggggcagcaggtgacgaaacccaacctcatcctgaagctcgaggtagaagagtgccccgcagaaggaaaaatcccattctggaatttcccagaggtgtgtcaggtcgacgagcagatcgaaagacagcaccaggacgatcaggataaatgcctgctgatgcaggtgggtttctcagacaaaaagaccattataactaaatcggctagggactgtcacgagtttggcaacatcctccatctgtccacaaacctcgtagccagtatacaaagaccagataagcacgagtcatttggaaataatatggtggataacctggatctgttctcacgcagctcggccgagaataaatacgataacggttgtgctaagttgtttttccacaccgagtatgaaaagaccaacccgggaatgaagccctatggttacaaagagtgtgggaagggcctgcgccgtaagaagggcttgtctcttcaccagaggattaaaaacggagagaaaccatttgagtgtacggcgtgcagaaaaaccttttccaaaaagtcgcatctcatcgttcactggaggacccacacaggtgagaagcctttcgggtgcaccgagtgcggcaaagcgttctcccagaaatcccaactgatcatacacctgagaacccatacaggagagcgaccttttgagtgtccagagtgcgggaaggctttccgcgaaaagtccacagtgattatccactacagaacgcacaccggagagaagccttacgagtgtaatgaatgcggcaaagcttttactcagaagtccaatctgatagtgcaccagaaaacacataccggcgagaaaacttatgagtgcaccaaatgcggcgagagttttattcagaaattagacctaatcattcaccacagtacgcataccggcaagaaaccccacgagtgtaacgagtgtaaaaaaaccttttctgataagtccacactcattatccatcagcggactcacactggggagaaaccccacaaatgcacggagtgcggcaagtctttcaatgagaagtcaaccctcatagtgcaccagaggacacatacgggggaaaaaccctacgaatgcgatgtatgcggcaaaaccttcacacagaagagtaatctgggagtacaccagagaacgcactctggagaaaagccgttcgaatgcaatgagtgtgagaaagctttctctcagaaatcctacctcatgcttcaccagcggggacacacaggggagaaaccgtatgaatgcaatgagtgtgagaaggctttctctcagaaatcttatctcatcattcaccagcgtacacatacagaagagaagccttataagtgcaatgaatgtgggaaagcattccgagaaaaaagcaaattgatcatccaccaacgaattcacacaggggaaaagccctatgagtgccctgtttgttggaaggcattttctcagaaatcacaacttattatccaccagagaactcataccggtgagaagccatatgcctgtacagagtgtggcaaagcgtttcgcgagaagtctaccttcaccgtccaccaaaggactcacaccggcgagaagccatataagtgtacggagtgtgggaaggcttttacccaaaagtccaacctcatagtccatcagagaacacatgcaggtaaaaaagctcacggacgcggtcataccagaaaatccaagttcatggcgcactag

SEQ ID NO: 247369 - DNA, 1863 bp, synthetic construct
  misc_feature 1..1863: note = Description of Artificial Sequence: Synthetic coding sequence
  source 1..1863: mol_type = other DNA
atggctaagcctcaaggcctggttactttcgaagacgtcgctgtggacttcacgcaagaggaatggcagtacctcaatccaccccaacggactctttaccgagacgtaatgctcgaaacttattcaaatctggtgttcgttggccaacaggtaaccaagccaaatttaatcctgaagctggaggtggaggaatgcccagctgaagggaagatccccttctggaacttccccgaggtatgccaggtggatgagcaaattgagaggcagcatcaggatgatcaggacaaatgcctgctgatgcaagtgggcttttctgataaaaagactatcattaccaaatcagccagagattgccatgagtttggtaatatccttcatcttagcactaatcttgtcgccagtatccagcgccctgataaacatgagtcatttggaaacaatatggtggataacctggacctctttagccgttcatcggccgaaaacaaatatgacaacggctgtgctaagctgttctttcatactgaatatgagaagactaatcccggaatgaaaccctatgggtacaaggaatgtggcaaggggctgcggagaaagaagggcctgtctttgcatcaaaggataaaaaacggggaaaagccattcgaatgtacagcctgcaggaagactttttctaaaaaatcgcatttgattgtacactggcggactcacaccggagaaaagccgtttggctgtactgaatgcggcaaagcattctcccaaaagtcccagctcattatccacttgcggactcacacaggcgagcgcccatttgagtgtccagaatgcggtaaggctttccgcgagaaatctaccgtcattatccattatcgcactcacaccggtgaaaagccttacgagtgtaatgagtgcggtaaggctttcacccaaaaatctaatttgatcgtgcaccagaaaacacatacgggggagaaaacatacgagtgcaccaaatgcggtgagtcctttattcagaaattagatctgatcattcatcacagcactcacacaggaaagaagccacacgagtgcaacgagtgcaagaagaccttctctgacaagagcaccttgatcatccaccagcggactcacactggcgagaaaccacataagtgcactgagtgcgggaagtcctttaatgagaagagcacgcttatcgtgcaccagagaacccacactggcgaaaagccctacgaatgtgacgtatgcggcaagaccttcactcagaagagcaacctgggggtgcaccagagaacgcactcaggtgagaaaccatttgagtgtaatgaatgcgaaaaagccttttctcagaagtcatacctcatgctgcaccaacgcggacataccggggagaaaccctacgaatgtaacgagtgtgagaaagcgttttcccagaagagctacctcatcatacaccagcggactcacaccgaagaaaaaccctacaagtgtaacgagtgtggtaaggcctttcgagagaagtccaaactgattattcatcagcggattcatacaggcgagaagccctacgaatgtccagtctgttggaaagcgttttcccagaaatctcagcttattattcaccagcgcacgcataccggggagaagccttacgcctgcaccgagtgtggcaaggcattcagagagaagtctacatttactgtccaccagaggacccacacgggagaaaaaccgtacaagtgtacggagtgcgggaaagcttttacccagaaatctaacctgatagtccaccaacgaacacacgccggaaagaaggcacatggtcggggacacactcggaaatctaaattcatggctcattag

SEQ ID NO: 247370 - DNA, 1920 bp, synthetic construct
  misc_feature 1..1920: note = Description of Artificial Sequence: Synthetic coding sequence
  source 1..1920: mol_type = other DNA
atgacccctgcttcagcttccggcgaggattctggttctttctactcctggcaaaaggctaaaagagagcaaggcctagtgacattcgaggatgtagcagttgactttacccaggaagagtggcagtatctcaatccccctcaaagaactctttatagggatgtgatgctggaaacctatagcaacctggtcttcgtcggacaacaggttacaaagcccaatctgatcttgaagcttgaagtggaggagtgccccgcagaaggaaagattcccttctggaatttcccagaggtgtgtcaggtcgacgagcagatcgagcgtcagcatcaggacgaccaggataagtgcctactgatgcaagtcgggttctcagataagaagaccataattactaagagtgcacgggattgccacgagtttggcaacattttgcatctgtccactaatttggtcgcctctatacagaggcccgacaagcacgagagctttggcaataacatggtagataatctcgatctcttttccagatcaagtgccgagaacaagtacgacaacgggtgcgcgaaattgttctttcacacagaatatgagaaaacaaatcccggaatgaagccctacgggtataaggagtgcggcaaagggctgaggagaaagaaggggctgtctctgcaccagcgcatcaagaatggcgagaagccgttcgagtgtaccgcctgcagaaagacgttctcgaagaagtcgcacctcattgtccactggaggacccataccggcgagaagcctttcggatgcacggaatgtggaaaagcttttagtcaaaaaagtcaactcatcatccacctgcgaacccacacaggcgagagaccctttgaatgtccagagtgtggaaaggcttttcgagaaaagtctaccgtcattattcactatagaacccatactggtgaaaaaccctatgagtgtaatgagtgtggtaaggctttcacccagaaatctaaccttatcgtgcaccaaaagacacacacaggcgaaaagacatacgagtgtactaagtgcggtgagagctttatccagaagttggacctgattatccatcactccacccataccgggaaaaaaccacacgagtgtaacgagtgtaaaaaaactttttccgataaaagtaccttgataattcatcagcgcactcacaccggtgagaagccccacaaatgtacagaatgtggtaaatcttttaacgaaaaaagcaccctgatcgttcaccagagaacgcataccggcgaaaaaccgtacgaatgcgacgtgtgtggcaaaaccttcacacagaagtctaacttaggcgttcatcagcgcactcactcaggcgagaagcccttcgaatgcaatgaatgcgaaaaagcgttttcacaaaagtcatacctgatgttgcatcaacggggacataccggggagaaaccctacgagtgcaacgaatgtgaaaaagctttttcccaaaaaagctatttaattatacaccaaaggactcacacagaagaaaagccatacaaatgcaatgaatgcggcaaagcctttcgggagaaatccaagctgataatccaccagcggatccacacgggagaaaaaccttatgagtgtcccgtttgctggaaggctttctctcagaagagccagctcataattcatcagcgtacacataccggcgagaagccatatgcctgcaccgaatgcggcaaggcctttcgggagaaaagcacctttacagtgcatcagcgtactcataccggagaaaagccttataagtgcaccgaatgtggcaaggcgtttacacagaaatcaaatctgatagtccaccaaaggacgcacgccggaaagaaggcccatgggcgaggccacacacgcaaaagcaagtttatggcccattag

SEQ ID NO: 247371 - DNA, 921 bp, synthetic construct
  misc_feature 1..921: note = Description of Artificial Sequence: Synthetic coding sequence
  source 1..921: mol_type = other DNA
atgagttcagagaagagcgggttgcctgacagtgttccacacacaagtcctcctccatacaatgcaccgcagcctcctgccgaaccacctgcccctccccctcaggctgctcctagctcgcatcaccatcaccaccaccattaccaccagagtgggaccgcaacactcccgcgtctgggcgcaggcggactggcatcatcagcagctacggctcagaggggtccttctagttctgcaactctgccacgaccccctcatcacgcccctcccggacccgctgctggcgcacctccaccaggctgcgctacactcccaagaatgcctccggacccctatcttcaggagacccgtttcgaaggtccattgccacccccacccccagctgccgctgccccacctccacctgccccagcacaaacagcccaggccccagggtttgtggtccccacccatgctggcacggtcggaacactgcctctgggcggttacgtggcccctggctatccgctgcaactgcagccctgtacggcctacgtccctgtctacccggttgggactccttacgctggcggaacccccggaggtactggggtcacaagcactctgccacctccgccacagggtcccggactggcactgctcgaacctcgtcgacccccacacgattatatgcccatcgcagtcctgactacaatctgttgtttctggcccacaggcattattgccatcttcaaggctgtgcaagtcaggacggcgctcgcccgtggcgatatggtgtcagcggagatcgcgagtagagaggccaggaactttagttttatctcgttagctgtcggaatagccgctatggtgctgtgcactattctgacagtggtcatcattatagcagctcagcaccacgagaattattgggatccatag

SEQ ID NO: 247372 - DNA, 2004 bp, synthetic construct
  misc_feature 1..2004: note = Description of Artificial Sequence: Synthetic coding sequence
  source 1..2004: mol_type = other DNA
atggaggaccttagctccccagactccacactgcttcagggcggacacaacctcttgagcagcgcctcctttcaggaagcagtaacattcaaggacgtaatcgtggactttacccaggaggagtggaagcagctggatccaggacaacgggacttatttagggatgtcactttagaaaattatactcacttggtgtccatcggtctgcaggtctccaagcccgatgtcataagtcaactggaacagggcacagaaccatggattatggaaccttctatccccgttggcacatgcgccgattgggaaacccgactcgagaattccgtatctgctcccgagcccgacataagcgaggaggagctcagtcctgaggtgattgtagaaaaacacaaaagagacgacagttggtcaagtaatctgctcgagagctgggagtatgaaggcagcttggaaagacagcaggccaaccagcagaccctgcccaaggagattaaagtgacagaaaaaacgattcctagctgggaaaagggacctgtgaacaacgagtttggcaagtccgtgaatgtcagcagtaatctggttacacaggaaccaagccccgaagagacatctactaagagaagcatcaagcagaactctaaccctgtgaaaaaggaaaaatcttgtaaatgcaatgagtgtggaaaagcattctcctattgtagtgccctgatcaggcaccagagaacgcacacaggcgagaagccatataaatgcaatgaatgtgaaaaagctttctcccggtctgagaatctgattaaccaccagagaattcacacgggcgacaagccgtataagtgtgatcaatgtggcaaaggattcatcgagggcccaagccttactcaacaccagcggattcacaccggggagaagccctacaagtgcgacgagtgtgggaaggcgtttagtcagcgcactcatctggtccagcaccagcgcattcatacaggggaaaaaccttatacatgtaacgagtgcgggaaggcctttagccaacgaggacactttatggaacatcaaaaaatccacaccggtgagaagccctttaagtgcgacgagtgcgataaaacgtttacaaggtctacccacctcactcagcaccagaagatccacaccggagaaaaaacatacaaatgtaatgaatgcggcaaggccttcaatgggccatccactttcatccggcaccatatgattcatactggagaaaagccctatgaatgtaacgagtgtgggaaagctttctcccagcatagtaacctcacccagcatcagaagacacatacacaggagaaggcttatgaatgtaaagaatgtggtaaggcattcataagatcgtcctcattggctaaacatgaaagaatccacaccggcgagaagccgtaccagtgtcatgaatgtgggaaaaccttttcttacggctccagcctgattcaacaccgtaagattcacacgggtgaacggccttacaagtgcaatgaatgcggcagagcgttcaaccagaacattcatctcactcagcacaaaagaattcatacaggggctaaaccttatgagtgtgccgagtgcggcaaagcgtttaggcactgctcttccctcgcccagcaccagaaaactcacaccgaagaaaagccgtaccaatgtaacaaatgcgaaaaaacatttagccagtcctctcatctgacacaacaccagagaatacacaccggggagaaaccttataaatgtaacgagtgcgacaaggcgttttctcgatccactcatcttacggaacaccagaatacccacaccggggaaaagccctacaactgcaacgagtgcagaaagaccttttcgcagtcaacctatcttattcaacatcagcggattcacagcggcgaaaaaccctttggctgcaatgactgcggcaaatctttcaggtatcgcagcgccctgaacaaacaccagcgactgcatcccggaatctag

SEQ ID NO: 247373 - DNA, 2256 bp, synthetic construct
  misc_feature 1..2256: note = Description of Artificial Sequence: Synthetic coding sequence
  source 1..2256: mol_type = other DNA
atggaggacctatcttctcccgactcaaccctgctccaagggggtcataacctcttgtcctctgctagctttcaggaggccgtgacgtttaaggacgtgatcgtggatttcacccaggaggagtggaagcagctcgaccctgggcagcgggatttgtttcgggacgtgacattggaaaattatacccacctagtgtctataggcctgcaggttagcaagccagatgtcatctcccagctggagcagggaaccgagccatggataatggaaccctccatccccgttggcacgtgtgccgattgggaaactagattggagaattccgtgtctgccccagagccagatatctcagaagaggagctgtccccagaagttattgtggagaaacacaaaagggatgactcttggtcctctaaccttctggagtcctgggagtacgaggggagcctggaaagacagcaggcaaatcaacagacgctccctaaggaaatcaaggtgacagagaaaaccatccctagctgggagaaagggccagtgaacaatgagtttgggaagagtgtaaatgtttcaagtaacctggttacacaagaacctagcccagaagagacgtctacgaagagatctataaagcagaactctaacccagttaaaaaagagaagtcttgcaaatgcaacgaatgtggcaaggccttctcgtactgttcggccctgatacgacatcaaagaacccatacaggtgagaaaccatacaaatgcaacgagtgcgaaaaggcattttcaagatccgaaaacctgatcaatcatcagcgcatccacacaggtgataagccctacaagtgtgatcagtgcggaaagggcttcatcgaggggcctagcctcacacagcaccaacgaattcacactggtgagaagccttacaagtgcgatgaatgtggaaaggccttctcccaaagaactcaccttgttcagcaccagcgcatccacaccggggaaaagccatacacctgcaacgaatgtgggaaggctttcagccagagaggccacttcatggagcaccaaaaaatccacaccggcgagaagccctttaagtgcgacgaatgtgacaagacttttacaagatctactcacctgacccaacaccagaaaattcatactggagaaaaaacatacaaatgcaacgagtgcggaaaagcctttaacggaccttctacctttatcaggcaccacatgattcacacaggggagaaaccctacgagtgtaatgagtgtggaaaggcattctcgcaacatagcaatctgactcagcatcagaagacacatacaggagaaaaaccttatgactgtgccgaatgcgggaagtcttttagctactggtccagcctcgctcagcatttgaagattcacactggggaaaaaccatacaaatgcaacgagtgtggaaaagcctttagttactgcagtagcctgacccagcaccgtaggattcacactcgagaaaaaccctttgagtgctccgaatgcggcaaggcgttctcctacttgagtaatctcaatcagcatcagaagacccatacacaagagaaagcatacgagtgtaaggaatgtgggaaggccttcattcgctccagctcccttgccaaacacgaacgcatccacacaggcgaaaagccatatcagtgccacgagtgtggcaagacttttagttacggcagctcattaattcagcaccgcaaaatccataccggcgaacgcccatataagtgtaacgagtgtggcagggcgttcaatcagaacatccacttaacacagcacaagagaattcatacaggcgctaagccgtatgagtgtgctgaatgcggtaaggcattccgtcactgttcttccctcgcacagcaccaaaagactcacactgaagagaaaccttaccaatgtaataaatgtgagaagactttctcacagtcctcacacctcacccagcatcaaaggatccacaccggagagaaaccctataaatgcaacgagtgcgacaaggccttctctagatcgacccacctgaccgagcaccagaatacacacacaggggagaagccttataactgcaacgaatgtagaaagacgtttagccaatcaacttatttgatccagcaccagaggattcattccggagaaaagcctttcggatgcaacgattgcggtaagtcgttcaggtatcggagtgctttaaacaagcatcaaagactgcacccgggtatttag

SEQ ID NO: 247374 - DNA, 234 bp, synthetic construct
  misc_feature 1..234: note = Description of Artificial Sequence: Synthetic coding sequence
  source 1..234: mol_type = other DNA
aaagccttctcacagcgaacccatcttgtgcaacatcagcgaatccacactggcgagaaaccctatacatgcaacgagtgtggcaaagctttctcacagcgcggacacttcatggagcatcagaaaatacataccggtgagaaaccatttaaatgcgacgagtgtgacaagaccttcacaagatccacacatttgacgaccagtaaaaactcatactggagaaaaaacttatag

SEQ ID NO: 247375 - DNA, 1755 bp, synthetic construct
  misc_feature 1..1755: note = Description of Artificial Sequence: Synthetic coding sequence
  source 1..1755: mol_type = other DNA
atgatggagaactacggcaacctagtgagtctggacgtactcaacagggacaaggacgaagaaccgaccgtgaagcaggaaatcgaggagattgaggaggaggtggagccacaaggcgttatcgtcacacgaatcaaatccgagatcgaccaggaccctatgggtagagagacgtttgagctggtgggtcgcctagacaaacagcgaggaatcttcctgtgggaaataccaagagaatccctgacgcaggagcagcggatgtttagggaaaatactaatatcatccgcaaaagacccaatagcgaggagaagtgtcacaagtgtgaggaatgtggaaagggatttgtaagaaaggctcatttcatacagcaccagagagtgcatacgggcgaaaaaccttttcagtgcaatgagtgtggcaagtccttctcgagatccagctttgtgattgaacatcagagaatccacacgggcgagaggccatatgagtgtaactattgtggaaagacattctcagtgagtagtaccctgatccgtcatcagcggatccatacaggggagagaccttatcagtgtaatcagtgcaaacagtccttctcccagaggaggagcctggtgaagcaccagagaattcacactggagagaaaccccataagtgctctgattgtggaaaggccttttcctggaagagccacttaattgagcatcagcgtacacacactggggaaaagccttatcattgcactaagtgtaaaaaatctttcagcagaaactctctcctcgtagagcatcagaggatacataccggcgagcgccctcacaaatgcggtgagtgtggcaaggcgttccgcttatctacatacctaattcagcaccagaaaatccacacaggggagaaacccttcctgtgcatcgagtgcggaaagtcctttagtcggtcctcatttctgatcgaacatcagcgaatacatacaggtgagcggccttaccaatgcaaagagtgcggtaagtcgttcagccagctttgcaatctgactaggcatcagcgcatccacacaggagataaaccacataagtgtgaggagtgtggcaaagccttctcccggagtagcggtctgattcagcatcagcgcatccatacccgggaaaagacatatccatacaatgaaaccaaagagtcttttgacccgaactgctcgctcgtgatccaacaggaggtatatccaaaagagaaaagctacaagtgtgatgaatgtggtaagacgttctcggttagcgctcaccttgttcagcatcagagaatacatactggtgagaagccttatctgtgcaccgtatgcgggaagtcgttctctcggagcagcttcttgattgaacaccagcgcatacacaccggcgagcgcccttacctgtgcagacagtgtggaaagtccttctcccagctgtgcaatttaatcagacaccagggagtccacacaggcaacaagccccacaagtgtgacgaatgcggaaaagcattctctaggaattccggcctcatacaacatcagcggatccacactggtgaaaagccctataagtgtgaaaagtgtgacaagtccttctcccagcaaaggagcctcgtcaatcaccagaagatccacgcagaggtgaagacacaggagacacacgagtgcgacgcatgtggtgaagccttcaattgtaggatctccttgatccaacatcagaaattgcacactgcttggatgcagtag

SEQ ID NO: 247376 - DNA, 1881 bp, synthetic construct
  misc_feature 1..1881: note = Description of Artificial Sequence: Synthetic coding sequence
  source 1..1881: mol_type = other DNA
atggcgtccccttccccccctcctgagtcaaaaggcttactcacgttcgaagacgtcgcggtgttttttacacaagaggaatgggactatctggatccagcacagagatccttgtataaggatgtgatgatggagaattacggaaatctggtatctctggacgtcctcaaccgggataaggacgaggagccaactgtcaaacaggaaattgaagagatagaagaggaagtggagccccagggcgtgatagtcacacgcattaagagtgaaattgatcaagaccctatgggcagagagactttcgagctggtcgggagactggataagcaacgagggatcttcttatgggagatcccgagggagtccctgacccaggaacaacgaatgtttcgggaaaacaccaacataattcgaaagaggcccaacagcgaagaaaaatgccataagtgtgaagagtgtggtaaaggattcgttcgcaaggcacacttcatccagcatcagcgggtacacacaggggaaaaacctttccaatgtaatgaatgtggaaagtccttctctcggagttccttcgtgattgagcatcaacgtatccataccggcgaacgcccatacgaatgcaactattgcgggaaaacgttctccgtatcttcgacactgatcaggcaccaaaggattcacaccggtgagcggccatatcagtgcaaccagtgcaaacagagcttcagccagcgtagaagcttagtcaagcatcagcggatccacaccggggaaaagcctcacaaatgttcagactgcgggaaggcctttagctggaagagccatttgattgagcaccagagaacacacaccggggagaaaccctatcattgcaccaagtgcaaaaagtctttctcacgtaattcgctgcttgtggagcatcagcgcatccacactggagagaggccccataaatgtggggagtgcggtaaggcgttcaggctgtctacatacctgatccagcaccagaagattcacaccggcgagaaacccttcttatgtattgaatgtggcaagtcctttagccgatctagtttcctgatagaacaccagagaatccacaccggggaaaggccataccagtgcaaggaatgcggaaaatccttttcacagctgtgcaatctgacgaggcaccagcgtatccatacaggagacaagccacacaaatgcgaagagtgtgggaaggcctttagcaggagcagtggcctcatccagcaccagcgaatccacacccgggagaaaacttatccttataacgagacgaaggagtccttcgaccccaactgtagcctggtgattcaacaggaagtgtaccccaaagaaaaaagttataaatgtgacgaatgcggaaaaactttttctgtgtccgctcatctggtacaacaccagcgcatacacaccggagagaagccctacctctgtaccgtctgcggaaagtccttcagccgctccagctttttgattgaacaccaaaggatacacaccggcgaacggccttatctctgtcggcagtgtggtaagtctttttcccaattgtgcaatctgattcgccatcagggagttcacactggcaataagcctcacaagtgtgatgagtgcggtaaagctttcagtagaaactctggcctgattcagcaccagcgaattcacaccggggaaaaaccttataaatgtgaaaaatgtgataaaagcttttcacagcagaggtctctagttaaccaccagaaaatccatgcagaggtcaagacccaagagacccatgaatgtgatgcttgtggcgaggctttcaactgccgcatcagccttattcagcatcaaaagcttcatacggcatggatgcagtag

SEQ ID NO: 247377 - DNA, 1839 bp, synthetic construct
  misc_feature 1..1839: note = Description of Artificial Sequence: Synthetic coding sequence
  source 1..1839: mol_type = other DNA
atggcgtctcccagccccccaccggagtccaaggaggaatgggactacctggaccccgctcagcgcagtctctacaaggatgtgatgatggagaactacggaaacctggtgagtttagatgttcttaatagagacaaagatgaggagcctactgttaaacaggagatcgaggagattgaagaagaggtggagcctcagggggtgatcgttactcggataaaatcagagatcgaccaagaccccatgggtagagagactttcgaactagtgggtcgtcttgacaaacagcggggaattttcctctgggaaattccacgggagtcgctcacccaagaacagcggatgttcagagaaaacaccaatatcatccggaagaggccgaattccgaagaaaagtgccacaaatgtgaggagtgcgggaagggctttgtgcgtaaagcccacttcatccagcaccagcgcgtccacacaggcgagaaacctttccagtgtaatgagtgtggaaaaagcttctctaggagttccttcgtcatcgaacatcaaagaattcacaccggcgagcggccttatgaatgcaactactgtggaaagaccttttccgttagtagcacattaattcggcatcaacggattcatacaggcgagaggccctaccaatgtaaccagtgtaagcagagtttcagccaacgcagatcactcgttaagcatcagcgaatccacacaggtgagaaaccccacaaatgtagcgattgcggtaaagctttttcatggaaaagccaccttatcgagcaccaacggacccacaccggtgagaaaccatatcactgtaccaaatgtaagaagagcttctcccgaaactctctgctagtggagcaccaacgaatccacactggcgaaagaccgcacaagtgcggcgagtgcggtaaggcattcaggttaagcacgtacctgattcagcaccaaaaaatccacactggtgagaaaccatttctgtgtattgagtgcggtaagtctttcagccgctcatcatttttgatcgaacatcagagaattcataccggcgagagaccctaccaatgcaaagaatgcgggaaatcgttcagccagctgtgcaatctgactcgtcaccagaggatccataccggcgataaaccacataaatgtgaggagtgtggcaaagcattctcgcgatctagtgggctgatccagcatcagcgtatccatacccgcgaaaaaacatacccttacaacgagaccaaagaaagtttcgacccaaactgttcacttgtaattcaacaggaggtttacccaaaggaaaagtcctacaagtgcgatgaatgcgggaagactttttctgtttccgcccatttagtccaacaccagcgtatccacacgggcgaaaagccgtatctttgcacagtttgcggtaaatccttcagcagatctagtttcttaatcgagcatcaaagaatccatactggtgagagaccctatctgtgcagacagtgcggcaagtcattcagccagctatgcaatctcatacggcatcaaggcgtgcacacagggaacaaaccccacaaatgtgacgaatgcggtaaagcttttagtcgcaacagtggccttatccagcatcaaagaatacacacaggagagaagccttacaagtgcgagaagtgcgacaagtccttttcccagcaaagatctctggtcaaccatcagaaaatccatgccgaggtgaaaacccaggaaacccatgagtgtgacgcttgcggcgaggctttcaattgtagaatatctctgatacagcatcaaaagcttcacactgcatggatgcagtag

SEQ ID NO: 247378 - DNA, 1377 bp, synthetic construct
  misc_feature 1..1377: note = Description of Artificial Sequence: Synthetic coding sequence
  source 1..1377: mol_type = other DNA
atggctgcaatgcctctgaaggctcaatatcaggagatggtaacctttgaagacgtcgccgtgcacttcaccaagaccgaatggaccgggctgtctcctgcacagagggccctgtataggagcgtaatgctcgagaatttcggaaatctgacagctctggggtaccccgttcctaagccagctcttatcagcctgctggagcgcggagacatggcctggggcttggaggcccaggacgaccccccagccgagcgtaccaagaacgtatgcaaggacgtcgaaacaaatatagacagcgaatccacgttgatccaggggattagtgaggaacgggacgggatgatgagccatgggcaacttaaaagcgtgccccagcggaccgatttccccgagacacgaaatgtcgaaaaacaccaggatataccaactgtcaagaatatccagggcaaggttccacgtatcccttgtgcccgaaagcccttcatctgtgaggagtgtggaaagtcattttcttatttctcatattacgctcggcaccagcggattcatacaggagagaagccattcgaatgttccgagtgcggtaaggcattcaatggtaatagctccctgatacggcatcagagaattcatacaggggaacgtccttaccagtgcgaagagtgtggccgagcctttaacgacaacgccaatcttattcggcaccagcggattcactctggggatcggccatattactgcaccgagtgtgggaatagcttcaccagctcctccgaattcgtgatccaccaacgaattcacacaggagaaaagccgtatgagtgcaacgagtgtggaaaagctttcgtcggtaactcgcctctcctgagacaccagaagatacacactggcgagaagccctacgaatgtaatgagtgtgggaaatccttcgggcgtaccagccacctgtcgcagcatcagagaatccacacaggggaaaagccatactcctgcaaggtatgtggacaggctttcaacttccacactaagttgacaagacaccagcgcattcactccgaggagaaacctttcgactgtgttgattgcggcaaggccttttccgctcaagaacaactgaagagacacctaaggatccatacccaggagagctcttatgtctgcgacgagtgtggcaaagccctgacatctaagaggaatctgcaccaacaccagcgcattcacaccggcgagaaaccatacgaatgcagcaaatatgaaaaggcatttggaacgagctcccagctgggtcatctggagcatgtttattctggcgaaaagcccgtgcttgatatctgccggtttggcttaccagaattcttcacccctttctactggtag

SEQ ID NO: 247379 - DNA, 1737 bp, synthetic construct
  misc_feature 1..1737: note = Description of Artificial Sequence: Synthetic coding sequence
  source 1..1737: mol_type = other DNA
atggctgaagagtcccgaaagccatcggcgccatctcctcccgaccagacacccgaggaggatctggtcatcgtcaaggtggaggaggaccacggctgggatcaggagagctctctacacgagagcaatcccttggggcaggaggtgttcaggttgaggtttagacagctccgataccaagaaaccttaggcccaagggaggctctcatccagttacgggctttgtgccatcaatggctgagacccgatctgaacacgaaggaacagatcctggaactattggtgctggagcaattcctgaccattctccctgaggagctccagactctggtgaaagagcaccagctggaaaatggcgaagaggtggtgacacttctggaagacctcgagcgccagatcgacatccttgggcgacctgtgtctgcccgtgtgcatggccacagagtcctgtgggaagaagtggtgcactctgcctcagctccagagccacccaatactcagcttcagagcgaagccacacagcacaaatcacccgtccctcaggagtcccaagaacgtgcaatgtccacctcacaaagccccacacggagccagaaaggtagcagtggcgaccaagaaatgactgccactctcttgacagcaggttttcagactcttgaaaagattgaagacatggctgttagtctgatccgtgaagagtggttgctagacccatcacagaaggatctttgccgagataatcggccagaaaactttagaaatatgttttcacttgggggagaaacccggagtgaaaatagggagctcgcctccaagcaggtcatctctaccgggattcaaccccacggcgagaccgccgcaaagtgcaacggagacgtgatcagggggctggaacacgaggaggctcgagacctgcttggaaggctcgaacgtcagagaggtaatcccacacaggagaggagacataagtgtgatgagtgcggtaagagtttcgcccagtcaagcgggctcgttagacactggaggattcatactggcgagaaaccctatcagtgtaacgtgtgcggaaaagcattttcctatcgaagcgccctgctatctcaccaggacatccataacaaggtgaaaagataccattgcaaggagtgtgggaaagccttttcgcagaataccggcctcatactacaccagagaatccacaccggtgagaagccttaccaatgtaaccagtgtggtaaggccttttcacaatctgccggactcattctgcatcaacgtattcactccggggaacggccatatgaatgcaacgaatgcggcaaggccttctctcactctagccacctgatcgggcaccaaagaatccacaccggcgagaagccatacgagtgtgacgagtgcggcaagactttcagacgttcttcccacttaatcggacatcagagatctcacactggggagaagccctacaagtgcaacgagtgcggacgcgcattcagtcagaagagtgggctcatagaacaccaacggatacacactggtgaacgaccctacaagtgcaaggaatgtggtaaagctttcaatggcaacacaggtctgattcaacacctgagaattcatactggggaaaaaccttaccagtgcaacgagtgcggcaaagcgttcatccaacgctcatctctcattcgacatcagcgcatccacagtggagaaaagagcgaatctatttcagtgtag

SEQ ID NO: 247380 - DNA, 1737 bp, synthetic construct
  misc_feature 1..1737: note = Description of Artificial Sequence: Synthetic coding sequence
  source 1..1737: mol_type = other DNA
atggctgaagagagtcgaaagccgtctgccccttctccaccggaccaaaccccggaggaggatcttgtcatagttaaggttgaggaggatcacggctgggaccaggagtcttctctgcatgaatctaatcctcttgggcaggaagtgtttcgccttcgatttaggcagctgaggtatcaggaaactcttggacccagggaggccctgatccagttgcgggctctttgccaccagtggctgaggcccgatttaaacactaaggaacagatcctcgaactgttagtcttagagcagtttctgacaatccttcccgaagagctccaaacattggtcaaggagcatcagctcgagaacggagaggaggtggtaaccctgctggaggacctcgaacggcagatagacatcctcgggaggcccgtatctgccagagtccacgggcatcgtgtgctgtgggaagaggtggtgcactcagccagcgcgccagagcctcctaatacccagctgcagtctgaagccacccagcacaagtctcctgtcccacaggagagccaagagagggccatgtctacatcccagtcgccaactcgttctcaaaaggggagttccggtgaccaggagatgactgctactctcctcactgctggtttccagacactcgaaaagatcgaagatatggccgtgtccctcatccgcgaagaatggctgctagatccctcccagaaggacctgtgtcgcgacaacaggccggagaattttaggaatatgttctctttaggcggtgagactaggtctgagaaccgtgaactagcgagtaaacaagtgatttccacaggaatacagcctcatggcgaaacagcagccaaatgcaacggcgatgtaatccgcggactcgagcatgaagaggcaagggacttgttggggagactggagagacagagggggaacccaacacaggagaggcgacacaagtgtgacgaatgcgggaagtcttttgcacagagttctggcctggtgagacattggaggattcacactggggaaaaaccctatcagtgtaatgtgtgcggaaaggctttttcctatcgctctgcgttgctgagccatcaggacatccacaataaagtcaagagatatcattgcaaagaatgcggcaaggcgtttagccaaaacaccggactcattctgcaccagaggattcataccggagagaaaccttaccagtgtaatcagtgtggtaaggccttttctcaatcagcaggcttaatcctgcatcagcggatccattctggagaacggccatacgagtgtaatgaatgtggcaaggctttctctcattcctctcatctcataggtcaccagagaatccataccggtgagaaaccttatgagtgcgatgaatgcgggaaaactttccgtcgttccagccacctgattggtcatcagcgaagtcacaccggagaaaagccctataaatgtaacgaatgtggacgggcattcagtcaaaaatccggattaatagaacatcagcggattcatacaggcgaaaggccctacaaatgtaaagagtgtggaaaagcgtttaatggcaacacaggtctgattcaacatctgcgaatccatacaggggaaaaaccataccaatgtaatgaatgcgggaaggcattcatccagcggagctcactaataagacaccagagaattcacagcggggaaaagtctgaaagtatttccgtgtag

SEQ ID NO: 247381 - DNA, 477 bp, synthetic construct
  misc_feature 1..477: note = Description of Artificial Sequence: Synthetic coding sequence
  source 1..477: mol_type = other DNA
atggccgaggagagcaggaagccctccgctccctccccccctgaccaaacccctgaggaagatttggttattgtcaaggtggaagaggatcacggctgggaccaggagtcatctttacacgagtccaatccccttggacaagaagtcttccgccttaggttccggcagcttcggtatcaggaaaccctggggccacgggaggcactaatccagttgcgcgctctgtgtcaccaatggctacgcccagacttaaacacaaaagagcagattctggagttactggtcctcgaacagtttctgaccattctgccagaagaactccaaacactggtcaaagaacaccaactcgaaaatggtgaggaagtcgttacattattggaggacctggaacgacaaatcgacatactgggacgacccgtgtcccgcaggagatcccaactagcctacatggacatcggatattccggcagaaggtag

SEQ ID NO: 247382 - DNA, 1185 bp, synthetic construct
  misc_feature 1..1185: note = Description of Artificial Sequence: Synthetic coding sequence
  source 1..1185: mol_type = other DNA
atgaacacaaactcaaaggaggtcctatctcttggggtccaggttcctgaagcctgggaagagctacttaccatgaaggtggaagccaagtcacacctgcagtggcaggaatccaggctgaagcgaagcaacccccttgcacgagagatctttcgacgccacttccgtcaactctgctatcaagaaacacccggaccaagagaggctctgactaggttgcaggaactgtgctaccaatggctgagaccccacgtctctactaaagagcagatccttgacctattggtgctggagcagttcctgtctattctgccaaaggagctgcaaggttgggttcgggagcattgcccggagtcaggggaagaagcagtcatcctcttggaggacctcgaacgggagctggatgagccccagcacgagatggttgctcatcggcacaggcaggaagttctctgtaaggaaatggttccactggcggaacagactcccctgacattacagtcgcaacctaaagaacctcagctgacctgtgacagcgcacagaaatgtcactcaataggagaaacggacgaagtgacaaagactgaggaccgggaactggtccttaggaaagactgccccaagatcgtggaaccccatgggaagatgtttaatgaacaaacatgggaagtcagccagcaagatcccagccacggggaagtgggagaacataaagacagaattgaaagacaatgggggaacttgctcggtgagggccagcataaatgcgatgagtgcggaaagtcttttacacaatcaagcggcttgattcgacaccagaggatccacaccggcgaacggccatacgaatgcaatgaatgtggtaaagcttttagtcgctcgagcggcttgtttaatcatcggggaattcacaacatccaaaagagataccattgcaaggagtgcggcaaagtgtttagccagagcgcgggactaatccagcatcaacggatccacaagggggagaagccctatcaatgctcccagtgctcaaaatcatatagccggagaagcttcttgatcgaacaccaaaggtcgcacactggagagcgccctcatcaatgtatcgaatgcggtaagtcttttaaccgtcattgtaatctcatccgccatcagaagattcacaccgtggcagagctcgtgtag

SEQ ID NO: 247383 - DNA, 126 bp, synthetic construct
  misc_feature 1..126: note = Description of Artificial Sequence: Synthetic coding sequence
  source 1..126: mol_type = other DNA
atgaatacaaactctaaggaggtgctttcacttggggtacaagtgccagaggcttgggaggagcttttaactatgaaagtcgaggcaaagtctcacctacaatggcaggaatcaagactgaagtag

SEQ ID NO: 247384 - DNA, 1185 bp, synthetic construct
  misc_feature 1..1185: note = Description of Artificial Sequence: Synthetic coding sequence
  source 1..1185: mol_type = other DNA
atgaataccaattcaaaagaggtcctctcgctgggggtgcaagtgccggaggcttgggaagagctactgaccatgaaggtggaagcaaaaagtcacctacagtggcaggaaagccgtttgaagaggtccaacccgctagcgagagaaattttcaggaggcactttagacagctctgttatcaggaaaccccagggcctcgcgaagcgctgacgaggttgcaagagctgtgctaccagtggttgagaccccacgtaagtaccaaagagcagatactcgatttactggttctggagcagttcttgagtattctgccaaaagagctgcaggggtgggttagggaacactgccccgaaagcggcgaggaggccgtaatccttcttgaggatctcgagagagaactcgacgaaccccagcacgaaatggtggctcaccgccatcgacaggaggtgctgtgtaaggagatggttcccttggctgagcagacgcccctcacgctccagagccagccgaaggagccccagctgacttgtgatagcgcacagaaatgtcatagcatcggcgaaacagacgaggtcacgaaaactgaggatagagagttggtgctccggaaagactgcccaaagattgtcgagcctcacggcaaaatgtttaacgagcagacgtgggaagtaagccagcaggacccctcccatggggaggtgggggaacacaaggatcgaattgagcgacagtgggggaacctcctgggagagggccagcataaatgtgacgagtgtgggaagagtttcacccagagttctgggctgatccgccatcagagaatccacaccggcgagcgaccctatgaatgtaacgaatgtggcaaggccttcagcagatccagcggcctgttcaatcaccgaggaatccataatattcagaagaggtaccactgtaaggagtgcgggaaggtcttttcccagagcgcagggctgatccagcaccagcggattcataagggggaaaaaccttaccagtgctctcagtgctccaagtcctacagccgcaggtctttccttattgaacaccagaggtcccacacgggagagcgccctcaccagtgtatcgagtgcggcaaaagctttaacaggcactgcaacctgattagacatcagaagattcatacggtggccgaattggtgtag

SEQ ID NO: 247385 - DNA, 1338 bp, synthetic construct
  misc_feature 1..1338: note = Description of Artificial Sequence: Synthetic coding sequence
  source 1..1338: mol_type = other DNA
atgaataccaattctaaagaggtattaagcctgggggttcaggttccggaggcctgggaggaactcctaacaatgaaagttgaagcgaagagccatctccagtggcaagaaagccgattgaagaggagcaatcctctggctcgcgagattttccgacgtcattttagacagctctgttaccaggagacccctgggcctcgcgaggccctgacgcgcttacaggaattatgctatcaatggctaagacctcacgtatcgaccaaggagcagatattggatctgctggtgctggaacagttcctgagcatcctccccaaagagctccaaggatgggtgagagagcactgtcctgagagtggagaagaggcagtgatactgctcgaggatctggagcgagaactcgacgaaccacagcacgaaatggtggcacatcggcaccgtcaggaggtcctctgtaaggagatggtcccgctcgcagaacaaaccccacttacccttcagtcccagccaaaagaacctcagctgacttgtgatagtgcacagaaatgtcacagtataggcgagaccgacctgatcaggtcactgagacgacgagcagtactcatccctcttggcgcacatcttttttccaccgacaccttcctgttctctaagcccgtggtgattccccagcttaagggaggaggagagacctggcccaataaccgcggagtgcttcgtgatgaagtcacgaagacagaagaccgcgaactggtgctgcggaaggactgcccgaaaattgtggaacctcacgggaaaatgtttaacgagcagacgtgggaagtctcacagcaagacccttcacacggcgaggtgggcgaacacaaggatcggatcgagagacagtggggcaatctgctgggtgaaggtcaacacaagtgcgatgaatgcgggaagtcgttcacccagtcctctgggctgattagacaccagaggatccacactggagaaaggccctacgaatgcaacgagtgtgggaaagcattttccagatcttccgggctgttcaaccatagagggatccacaacattcaaaaaagatatcattgtaaggaatgcggcaaggtgttttcccagagcgctggcttaattcaacatcaacggattcacaaaggggagaagccctatcagtgctcccagtgctccaaatcctatagccgcaggagttttcttatcgagcatcaacgctcgcacacaggggaacgacctcatcagtgcattgagtgcggaaagagctttaatcggcattgtaatctgataagacatcaaaagattcacaccgtggcagaacttgtttag

SEQ ID NO: 247386 - DNA, 1821 bp, synthetic construct
  misc_feature 1..1821: note = Description of Artificial Sequence: Synthetic coding sequence
  source 1..1821: mol_type = other DNA
atgactttgctgacatttagagatgtggccatcgaattttccctggaggagtggaagtgcctagatctggcccagcagaatctttacagagatgtgatgttagaaaattatcgcaacttgttctctgttggactgacagtctgtaaacccggtcttattacgtgcctcgagcagcggaaggagccttggaatgtaaaaaggcaggaggctgccgatggacatccagagatgggctttcatcacgccacacaggcctgcttggaacttctgggctcatctgacctgcctgctagtgccagtcaatcagctggcattaccggtgtaaatcaccgagcccagccaggattgaacgtgtcggtagacaagttcaccgccatgtcatcacatttcacgcaggatctgttacccgaacaggggatacaagacgcatttcccaagcgaattctgaggggctacggaaattgtgggctggataacctttatcttcggaaggactgggaatccctggacgaatgcaaactgcaaaaagactataatgggctcaatcagtgctctagcacgacgcattccaagatctttcagtacaataagtacgtcaaaatttttgacaattttagtaacctgcaccgacgaaatatttcaaataccggcgaaaaaccttttaaatgtcaggagtgtggcaagtcttttcagatgttatcatttctgacagagcatcagaaaattcatacgggcaagaagtttcaaaaatgtggggaatgcggtaaaactttcatacagtgtagtcactttactgaacctgagaacattgacacaggggaaaaaccatacaagtgccaggaatgcaacaatgtaataaaaacctgctctgtgctgactaaaaaccgcatctacgcaggaggtgaacactatcggtgtgaggagttcgggaaggtcttcaaccaatgctcccacctgaccgagcatgaacatggcacagaagagaaaccatgtaaatacgaagaatgcagtagcgtgtttatttcctgttcaagcctctctaaccagcagatgatcctggctggcgaaaaactctcgaaatgtgaaacttggtacaagggatttaaccacagccccaaccctagtaaacaccagcgtaatgaaatcggaggtaagccctttaagtgcgaagagtgtgactctatcttcaagtggttctccgatctgacgaagcacaaaagaattcacaccggcgaaaaaccgtataaatgcgatgaatgcggaaaagcctacacccagtccagccacctgtctgagcatcggcgtatccacacaggggagaagccctatcagtgtgaagagtgtggcaaggtgttccgtacctgctcaagcctgagcaatcacaaacggacacacagcgaagagaaaccttacacctgcgaggaatgtggcaatatattcaaacagttaagcgacttgacaaaacataagaagacccataccggggagaagccctataagtgcgacgaatgtggtaaaaacttcacgcagtcctcgaaccttattgtgcacaagcgcatccacacgggcgagaagccctacaagtgtgaggagtgcggcagggtcttcatgtggttttccgatatcactaaacataaaaagacccatacgggagagaaaccctacaagtgcgacgaatgtggcaagaactttactcagagctctaacctgatcgtacacaagcgtattcacactggcgagaagccctataaatgcgagaaatgtggaaaggcattcacccagttttcacatctcaccgtccacgagtccatacatacatag

SEQ ID NO: 247387 - DNA, 1686 bp, synthetic construct
  misc_feature 1..1686: note = Description of Artificial Sequence: Synthetic coding sequence
  source 1..1686: mol_type = other DNA
atggccggagcccaaactttgctgacattccgcgacgttgccatagagttcagcctggaagagtggaaatgcctcgaccttgcacagcagaatctgtatcgggatgtgatgctcgagaattataggaaccttttctccgtgggtctgacggtgtgcaaaccgggtctgatcacgtgtctggaacagcgtaaggagccttggaacgtgaaaagacaggaggcagccgacggtcaccccgcaatgagctctcattttacacaggacctgctgcctgagcagggcattcaggacgcatttcccaagcgcatcttgaggggttacggcaactgcggattagacaatctctatctgcgtaaggattgggagagcctggacgaatgtaaattacagaaagactataatggactgaaccaatgtagctcgacaactcactctaagatcttccaatataacaagtatgtcaagattttcgataacttctccaaccttcaccgcaggaacatttcaaatactggggagaaacccttcaaatgccaggaatgcggaaagtcattccaaatgctgagtttcctaacggaacaccagaaaatacatacaggaaagaagtttcagaagtgcggggagtgtgggaaaaccttcatccagtgctcacacttcactgaaccagaaaacatcgataccggggagaaaccctacaaatgccaagagtgtaacaacgtgatcaagacttgctcagtgctcactaaaaaccggatatacgcaggcggagagcactaccgatgcgaggagttcggcaaggtgtttaaccaatgctcccaccttacggagcatgaacatggaaccgaagaaaagccctgtaaatacgaggagtgttcttctgtgtttatttcctgctctagccttagcaaccagcagatgatcctggcaggggagaagctgagcaaatgtgaaacttggtacaaaggattcaaccacagcccaaatccaagtaagcatcagcgcaacgagattggcggaaagccgtttaagtgcgaggagtgcgacagcattttcaaatggttcagcgacctgacaaagcacaagcggatccataccggcgagaagccgtataaatgtgacgagtgcgggaaagcctacactcaaagtagccatctatcggagcaccgcaggatccataccggcgaaaaaccatatcagtgcgaagagtgcggcaaagtgttcagaacctgtagcagcctgtccaatcataagcgaactcactcggaagaaaagccctacacatgtgaggagtgcgggaatatcttcaaacagctgagcgatctcaccaaacacaaaaagactcacacaggcgagaaaccctataagtgtgatgaatgtggcaagaacttcacacagagctcaaatcttatcgtgcataaaagaattcacactggcgaaaaaccttacaaatgcgaggagtgtggcagagtttttatgtggttcagcgatatcaccaagcacaagaaaacacataccggggagaagccctataagtgcgatgagtgcggcaagaatttcacccagtcttcgaacctcattgtacacaagcgtatccacactggcgaaaagccttacaaatgcgaaaaatgtggtaaagccttcacccagttctcccatctgactgtgcacgaaagtattcatacttag

SEQ ID NO: 247388 - DNA, 1674 bp, synthetic construct
  misc_feature 1..1674: note = Description of Artificial Sequence: Synthetic coding sequence
  source 1..1674: mol_type = other DNA
atgactctcctaactttcagggatgtggcgatcgaattctcactcgaagaatggaagtgccttgatttggctcagcaaaacctctacagagacgtgatgttggaaaattaccggaacctattctctgtgggacttaccgtatgcaagcccggtttgattacctgcttggagcagcggaaggagccttggaatgtgaagaggcaggaagctgccgacggccatcctgccatgtcatctcactttactcaagacctactgccagaacagggaattcaggacgcttttcctaagagaattcttcgtggctacggaaattgtggtttggataatctctacctccggaaagactgggagagcctggacgagtgtaagttgcaaaaagactacaatggcctcaaccaatgctccagcaccactcattccaaaatcttccaatataacaaatatgtaaagatctttgacaatttttcgaacctgcacaggcggaacatctctaatacaggcgagaagccttttaaatgtcaggaatgcggtaagagctttcaaatgctttcgtttcttaccgagcatcagaaaatccatacgggaaaaaagtttcaaaagtgcggtgagtgcgggaagacatttatacaatgcagccactttaccgaacccgagaacattgataccggggaaaaaccgtacaaatgtcaggagtgcaataacgtaatcaagacctgcagcgtactcacaaaaaacagaatttatgcaggaggagagcattatcggtgtgaagaattcgggaaggttttcaaccaatgcagtcatttaacggagcacgaacacggaaccgaggagaagccttgcaaatacgaagagtgcagctcagttttcatttcgtgctccagcctttccaaccaacagatgatactggccggtgagaagctgtccaaatgcgaaacttggtataaaggattcaaccacagtcctaatccgtccaagcaccaaagaaacgagatcggcggtaagcctttcaaatgcgaggaatgcgattctatattcaagtggttctctgacctgactaagcacaaaagaatacacaccggggaaaaaccctataaatgcgacgagtgtgggaaggcctatactcagtcctctcatctttcagaacacagacgcattcatacaggggagaagccttatcagtgtgaggagtgcggcaaagtctttcgaacatgtagttctctatctaaccacaagcgtacccacagtgaggagaaaccatatacgtgtgaggaatgcggtaacatattcaagcagttaagtgaccttacgaaacacaaaaagacgcataccggagagaagccctataaatgtgatgagtgcgggaagaactttacccagagctctaatctgatagtccataagaggatacacactggcgaaaaaccctataagtgcgaagagtgcggaagagtgttcatgtggtttagcgatattaccaaacacaaaaagacccacaccggcgagaagccatacaagtgtgatgagtgcggcaaaaattttacacaatctagtaacttgatcgtgcacaaaaggattcacactggcgaaaagccctacaagtgcgagaaatgcggtaaggccttcacacagtttagccacctgacggttcacgagagtattcatacgtag

SEQ ID NO: 247389 - DNA, 1890 bp, synthetic construct
  misc_feature 1..1890: note = Description of Artificial Sequence: Synthetic coding sequence
  source 1..1890: mol_type = other DNA
atgactttgctgaccttcagggacgtggccattgagtttagtctagaagaatggaaatgcctggatctggctcagcagaacctgtacagagatgtgatgcttgagaactaccgaaaccttttttctgtggggctgactgtgtgcaagcccggattgatcacttgtctcgagcagaggaaggagccctggaacgtgaagagacaggaggccgctgatgggcacccagaaatggggtttcaccatgctacccaggcatgcttagagctcctgggtagttccgacctgcccgctagtgcctcccagagtgcaggtatcaccggcgtgaatcatagagcccagccgggtctgaacgtgagcgtggataagtttaccgccttgtgttcgcctggcgtgttacagaccgtgaagtggttcctggagttcaggtgtattttttcactggcaatgtctagccatttcacccaggacctacttcctgagcaggggatccaggacgccttcccaaagaggattctgcgaggttacggaaattgcggactggataatctgtatctgcgcaaggattgggagtcattggatgaatgcaagcttcagaaagattacaacggccttaaccagtgctcgtccaccacacattccaagatttttcagtataacaaatacgttaagatattcgacaactttagcaatctccaccgccgaaacattagtaacaccggagaaaaacctttcaaatgccaggagtgcggtaaaagtttccaaatgttgtcgttcctcactgagcatcagaagatacacaccggtaagaagttccaaaaatgtggagagtgtgggaagaccttcatccagtgttctcacttcactgagcctgaaaacatcgataccggagagaagccctacaagtgccaggaatgcaataatgtaataaagacctgctcagtcctcacaaagaatcggatatacgccggtggggagcactatcgctgcgaggagttcggcaaggtgttcaaccaatgttcccacctcaccgaacatgaacacggaaccgaggagaaaccttgcaaatacgaagaatgttctagcgtttttatttcatgcagctccctgtcaaaccagcagatgattctggccggtgaaaaattaagcaagtgtgagacatggtataagggatttaaccactcccccaatccgtcgaaacaccagcggaatgagattgggggtaaacccttcaagtgcgaggagtgtgatagtatcttcaaatggtttagcgacttaaccaaacacaaaaggatccacacaggtgagaagccctacaagtgtgacgaatgcggtaaggcttatacacaatcttcacacctctctgaacacagaaggatacacactggtgaaaagccttaccagtgtgaggaatgtgggaaagtcttccggacgtgctccagcctgtcaaatcataagcggacgcattccgaagaaaagccatacacgtgtgaggagtgcggcaacatttttaagcagctaagcgacctcactaagcacaagaaaactcataccggggagaaaccttacaaatgtgatgaatgtggtaagaactttacacagagctccaacctcatcgtgcataagcgtatccatactggcgagaagccttacaagtgtgaagagtgtggccgtgtgtttatgtggtttagcgatataaccaaacataagaaaacccacactggcgagaagccatacaagtgcgatgagtgcggcaagaattttacacagagctcaaatttgattgtgcacaagaggatccatacaggggagaagccatataagtgtgaaaagtgtgggaaagcatttactcagttctcccatttaacggtacacgaaagcatccatacgtag

SEQ ID NO: 247390 - DNA, 1686 bp, synthetic construct
  misc_feature 1..1686: note = Description of Artificial Sequence: Synthetic coding sequence
  source 1..1686: mol_type = other DNA
atggccggagctcagacattgctgaccttccgtgacgtggctattgaattcagcctcgaagaatggaaatgccttgatctcgcccaacaaaacctctacagagacgtaatgcttgagaattaccgcaatcttttttcggttgggcttacagtgtgcaaacctgggttgattacctgcctcgaacagcgtaaggagccgtggaatgtgaaacggcaggaggcagccgatgggcatcccgctatgagtagtcactttacccaggacttgctacccgaacaaggcatccaggatgcgtttcctaaaaggatcctcagaggctacggaaactgcgggctggacaacctgtacctgcgcaaggactgggagtccctcgatgagtgtaaactgcagaaagactataacggcttaaatcagtgttctagcactacccacagcaaaatcttccagtacaacaagtacgtcaaaatcttcgataatttctctaacctgcatagaaggaacatcagcaacaccggggagaagcctttcaaatgccaggagtgtggaaagagtttccaaatgctgtcctttctcactgagcaccagaaaattcacactggcaaaaagtttcaaaaatgtggggagtgcgggaagacattcatacaatgttcacactttacagagccagagaacattgatactggggaaaagccttacaagtgtcaggagtgtaataacgtgatcaaaacttgtagcgtgctaacaaaaaatcgaatatatgcaggtggagagcactatcgctgcgaagagttcggaaaagtcttcaaccagtgtagtcacctgacggaacatgagcacggtacagaggagaagccctgcaagtatgaggagtgtagcagcgtctttatttcctgttcctccttgagcaaccagcaaatgatactggccggagagaaactctcgaaatgcgaaacatggtacaaaggtttcaaccattcgccgaacccaagtaagcaccagcgtaatgagataggcggaaaacccttcaaatgtgaagagtgcgactccatcttcaaatggttctctgatctcaccaagcataagaggatccatactggggaaaagccttataaatgcgatgagtgtggcaaggcatatacacagagtagccatctttcggagcatcgcaggatccacacaggcgagaagccctaccagtgcgaagagtgcggaaaagtgtttagaacatgctctagtctttccaatcacaagcgcacccattctgaagagaaaccgtatacctgcgaggagtgcggcaacatttttaaacaactttctgatctcaccaagcacaaaaaaacacatactggcgagaagccatataagtgtgatgaatgcgggaagaatttcacccagtctagtaacctgatagtccacaagcgtatccacacaggtgagaagccatacaaatgtgaggagtgtggacgggtctttatgtggttcagcgacatcacaaaacataaaaaaacccacaccggtgagaagccttacaagtgcgatgagtgcggcaagaattttacccagagtagcaaccttattgtgcataagcgcattcataccggcgagaagccctataaatgtgagaaatgcggcaaggcctttacccagtttagccatcttaccgtccacgaatccatccatacgtag

SEQ ID NO: 247391 - DNA, 1833 bp, synthetic construct
  misc_feature 1..1833: note = Description of Artificial Sequence: Synthetic coding sequence
  source 1..1833: mol_type = other DNA
atggccggagcacagaccctgttaacttttagagatgttgctatcgagttctctcttgaagagtggaagtgcttagacttagcccagcaaaacctctaccgagatgtgatgctggaaaactataggaacctgttctccgttgggcttacagtgtgtaagccaggcctgattacctgcctggagcagaggaaagagccctggaacgtgaaacgccaggaagccgctgacgggcacccagaaatgggctttcatcatgccacccaagcctgtttggagctgctcggttcatccgatctgcctgcctcggcaagtcagtctgctgggattacaggggtgaaccatagagcccagccaggcctgaatgtctccgtcgataaattcaccgccatgtcttctcattttacccaggacttgctgcccgagcaaggcatccaggatgcctttcccaaaaggatcctaagaggctatggcaactgcggactggataatctctaccttaggaaagactgggagagcttagatgagtgcaaactacaaaaggattacaacgggctgaatcaatgttcctctacgacccactccaaaatcttccagtataacaaatatgtcaagatatttgacaacttttccaaccttcaccgcaggaacatctctaatactggagagaagccattcaaatgccaagagtgcggaaaaagcttccagatgcttagttttctgactgagcatcagaaaatccatacagggaagaagtttcagaagtgtggtgaatgcggcaaaacctttatccaatgctcgcacttcactgagccagaaaacatcgataccggagagaagccttataaatgccaggagtgcaacaatgtgatcaaaacttgttcagtgctgaccaaaaaccgtatctatgccggaggggagcactaccgttgtgaggaattcggaaaagtctttaatcagtgctcccacttgacagagcacgaacacgggaccgaggagaaaccttgtaagtacgaggagtgctcttcagtctttatttcgtgctcctcgctgtctaaccagcagatgattcttgctggggagaaactatcaaaatgcgaaacatggtataagggctttaatcactctccaaatccaagtaagcaccaacgtaacgaaataggcggaaaaccattcaagtgtgaagagtgtgattccatattcaaatggttttccgatctcacgaaacacaaacggatccatacaggggagaagccctacaagtgtgacgaatgtggcaaggcatacacacagagctcacacctgtccgagcatcggaggatacacaccggagagaagccgtaccagtgcgaggagtgcggcaaggtgttcaggacatgcagctcgctttcaaaccataagcgaacacacagtgaagagaagccttatacctgtgaagaatgcgggaatattttcaagcagctctccgacttgacgaaacacaaaaagactcacaccggcgagaaaccctacaagtgtgatgagtgtggcaaaaacttcacacagagctcaaacctgatagtgcataagagaatacatactggagaaaaaccttacaagtgtgaagagtgcggtcgggtgtttatgtggtttagtgacattacaaaacacaagaagactcataccggagaaaaaccgtataagtgcgatgaatgtggaaagaatttcactcagtcctccaacctgatcgtccataagaggatacatactggagagaaaccttataagtgtgaaaaatgcggcaaggcatttacacaattcagccatctaactgtacatgaaagcattcatacatag

SEQ ID NO: 247392 - DNA, 396 bp, synthetic construct
  misc_feature 1..396: note = Description of Artificial Sequence: Synthetic coding sequence
  source 1..396: mol_type = other DNA
atggccggagctcagactctgttaacattcagagacgtggccatagaattcagcctggaggagtggaaatgtcttgatcttgcgcagcagaacctctacagagacgtgatgttggagaattatcgcaacctgttctccgtaggcttaactgtctgcaaacccggactgataacctgccttgaacaacgaaaggagccttggaacgtgaaaagacaggaagcagccgacggacaccctgcgatgtcttcccatttcacacaggacttgctgccggagcagggcatccaggacgcttttcccaaacggattttgcgcggatacggtaattgcggtctagacaatttgtacctgaggaaagattgggaatctctcgatgagtgcaagctgcagaaatag

SEQ ID NO: 247393 - DNA, 348 bp, synthetic construct
  misc_feature 1..348: note = Description of Artificial Sequence: Synthetic coding sequence
  source 1..348: mol_type = other DNA
atggcaggggcacagaccctactgacctttagagatgtggcgatagagttttcacttgaagaatggaagtgtctggacctagctcagcagaacttataccgtgacgtgatgctggagaattaccgaaatctttttagcgtcggactgacggtttgcaagcctgggctgattacatgcctggagcagagaaaagagccgtggaacgtgaagcgtcaggaggccgctgacgggcatcctgaaatgggatttcatcacgccactcaggcctgccttgaactgttgggatcctcagatcttcctgcctctgcctcacagtccgccggtattacaggcgtgaatcatcgttag

SEQ ID NO: 247394 - DNA, 1281 bp, synthetic construct
  misc_feature 1..1281: note = Description of Artificial Sequence: Synthetic coding sequence
  source 1..1281: mol_type = other DNA
atggctgctgtatcaccgacaacaagatgccaggagtccgtgacttttgaagacgttgcggtcgtgttcacagatgaagagtggagccggctcgtcccaatccagcgagacttgtacaaggaggtcatgctggaaaattacaattctattgttagtttgggactacccgttccccagcccgatgtgatcttccagctgaaaaggggcgacaagccttggatggttgatcttcatggcagcgaggaaagagagtggcctgagtcagtgtccctggattgggagactaagccagagattcatgatgcctccgacaaaaagagcgaaggttccctgagggagtgtttaggaagacagagccccctgtgccctaagttcgaggtgcacactccaaacggccgtatgggaactgaaaaacagagtccatcgggcgagaccaggaagaaaagtctgtccagagataagggtctgcgtaggcggcgaagcgccctgagcagggaaatcctgaccaaggagcgccaccaggagtgctcagactgtgggaagaccttttttgaccacagctctctgactcgacaccagcgaactcacacaggggaaaagccctatgactgcagggagtgtgggaaagccttttcccacagatcttccctaagccggcatctgatgagccacacaggggaaagcccctacgagtgctccgtttgtagtaaagctttcttcgatagaagcagcctgacagtgcaccagcgtattcacactggggaaaagccatttcagtgcaacgaatgtggtaaagcctttttcgaccgatctagcctaaccagacatcagagaatccatacaggggaatcgccatatgagtgccaccaatgtggcaaagccttttcacagaaaagcatcctgacaagacatcagttgatccacactgggagaaagccgtacgagtgcaatgagtgcggaaaggctttttacggtgttagctccttgaacagacaccagaaagctcacgctggagatccccgatatcagtgtaatgaatgcggcaaagcctttttcgacaggtcttctctgacacaacatcagaaaattcacaccggggataagccttacgagtgtagcgagtgtggaaaagctttctcacagagatgccgcctaacgcggcatcaacgagtgcacacaggggagaaacccttcgagtgcaccgtatgtggcaaggtgttcagtagcaagagctccgtcattcagcaccagagacgctatgcgaagcagggaatcgattag

SEQ ID NO: 247395 - DNA, 1155 bp, synthetic construct
  misc_feature 1..1155: note = Description of Artificial Sequence: Synthetic coding sequence
  source 1..1155: mol_type = other DNA
atgctagagaactataactctatcgtgtctttgggcctgcccgtgccccagcccgacgtaatatttcagctcaaacgcggagacaagccttggatggtagacctccatggaagcgaggaacgggagtggcccgagtccgtgagtctcgactgggagactaagcctgagatacacgatgcctccgataagaagagcgagggtagcctgcgcgagtgtcttgggagacaatcccccctgtgccccaagttcgaagtgcacactccaaacggaagaatgggcaccgaaaagcagtcacccagcggagagaccagaaaaaaatctttatcaagggataaaggcctccgccgaagacgtagtgcactgtctagggagatcctgaccaaagagcgccaccaggaatgctccgactgcgggaaaaccttctttgaccacagttctctgaccagacatcagagaacgcacacaggggagaaaccctacgactgtcgagagtgtggcaaagcttttagccataggagcagtctttcccgccacctgatgtcccacaccggcgagtcaccgtacgaatgctctgtttgcagtaaggctttctttgaccggagcagcttgacggtgcatcagaggatacacacgggcgaaaagcccttccagtgcaatgagtgcgggaaggcattctttgatcggtccagtctgaccaggcaccagcgaatccatactggagagtcaccctatgagtgtcatcaatgcggaaaggctttctcccagaagtcaatacttacccggcaccaactcattcataccggaaggaagccctacgagtgtaacgaatgtggcaaggccttctatggcgtgtctagccttaaccgccaccaaaaagcgcacgcgggagatccgaggtaccagtgtaatgaatgtggcaaggccttctttgaccgctcttctctaacacagcaccagaaaatccataccggcgacaaaccctacgagtgttccgaatgtggtaaggctttcagccagaggtgcagactcactaggcaccagcgcgtgcacactggggagaaaccgttcgagtgcacggtatgtggtaaggtgtttagctcgaagagctccgtgatacaacatcagaggcgctacgccaaacagggaatcgactag

SEQ ID NO: 247396 - DNA, 1041 bp, synthetic construct
  misc_feature 1..1041: note = Description of Artificial Sequence: Synthetic coding sequence
  source 1..1041: mol_type = other DNA
atgctcgaaaattataattcgatcgtgagtcttgactgggagactaaaccagagattcatgacgccagtgataaaaagtccgagggctcacttcgggagtgtctgggcagacagagtcccttgtgtcccaagttcgaggtgcacacaccaaatgggaggatgggcactgagaaacagagcccgtctggagaaacaagaaagaagtcgctaagtagagataaggggctccgtcgtaggcggagtgcgctgtctagagaaattctgaccaaggagagacaccaggagtgctcagattgcgggaagacgttctttgatcactcttctctaacgcggcaccaaaggacgcacacaggcgaaaaaccctatgactgcagagaatgcggaaaggcattctctcaccgttcatccctctcacgacatcttatgtctcataccggcgagagcccttacgaatgtagcgtatgctcaaaagctttctttgatagaagtagcctgacggttcatcagagaatacacactggggaaaagcctttccagtgcaacgaatgtggcaaagctttcttcgatcgcagcagcctgacaagacaccaacgtatccataccggagaatcaccttatgagtgtcaccagtgcgggaaggcattctcgcagaagtctatccttacgcggcatcaactgattcatacgggaaggaagccttatgaatgcaatgagtgtggtaaggcattttatggggtctctagtctcaacagacaccaaaaggcccatgcgggagatccacgataccagtgcaatgaatgtggcaaagcttttttcgacaggtcttccctgactcagcaccagaaaatccatactggtgataaaccatacgagtgctctgaatgcggaaaggccttcagccaacgatgccggctgacacggcaccagcgtgtgcatactggagagaagcctttcgagtgtactgtctgtggaaaggtattttcatcaaagtccagcgttattcagcaccaacgcaggtacgccaagcaagggattgattag

SEQ ID NO: 247397 - DNA, 1320 bp, synthetic construct
  misc_feature 1..1320: note = Description of Artificial Sequence: Synthetic coding sequence
  source 1..1320: mol_type = other DNA
atggcagcagtgagtccaacaacccgttgccaggagagcgtcaccttcgaggatgttgcagtggtgtttacggacgaggagtggagccgcctggtaccaattcagcgagacctctacaaggaggtcatgctggagaactataacagtatcgtcagtctgggtctgccagtaccacagcccgatgtgatctttcagttaaaaaggggcgacaaaccttggatggtcgacctgcacggctctgaggaaagagagtggcccgagagtgtgtctttggcacaggagaaaaactgtatttgcttcctattcgtccccgactgggaaaccaagcccgaaattcatgatgcttccgacaaaaaatcagaaggctcccttcgtgaatgtctgggacggcaaagccctttgtgtcctaagttcgaagtacatacgcctaacgggcgaatgggtaccgagaaacaaagtccgagcggcgagacaagaaaaaagtctttatctcgagacaagggactccgtcgcagacggtctgccctgtcacgcgagatcctgaccaaagagcggcaccaggaatgtagcgattgcgggaagacattttttgatcacagctctctcacgcgccaccagcgaacccacactggcgaaaaaccctacgattgtagggaatgtgggaaggccttttcgcatagatcaagtttgagtcgacacctgatgtcacacactggcgaaagtccatatgagtgctcagtgtgttcaaaggccttcttcgataggtcatccctgacagttcaccagagaatccacacaggcgaaaagccctttcagtgtaacgaatgcggtaaagcatttttcgacagaagctcgttgacccgccaccagcgaatacacacaggagaatctccttacgaatgccaccaatgcgggaaggcctttagtcaaaaatcgatcttgacacggcaccagctgattcacaccggtcgaaagccatacgagtgtaatgaatgcggtaaagccttctacggagtcagctccctaaaccgacaccagaaagctcatgcgggagatcccaggtaccaatgcaatgagtgcgggaaagcttttttcgacaggtcatcattgacgcagcaccaaaaaattcacaccggcgacaagccttatgaatgcagcgaatgtggcaaagccttttcgcagcgatgtcgcttgactaggcatcagagggtgcatactggcgagaaacccttcgagtgtaccgtttgcgggaaggtattcagtagtaaaagcagcgtcattcaacaccaacgcaggtatgcaaaacaaggtatagactag

SEQ ID NO: 247398 - DNA, 1611 bp, synthetic construct
  misc_feature 1..1611: note = Description of Artificial Sequence: Synthetic coding sequence
  source 1..1611: mol_type = other DNA
atgatgttccaagatagcgtggccttcgaggacgttgcagtgtccttcacccaggaggaatgggccctgctggacccgagtcagaagaatctgtatcgagatgtcatgcaggagacctttaagaatttaactagcgtcggtaaaacatggaaagtacagaatattgaggacgagtacaagaacccacggagaaacctgtcattgatgagggaaaaactgtgtgaatctaaggaatctcaccactgcggcgaatcttttaatcagattgccgatgatatgctgaatcgcaaaaccctgccaggcattaccccatgcgagtcaagcgtgtgcggtgaggtggggacaggtcactccagcttgaatactcacataagagcagacacaggccacaagagctcagaataccaagaatacggagaaaatccctaccgtaataaggaatgcaagaaggcctttagctatctcgacagtttccaaagtcatgataaggcttgcacaaaagaaaagccgtacgatgggaaagagtgtacggagacatttattagccactcctgtattcaacggcacagggtgatgcacagtggagatggtccctacaagtgtaagttctgtggcaaggcattttactttctgaatttatgtctgatccatgagagaattcacactggcgtgaagccctacaagtgtaaacagtgtggaaaagccttcactcgatcgacaacactgccggtccatgaacgaacccatacaggagtgaatgccgacgaatgcaaagagtgtgggaacgccttctcttttccgagcgaaattcgacggcacaagcgcagtcacaccggcgaaaagccatatgagtgcaagcagtgtgggaaggtgtttatatctttctcatccattcagtaccataagatgacacataccggcgagaagccttacgagtgcaaacagtgtggcaaagccttccgctgtgggtcccacctgcaaaagcatggtaggacccacactggggagaagccttatgaatgtcggcagtgtggcaaggccttcagatgcacatcggatctacaaaggcatgagaaaacccatacagaggataaaccttacggctgcaagcaatgcgggaaggggtttcggtgcgcttcacagctgcagattcacgagaggacccatagcggcgaaaagcctcacgagtgtaaagagtgcggaaaagtgttcaaatactttagtagcctgcggatccacgagagaacacatactggagagaaacctcatgagtgcaaacagtgtggcaaagcattccggtacttttcatcactgcatatccatgagcggactcacaccggagacaagccttacgagtgtaaggtgtgcgggaaagcttttacctgcagcagctctattcgctaccatgagcggacgcacactggggaaaagccttatgagtgtaaacactgtggcaaggccttcatttcgaactatattcggtatcacgagcgaacccatacgggagaaaagccgtaccaatgtaagcagtgtggaaaagcttttatcgttccagttcatgtggagaatatgaaggaactgataccccttatagatgagaaatccttctag

SEQ ID NO: 247399 - DNA, 1599 bp, synthetic construct
  misc_feature 1..1599: note = Description of Artificial Sequence: Synthetic coding sequence
  source 1..1599: mol_type = other DNA
atgatgttccaggactctgtggcctttgaagatgtggccgtgtcctttactcaggaggagtgggcattgctggacccatcacagaagaacctctatcgcgatgtgatgcaggagaccttcaaaaacctcaccagcgtggggaagacatggaaagtccagaatatcgaggacgagtataagaaccccagacggaacctctcgcttatgcgagaaaagctttgcgagtccaaggaatcacatcattgtggcgagagcttcaaccaaattgccgacgatatgctgaatcgaaagaccctccccggtatcacaccctgtgagagcagcgtctgcggagaagtaggtacaggacacagttcgctcaacactcacattagagcagacacaggacataagtcatctgagtatcaggagtacggagaaaatccctacaggaacaaggagtgcaagaaggctttcagttacctggattcttttcaaagtcacgataaagcctgcactaaagaaaaaccctacgatggcaaagagtgcacagagacttttattagccacagctgcattcagaggcatcgcgtcatgcacagcggcgatggtccctacaaatgtaagttttgcgggaaggctttttacttcctcaacctgtgtctgatccacgaacgaatccacacaggtgtgaaaccatacaaatgcaagcagtgcggaaaagcctttacacggagcactacgttaccggtacatgagagaacccatacgggagtcaatgccgatgagtgcaaggagtgtgggaacgctttcagctttcctagtgagataaggcggcataaacgctctcacaccggcgaaaaaccctacgagtgcaagcaatgcgggaaagtgttcatatcctttagcagcatccagtatcacaaaatgacacacacaggcgagaaaccctacgaatgtaaacaatgtggcaaagcatttagatgtggttcacatttacaaaagcatggacgcacccacactggagagaaaccctacgaatgtcgccagtgcggaaaggcatttcgatgcacctccgatctgcagcgacatgagaagactcatacagaagacaagccttatgggtgtaagcaatgtgggaagggatttcgatgtgcctctcagctgcagattcacgagaggacccatagcggcgagaaaccacacgaatgtaaggaatgcggaaaagtgttcaagtacttctcctcgctccgcatacacgaaagaactcatactggggagaagccgcacgagtgcaaacagtgcgggaaggcattccgatatttttccagtctgcatatccacgagagaactcatacaggcgataagccttacgagtgcaaagtctgtggcaaggcctttacctgttccagctcaatcagataccacgagcgaactcacaccggcgaaaagccatacgaatgtaagcactgcgggaaagcctttattagcaactacatcagataccacgagcgaacgcacaccggcgagaagccatatcaatgtaagcagtgtggaaaagcatttattcgagctagttcctgtcgcgaacacgaacgcactcacactattaaccgatag

SEQ ID NO: 247400 - DNA, 1185 bp, synthetic construct
  misc_feature 1..1185: note = Description of Artificial Sequence: Synthetic coding sequence
  source 1..1185: mol_type = other DNA
atgatggcggcaaaagtcgtgccaatgccacctaaacccaagcaaagcttcattctgcgagtaccgccagactcaaaactcggccaagatcttctccgcgatgccactaacggtcctaaaactattcaccagcttgttctggaacactttttaactttcctgcccaaaccaagtctggtacagcccagtcagaaagtcaaggagactttggtgattatgaaagatgtgtctagttctctccagaatagagttcaccccagaccactagtaaagttactgcccaagggcgttcaaaaagaacaggagaccgtttctctataccttaaggctaaccccgagctggtggttttcgaggatctgaatgttttccactgtcaggaagaatgcgtatcgttggatcctacacagcagttgacatccgagaaggaagacgacagcagcgtgggcgagatgatgctgctggctgtgaatggctccaacccggagggggaggatcccgaacgggagcccgtggaaaacgaggactacagggaaaaatcgagtgatgatgacgagatggacagcagcttagtttcccagcaaccaccggacaaccaggaaaaagagagactgaacaccagcataccacaaaagcggaagatgagaaacctcttagtcacgatcgaaaatgatacccccttggaagaactgtcaaagtatgtggacattagcatcatcgctctgaccagaaatagacgcacccgccgatggtacacatgcccactctgtgggaagcagttcaacgagtcgtcctacttgatatcacaccagcggacccacacaggcgaaaagccctacgattgtaaccattgtggcaagagtttcaatcataagaccaacctgaataagcacgagcgaattcacacaggtgaaaagccctacagctgttcccagtgcggaaagaacttccgtcagaattctcacaggagcaggcatgaagggatccacatcagagagaaaatttttaagtgcccggagtgcggcaaaacttttcccaagaacgaagagttcgttctccacctgcagtcccatgaggctgaacgcccttatggttgcaagaagtgcggccgtagattcggcagactgtctaactgtactagacatgagaagacccacagcgcttgtaagacacggaagcaaaagtag

SEQ ID NO: 247401 - DNA, 1188 bp, synthetic construct
  misc_feature 1..1188: note = Description of Artificial Sequence: Synthetic coding sequence
  source 1..1188: mol_type = other DNA
atgatggctgcgaaagtcgtccctatgcccccaaagccgaaacagtcatttatattaagagtgccccctgactctaaactgggccaggacctgttgcgggacgctacaaacggcccaaaaacgatacaccagttggtcctcgaacattttctcacttttttaccaaagccaagtctagtgcagccatcccagaaagtgaaggagaccctagttatcatgaaggatgtctcttccagccttcagaacagagtgcacccaaggccccttgttaaactgttgcccaaaggcgtgcagaaggaacaggagacagtgtctctgtatctgaaggctaatccagaagaactggttgtgttcgaagatctgaatgtgtttcattgtcaagaggagtgcgtctcgctagatccaacacagcagctgaccagtgagaaggaagacgactcctcagtcggagagatgatgctgcttgccgtgaacggaagcaacccggagggggaggaccccgagcgggaaccggtagaaaacgaggactacagagagaagtcctctgatgatgatgagatggactctagtctggtgtctcaacaacccccagacaaccaagagaaggagcgcctgaacacctcaattccacaaaaacgcaaaatgcgaaacctgctcgtcacaattgagaatgacacacctcttgaggaattgtccaaatacgtggacattagcataatcgcacttacccgcaaccgcaggaccagaagatggtatacttgccccttatgcgggaagcagtttaatgaatcttcatatttgatctcccaccaaagaacacacaccggagagaaaccttatgactgcaaccattgtgggaagtcttttaaccacaaaacaaacctcaacaaacatgagcggattcacacaggagagaagccctactcctgctcgcaatgtggaaagaacttcaggcagaatagtcatcgctctcggcatgaaggtatccatatacgcgaaaagatcttcaagtgtccagaatgtggaaagacatttcccaagaacgaggaatttgtgctgcaccttcaaagtcacgaggcagagcgcccttacgggtgcaagaaatgtggtcggcgatttggtcgcctttctaattgtacccggcacgagaaaactcattccgcgtgtaaaacccgcaaacagaaatag

SEQ ID NO: 247402 - DNA, 1185 bp, synthetic construct
  misc_feature 1..1185: note = Description of Artificial Sequence: Synthetic coding sequence
  source 1..1185: mol_type = other DNA
atgatggctgccaaggttgtgccgatgcctccaaagccgaaacagagctttattttgcgagtgccacctgatagtaaacttggccaagacttgctgcgggatgccaccaacgggcctaaaactattcaccagctggtgcttgaacattttctcaccttcctacccaagccatcactcgtgcagccttctcagaaggtcaaggaaaccctagtcattatgaaggacgtgtcgagttctctccagaatcgcgtgcacccacggcctttagttaagttactgccaaagggcgttcagaaggaacaggaaacggtatccctctacctgaaggctaatccagaggaattggtagtattcgaagatttgaacgtgttccattgccaggaagaatgtgtgagcctagatcctacacaacagctgaccagcgagaaggaggacgattcttccgttggcgaaatgatgctgttagtgaacgggtctaatcctgagggcgaagaccctgagcgggagccagtggagaatgaagactacagggaaaagtcgtctgatgatgacgaaatggactcttccctcgtcagtcagcagcctcctgataatcaggaaaaggagcgcctgaatacctccatcccacagaagagaaagatgcgcaacctgctagtcaccatcgagaacgatacccccttagaggaactaagcaaatacgtcgatattagcatcatcgccctgaccagaaaccgtaggactcgaaggtggtatacttgtccgctctgtgggaagcagtttaacgaaagtagctatctgatatcacaccaacggacccatacaggagagaaaccatatgattgcaaccattgtggaaaaagctttaaccataagaccaacctgaacaagcatgagaggatacacaccggcgaaaaaccatatagctgttcccaatgcggcaaaaactttagacagaattcacacagatccaggcacgaaggcatccacatcagggaaaaaatcttcaagtgcccggaatgcggcaagacattcccaaagaacgaggaatttgtactccatctgcagagtcatgaagccgagcgaccttatggttgcaagaagtgcggtaggcgatttggaagactcagcaattgcaccagacacgagaagacccacagtgcatgcaagacaagaaagcagaagtag

SEQ ID NO: 247403 - DNA, 1185 bp, synthetic construct
  misc_feature 1..1185: note = Description of Artificial Sequence: Synthetic coding sequence
  source 1..1185: mol_type = other DNA
atgatggcagcgaaggtggtgccaatgcctccaaagcccaaacagtctttcattctcagagtgccacccgatagcaagctgggtcaggatttactacgcgatgctacaaatggccctaagaccatccatcagttggttctcgagcacttcctgacatttttacctaagccaagtctagtacagccctcccagaaagtgaaggaaaccctcgtgattatgaaagatgtaagctcatccttacagaaccgagtgcatcctagaccattagtgaaactgctgcccaaaggcgtgcaaaaggaacaggagaccgtctctctttatttgaaagccaatcctgaggaactggtggtgttcgaggacttaaatgtgttccattgtcaggaggagtgcgtcagcctggatcccacacagcaactcacatcagagaaggaagatgatagtagcgttggtgaaatgatgctgctcgtgaatgggtccaatccagagggtgaagatccagaacgagaaccagttgagaacgaagattatcgcgagaaatcatccgatgacgatgagatggactccagtctggtgagccaacagcctcctgacaatcaggaaaaggaaagactaaacacctcaattccccagaaacgcaagatgcgtaacctactagtaaccatagagaatgatacccccctagaagaattgagtaagtacgttgacatatcaataatcgctctcaccagaaaccggaggacccgacggtggtatacatgtcccctctgtggtaaacaattcaatgaatctagttatctgatttcacaccaacgaacgcatacaggcgagaaaccttacgattgtaatcactgcgggaagagctttaatcacaagactaacctcaataaacacgagcgtatacacaccggagagaaaccatattcatgtagccagtgcgggaaaaacttccgacaaaactcccacagaagtcgccacgagggcatacacatcagggaaaaaattttcaaatgtcctgagtgcggcaagacctttccaaaaaatgaggaatttgtcttgcacctgcagtcccatgaggcagagagaccatatgggtgcaagaaatgcggccgaaggtttgggagactcagcaactgtactaggcacgagaagacccactctgcttgcaagacgaggaaacaaaagtag

SEQ ID NO: 247404 - DNA, 1188 bp, synthetic construct
  misc_feature 1..1188: note = Description of Artificial Sequence: Synthetic coding sequence
  source 1..1188: mol_type = other DNA
atgatggctgccaaagtcgttcccatgccaccaaagcccaaacagagtttcattttgcgcgtgccccctgacagcaagcttggacaggacctgctcagggacgccaccaatggacctaaaacgatccaccagctggtgctagaacacttcttgaccttcctgccaaaaccatcactcgtgcaacctagtcaaaaggttaaggagacactggtgatcatgaaagacgtttcatcttcactgcagaatagagtgcacccacgacccctggtcaaactcctgccgaaaggggtacaaaaggaacaggagactgttagtctgtacttgaaggctaatccagaagaactcgtggtctttgaagacctgaatgtctttcactgccaggaagagtgtgtcagccttgacccgacccagcagttaacgagcgagaaggaggacgacagcagcgttggagagatgatgctgctcgcagtgaacgggtctaacccggaaggagaagatcctgaacgagagccggttgagaacgaggactatagagaaaagtcctctgatgatgacgagatggactcctctctggtctctcagcagcccccagacaatcaggagaaagagaggctgaacacgagcatccctcaaaagagaaaaatgcggaacttactggtcacaatcgaaaacgacacacccctggaagaactttctaagtatgtggatataagtataatcgccctgaccagaaataggagaactcgaagatggtatacctgtccactctgtgggaaacagtttaatgagtcttcctatctgatctcccaccaacgtactcataccggggagaagccttacgactgcaatcattgtggtaaaagtttcaaccataaaacaaacctaaataaacatgaaagaattcacactggggagaagccatactcgtgcagccagtgcggtaagaacttcaggcagaatagccacaggtcgcgccacgagggcatccacatcagagaaaagatattcaagtgtcccgagtgtgggaaaacgttccctaagaatgaggagttcgtactgcacctgcagagccacgaagcggaacgcccatacggatgtaagaagtgtggcaggagattcggcagactgagcaattgcaccagacatgaaaagactcactccgcgtgcaaaacacgcaagcagaaatag

SEQ ID NO: 247405 - DNA, 1947 bp, synthetic construct
  misc_feature 1..1947: note = Description of Artificial Sequence: Synthetic coding sequence
  source 1..1947: mol_type = other DNA
atggcaacagccgtggaaccagaggaccaggacctatgggaggaagagggaatcctaatggttaaactggaagatgatttcacgtgccgcccagaaagcgtgctgcaacgggacgaccccgtgttagaaacatctcaccagaattttcggaggttccgctaccaagaagctgctagccctcgcgaagccctcattcggcttcgggagttgtgccaccagtggctgagacctgagcgacgaaccaaggagcagatcctggaactgctggtactggagcaatttcttaccgtgttgcccggagagctgcaatcgtgggttcgcggacagaggcccgagtctggggaggaggcggtgacactggttgaagggctacagaaacagcctcgccgtccccgtaggtgggtgacggtccatgtgcatggacaggaagtactgtcggaagaaacagtgcatcttggggttgagccagagagtccaaatgaattacaggacccggtgcagtcaagcacacctgagcaatcaccagaggagacaacacaatctcccgacctgggagctccagcagaacagcgaccacatcaggaggaggaactgcaaactctgcaggagagcgaggtcccagtacccgaggaccccgatctgcctgccgaaagaagtagcggcgactccgagatggtggccctcctcacagctttatctcagggcctggtaacttttaaggatgtggctgtatgcttctctcaagaccagtggagcgatctggaccctacacagaaagaattctacggcgaatacgtgcttgaggaagactgtggtatcgtggtctcccttagttttcccataccaagacccgatgaaatttctcaggttcgagaggaggagccctgggtacccgatattcaagagccccaggaaacccaagagccagaaatcttaagtttcacttatacaggcgataggagtaaggatgaagaggaatgcctggagcaagaagacctttcactggaagatattcatagacctgttctcggcgagccggagattcaccaaacgcccgactgggaaatagtctttgaagataatcctggaagactgaatgagagacggttcggcacgaatatcagccaggttaattccttcgttaacctccgcgagaccacccccgtgcacccacttctggggagacatcacgactgctctgtgtgtgggaagagcttcacctgcaatagccacctggtgcggcatctgcgaacccacacgggggagaagccttacaagtgtatggagtgcggcaagtcgtatacacgaagcagccacctggccaggcaccagaaagtacacaaaatgaacgccccatacaaatatcctctgaaccgcaagaatctcgaggagacttcaccagttactcaggccgaacgcacgcccagtgtggaaaagccctacagatgtgacgactgcggaaaacactttagatggacttccgacctcgtcaggcaccagagaacacacacgggagagaagccatttttttgtacaatctgcggcaaaagcttttcacagaaatccgttctgaccactcaccagcgtatccatctgggaggtaaaccatacctttgcggggagtgtggagaggatttctctgaacataggcgctatcttgcccaccggaaaacgcacgccgcagaggagctctatctttgctccgagtgtggcaggtgctttactcattccgcagcctttgccaaacacctgaggggacacgcctcagtgcgcccttgccgatgtaatgaatgtgggaagtcattctctcgcagagaccacctcgtgcggcatcagaggacacatactggggaaaaacccttcacgtgccctacttgcgggaaatctttctcccggggttaccatctgatccggcaccagaggacccacagtgaaaagacctcttag

SEQ ID NO: 247406 - DNA, 1947 bp, synthetic construct
  misc_feature 1..1947: note = Description of Artificial Sequence: Synthetic coding sequence
  source 1..1947: mol_type = other DNA
atggctaccgctgtcgaaccggaagatcaagatctctgggaggaagaggggattctcatggtgaagttggaggacgacttcacttgcaggcccgaatcagttctgcagcgcgacgatcccgtgttggagactagtcaccagaactttcggaggtttaggtatcaggaggccgcatcccccagagaagccttgatccgtctgagagagctctgtcaccagtggctcagaccagagaggcgcaccaaggagcaaatccttgaactgctggttttagagcagtttttaactgtgcttccgggtgagctgcagtcttgggtgcgtggacagcgacctgaatctggtgaagaggccgtgacccttgtggaaggcctgcagaagcagcctcggaggcctcggagatgggtgacagtacatgtacacgggcaggaggtgctgtcagaggaaacggtgcatctcggtgtggaacccgagtctccgaacgagttgcaggaccccgtgcaatcgagcacgccagagcagagccctgaagagacaacacagtctcccgatctgggtgccccagctgagcaaagaccccatcaggaagaagagctgcagacattacaggaatcagaggtcccagtccccgaggaccccgacttgcccgctgaacggtcctctggtgacagcgagatggtagcactccttacggctctgtctcaagggctggtgacatttaaggatgttgctgtttgcttcagtcaggaccagtggtcagacttagatcccacacagaaagagttctacggggagtatgtccttgaagaggactgtgggattgtggtgtccctgtcattccccattcctcggcctgatgagatatcccaagtaagggaggaggagccgtgggtgcctgatatccaggaacctcaggaaacccaggaacctgaaattctgagtttcacctatacaggtgatagatccaaggacgaagaggaatgtcttgaacaggaggatttaagcttggaggatatccatcgaccggtgctgggcgagcccgaaatccatcaaacacctgattgggagatcgttttcgaagataatccgggacggctcaacgagcgacgatttgggaccaatatctcacaggtcaactcattcgtgaacctaagagagaccacccctgtgcatcccttattaggcaggcatcacgattgcagcgtctgtgggaagtcctttacatgtaatagccacctcgtgcggcacctacggacccacaccggagagaagccgtataaatgtatggagtgcggcaagtcatacactcgtagttcgcatttagctagacatcaaaaagtacacaaaatgaatgcaccgtacaaataccccctcaacaggaaaaacctcgaagagacatcccccgtgactcaggccgaacgcactccgtccgtagagaaaccgtacagatgtgacgattgcggcaagcattttcggtggacaagcgatctcgtgagacatcagaggacccacacaggagaaaagccctttttttgtacaatctgtggcaagagtttcagtcaaaagtcagtattaaccacacatcaaaggattcacctgggcggaaagccctacttgtgtggcgagtgcggcgaagatttttccgaacatcggaggtaccttgcgcacaggaaaactcacgcagctgaagaactgtacctgtgcagtgagtgtggtagatgctttacacactcagcagcctttgctaagcatcttcgcggacacgctagtgtacgcccttgcaggtgcaatgagtgtggtaagtccttctcaaggagggatcatcttgtgcgccaccagaggacacacaccggcgagaagcccttcacatgtcccacatgcgggaaatcattctcaaggggatatcatctcatccgccaccagaggacccactccgagaagacatcttag

SEQ ID NO: 247407 - DNA, 1947 bp, synthetic construct
  misc_feature 1..1947: note = Description of Artificial Sequence: Synthetic coding sequence
  source 1..1947: mol_type = other DNA
atggcaacagctgtagaacctgaagaccaagatctgtgggaggaagaggggatacttatggtgaagttggaagatgacttcacgtgcaggcctgagagcgtcttgcaaagagacgatcccgttctagaaacatcccaccagaattttcgcagattccgataccaggaagcggcatcccccagagaggcacttattagactgagggaactttgtcaccagtggttacgccctgaacgaaggacgaaagagcagatcctggaactgttggtgctggagcagttcttgaccgtgctgcccggagagctgcagtcatgggtgagaggccagcgaccagagagtggtgaggaagccgtgaccctggtcgagggactgcagaaacagccgagacgtccacggcgatgggtcacggtgcacgtccacggccaagaggtgctgagcgaggaaaccgtgcacctgggcgtcgagcctgaatctcccaacgagctgcaagatccagttcaaagctctacccctgagcagagccccgaggagacgactcagagcccggaccttggggctcccgctgagcagaggcctcaccaagaggaggaattacaaaccctgcaggaaagtgaggttccggtaccagaggaccctgacctacctgctgaaagaagcagcggcgactcagagatggtggccctgctgaccgccctcagccagggtttagtaactttcaaggatgtggccgtatgcttcagtcaagatcaatggagcgatctcgatccaacacaaaaggaattctatggcgagtatgtgctcgaagaagactgtgggatagtcgtaagcctcagtttcccaatccccagacccgatgaaatcagccaggttagagaggaagaaccctgggtgcctgacatacaggagccacaggaaacccaggagccggagatcctatcattcacatatacgggagaccgatccaaagacgaggaggaatgtctggagcaggaggacctttcactggaggacatccatcgccctgtccttggggaacccgaaatccaccagacaccggattgggagatcgttttcgaggacaacccagggaggcttaacgaaaggcgcttcgggactaacatttctcaggtaaactctttcgtaaacctccgcgagaccaccccagtccaccctctcctgggtcggcaccatgattgtagcgtgtgcggcaagagctttacctgtaatagccacctggtgcgacaccttagaacacacacgggggagaagccctataagtgcatggaatgtgggaaaagctatacacgttcttcacacctcgcacggcatcagaaagtgcataaaatgaacgccccttataagtaccctctgaacagaaagaacctcgaagaaacatcccccgtcacgcaggctgagcgcaccccatcagtagaaaagccttatcggtgcgacgattgcggtaaacatttccgttggaccagcgacctggtcagacaccagcggacacatactggagagaagccatttttttgtaccatatgtgggaagtccttctcccagaaaagcgtgctcaccactcatcagcgcatccatttaggcggtaaaccatatctctgtggtgaatgcggcgaggatttttctgaacacagacgatacctggcccatcgcaaaacacacgcggcagaagaactgtacttgtgcagcgaatgcggtcgttgcttcacacacagtgcggcatttgcgaagcacctgagagggcacgcatcagtccggccatgtaggtgtaatgagtgcgggaagtccttcagccgcagagatcatctggtgcgacaccagcgaacgcataccggtgaaaagccattcacatgccctacgtgcggaaaatcattcagccggggttatcacttaattcgtcaccagcggacccatagtgaaaaaaccagctag

SEQ ID NO: 247408 - DNA, 399 bp, synthetic construct
  misc_feature 1..399: note = Description of Artificial Sequence: Synthetic coding sequence
  source 1..399: mol_type = other DNA
atgacagcggcagcctccctgttggcctcactcctgcccgctctgcccccactgaatctgcaagacgccaaatttgtcgaagagagaaggaagcagctgcagaactatttgcgcagcgtaatgaataaagtgatccagatggttcccgagtttgctgcttcccctaaaaaggagacactgattcagctcatgccttttttcgttatgggactccaagtcggtatgtacggcctatttcatttcggcgtcatgatggatcagccacaaccctcacttaccagagctgacgaatcaccctgcgaccgggtgctatctccctgcgcagcccatcgaaagcagcgcgactgctgcctgtcctggaaggccgaaccggaacgtttcctggttaagaaaaagtag

SEQ ID NO: 247409 - DNA, 1665 bp, synthetic construct
  misc_feature 1..1665: note = Description of Artificial Sequence: Synthetic coding sequence
  source 1..1665: mol_type = other DNA
atgtctgccgacggcggaggaatacaagacactcaggacaaggaaacccctcctgaggtgcccgataggggccatcctcatcaggaaatgccttcgaagttgggggaggcggtcccgtccggcgatactcaggaatcacttcacattaagatggagcccgaagagcctcactcagaaggagccagccaggaggacggggcacagggcgcttgggggtgggcccctctgagccacggatcaaaggaaaaggctctgtttcttccaggaggagctttgccgagtccgaggatccctgttctgagtagggagggcaggacaagggacaggcaaatggcagccgcactgctcacggcctggtctcagatgcccgttacatttgaggacgtggctctgtatctttctcgggaagagtggggtagactggaccatacccagcagaacttctacagagacgtcttgcagaagaagaatgggctgagcctaggctttcccttctccagacccttttgggcacctcaggctcatggtaaaggtgaagcttcaggaagctccaggcaggccggagatgagaaagagtggaggggagcatgtactggagccgtagaggtcgggcaacgagtccagacctcgagcgtcgccgcactgggcaacgtcaagccgtttaggactagggcaggcagggtgcagtggggggtccctcagtgtgcacaggaagccgcttgcggtcgctcttctgggccagccaaagacagcgggcagcctgccgagcccgacaggactcccgatgccgcacctccggacccctcaccaactgagcctcaggagtacagagtgccagaaaaacctaatgaggaggagaagggggcaccggagtcaggcgaggagggtcttgccccagattctgaggtggggaggaaatcctacagatgtgaacagtgcggaaaaggcttctcctggcactcacacctggtgacacacagacgcactcacactggcgagaagccttatgcttgtaccgattgcggaaagaggttcggccgttcttctcacctgatccaacaccaaatcattcacactggcgaaaagccctacacttgccccgcatgccgaaaaagtttctctcaccacagtactcttattcagcaccagaggattcatacaggagagaaaccttatgtctgcgacaggtgtgccaagcgttttaccaggaggagcgatctggttacacatcagggcacccatacgggcgctaaaccccataagtgtcccatatgtgcaaaatgcttcacccaaagctccgccctggtgacacatcagaggacacacaccggcgtgaaaccctatccctgtccagagtgcgggaaatgcttttcccaacgttccaacttgattgctcacaacaggacgcacactggcgagaagccctatcactgtttagactgcggaaaaagtttcagtcactcttctcatctcacggcacatcaacgcactcatagaggtgtgaggccgtatgcctgccccttatgtgggaagagcttctctcgacgatccaatcttcacagacatgaaaaaatacataccaccggtccaaaggctctcgcaatgctcatgctcggagcagccgcagccggagcccttgccacaccaccccctgccccaacttag

SEQ ID NO: 247410 - DNA, 840 bp, synthetic construct
  misc_feature 1..840: note = Description of Artificial Sequence: Synthetic coding sequence
  source 1..840: mol_type = other DNA
atgagcgccgatgggggaggcattcaggatactcaggataaagagaccccacctgaggtgcctgatcgcggtcaccctcatcaagaaatgccatcaaaactgggcgaggcagttccaagcggcgatacgcaggaatctcttcacattaagatggaaccagaggaacctcacagcgaaggcgcatctcaagaggatggggcacagggcgcttggggttgggcccctctttctcacgggtcaaaagagaaagccctgttcctgcccggtggagccctgcccagtccccgtatccctgtcctctcgagggaaggacgcacaagggatcgtcaaatggctgccgcactgctgaccgcatggtctcagatgcctgtaacctttgaggacgtggccctctacctgtcacgcgaggaatggggaagactcgaccatactcagcaaaacttttatagggacgtcctgcagaaaaaaaacggcctgagcttaggattccctttctcacgccctttttgggctccccaggcgcacgggaagggcgaagcctcaggttctagtagacaggccggagacgagaaggagtggcggggtgcatgcactggggcagtggaggtaggccagagggtgcagacttctagcgttgccgcactgggcaacgtcaaaccctttcggactagagcaggcagggtgcaatggggagtgccgcagtgtgcacaggaggctgcttgtggaagaagtagtggacccgcaaaggactctggccaacctgctgagcccgacagaaccccagatgccgcacccccagatcctagtcccaccgaaccccaggagtacagggtgccatag

SEQ ID NO: 247411 - DNA, 357 bp, synthetic construct
  misc_feature 1..357: note = Description of Artificial Sequence: Synthetic coding sequence
  source 1..357: mol_type = other DNA
atgagcgctgatgggggtggcattcaagatacccaggacaaggagacacctcccgaagtgcctgaccgcggacatccacatcaggagatgcccagcaaattgggcgaggcagttcccagcggggatacacaggagagtctacacatcaagatggaacccgaggagcctcactcagaaggagcttcacaggaggacggcgctcagggagcatggggttgggcccctcttagtcatggttccaaggagaaggcgctgttcttacccggtggcgctctaccctcgccacgcatacctgtgctgtccagagagggacggactagggatcgacagatggctgctgccctgttgacagcatag

SEQ ID NO: 247412 - DNA, 1392 bp, synthetic construct
  misc_feature 1..1392: note = Description of Artificial Sequence: Synthetic coding sequence
  source 1..1392: mol_type = other DNA
atggggagaaagaagaaaaaacaactcaaaccctggtgctggtattgtaacagagattttgacgacgagaaaattctgatccaacatcaaaaggcgaagcatttcaagtgtcacatctgtcacaagaagctatataccggtcccggactcgctatccactgcatgcaggtccataaagagaccattgacgctgtacctaatgcaatccctggtaggacagacattgagctcgaaatttatggaatggaggggatacccgaaaaagatatggacgaacggagacggttgttggagcagaaaacgcaggagtcacagaagaaaaaacagcaagatgattctgatgagtatgatgacgacgacagcgcagccagcacctcctttcaacctcagccagtacagccacagcagggttatatcccaccaatggcacagccgggtcttccaccagtgccaggcgctcccggaatgcccccaggaatcccccctttgatgcctggggttcctcccctgatgcctgggatgccaccagtaatgccgggaatgccccctgggctacaccaccaaagaaaatacacacagtctttttgcggagagaacattatgatgcccatgggtggaatgatgccccctggcccaggcataccccctctgatgcctggcatgcccccaggaatgccgcctcctgttccaaggccgggaatacctcctatgacacaggcgcaggccgtctccgccccaggcattttgaataggccacccgcacctactgctaccgtgccggctccacagccccctgttacgaaaccgctattcccctcggccggacaggcccaggcagcggttcagggccctgttgggacagattttaagcccctcaattctactccagcaacaacgacggagcctcccaaaccaacatttcctgcctacacccagagtaccgccagcacaaccagcaccaccaactccaccgcggcaaaacctgcggctagtattactagcaagcctgccacactgacaactacatcagccacctctaaactaatacatccagatgaagatatctccttagaagaacggcgagcccaactgcctaagtaccagagaaaccttcccaggcccggacaggctcccatcggcaaccctcctgtggggcctatcggcggaatgatgcctccccagccaggcattccacaacagcagggaatgaggccacctatgccgcctcatgggcagtacggcggacatcatcagggcatgcctggttacctccctggagctatgccaccttacggacagggtcctcccatggttcccccttaccagggaggacctccgagacccccaatggggatgaggccacccgtcatgtcccaggggggaagatattag

SEQ ID NO: 247413 - DNA, 1188 bp, synthetic construct
  misc_feature 1..1188: note = Description of Artificial Sequence: Synthetic coding sequence
  source 1..1188: mol_type = other DNA
atgggcagaaagaagaagaagcagctaaagccttggtgctggtactgcaaccgcgacttcgacgatgagaagatactaatccagcatcaaaaggcaaaacattttaaatgccacatctgtcataagaagctttatacaggactgccccctgtaccgggtgcacccggaatgccgccaggaattcccccactgatgcccggagtgccgccattgatgcccggtatgccccctgttatgcccggaatgcctcccggacttcatcaccaacgcaagtacactcagagcttctgtggagagaacatcatgatgcctatgggagggatgatgccccctgggccaggtattcctcccctcatgccaggtatgcccccagggatgccacccccagttcctcggccaggaatccctcctatgacccaggcacaagccgtgtctgctcctggcatcctcaaccggcctccagcccctaccgccaccgtccctgccccacaacctccagtgactaaaccactatttccctcagccggacagatgggcactcctgtgacctctagttcaaccgcatcatcaaacagcgagagcctcagcgcctcatcgaaagctctctttcccagcacggcccaggctcaggctgcagtccaggggccagtcggtaccgacttcaaacctctgaattctacacccgcaacaacaaccgagccgccaaaacccacttttcctgcctatacacagagtacagccagcaccacgagtacaactaactcaacagccgctaagccagctgcaagcatcacatccaaaccagctactttgacaacaacatctgccacatcaaaactcatccaccccgacgaagacataagcctggaggagcggagggctcagctgccaaaatatcagcggaacctcccaaggcctggtcaagctcccattgggaatcctccagttggcccaatcgggggaatgatgcctccccaaccaggcatccctcagcagcagggaatgcggcctcctatgcccccacacggccagtacggcggacaccaccagggtatgccaggctacctcccgggagctatgcccccatatggccagggcccaccgatggttcctccgtaccaggggggacccccacgccctccgatgggtatgcggccacctgttatgagtcaggggggaaggtattag

SEQ ID NO: 247414 - DNA, 1437 bp, synthetic construct
  misc_feature 1..1437: note = Description of Artificial Sequence: Synthetic coding sequence
  source 1..1437: mol_type = other DNA
atggggagaaagaaaaagaagcaactgaagccctggtgctggtactgtaatagggattttgatgatgaaaaaatcctgatccaacatcaaaaggccaaacatttcaagtgccatatctgccacaagaagctgtacactggacccggattggctattcattgcatgcaagtgcacaaggagaccattgacgccgtacctaacgccatacccggtcgcaccgatatcgagcttgaaatttacgggatggagggcattccagagaaggacatggacgagcgtcgacgtttgctcgagcagaagacccaggagagtcaaaagaagaagcaacaggacgacagtgatgaatacgatgatgacgattcagctgccagcacctctttccaaccccagcccgtgcagccccagcaggggtatattccgcctatggcacagcccggtttgcccccagtgcctggggctcccggaatgccacccggaatacctccattgatgcccggagtcccccctctgatgcctggaatgccacccgtaatgccaggcatgcccccaggcatgatgcccatgggcggtatgatgcctcctggacccggaatcccgcctctcatgcccggaatgccccctggtatgccaccccctgtgccacggcctggaattccaccgatgactcaagcgcaggcagtctcagctcccggaatactaaaccggccacctgctccaaccgcaaccgtgccggctcctcaaccaccggtcactaagcccttattcccatccgctggccagatggggaccccagtaactagcagctccacagcgagcagcaactccgagtccctttcagcttcttccaaagcactgttcccaagcactgcccaagcacaggcagcggtgcaggggccagtggggaccgatttcaaacctttgaactccaccccagctacaacgacagagcccccaaagccaactttccccgcttatacacagagtaccgccagcacaacgtctaccaccaattctacagctgccaagcccgcagctagcatcacatctaagcccgctacgctgactaccaccagtgccacatccaaacttatacaccccgacgaggatatctctctggaggaacgcagagcacagctgcctaaataccaacggaatcttccacgacccggacaggctcccattggaaaccctccagtgggacctattggagggatgatgccccctcaacctggcattcctcagcagcaggggatgcggcctcccatgccgcctcacggacaatacggcggacatcatcagggcatgcccggttacttacctggtgctatgccgccatacgggcagggaccgcctatggtcccaccatatcaaggaggtccaccacggcctcccatgggtatgagacctcctgtgatgagccaggggggacgttactag

SEQ ID NO: 247415 - DNA, 1485 bp, synthetic construct
  misc_feature 1..1485: note = Description of Artificial Sequence: Synthetic coding sequence
  source 1..1485: mol_type = other DNA
atgggaagaaagaagaagaaacagctcaaaccttggtgctggtactgcaatcgggacttcgacgatgaaaaaattttaattcagcaccaaaaggccaaacacttcaagtgccatatctgtcacaaaaaactgtacactgggccaggattagcaattcactgcatgcaggtgcacaaggaaacaatagacgctgtgcctaacgccattcccggaaggaccgatatagagctcgaaatttacggtatggagggcataccagagaaggatatggatgaaaggcggaggctgctggagcaaaaaactcaggaaagccaaaaaaagaaacagcaggatgacagcgatgagtatgatgatgacgactcagcggcttctaccagctttcagccccagcccgtgcagccacaacagggatacatcccacccatggcccagcccggattgccaccagtgccgggtgcccctgggatgcctccaggaatcccaccgttgatgccaggcgtgccgcctcttatgcctggcatgccccctgtgatgccagggatgccacccggactgcaccatcaaaggaagtacacccagtcgttctgcggagagaatatcatgatgccaatgggaggcatgatgccacctggccctgggatccctccactcatgcctgggatgccacctggcatgccgccacctgtgccacgccctgggatcccccctatgacccaggcgcaggcagtgtccgctcccggtatactgaaccggcctcccgcaccaaccgctacagtccctgcgccacagccaccagtgactaagcccctgtttccatccgccggacaaatggggactcccgttacaagtagttcaacagcgtccagtaattccgagtccttatccgcgtctagtaaagcgctcttcccgtctaccgcccaggcacaggccgcagtccagggccctgtcgggaccgacttcaagcctcttaactctacaccggcaacaactaccgagccacccaaacctacttttcctgcatacacgcagtctaccgcctcaaccacctctactacaaacagcacggcagctaaacctgccgcatctataacctctaagcctgccaccctcacaacaacctctgccacatccaaactgatccaccctgacgaagacatttcacttgaggagcgcagggcacaactgccaaaataccagaggaatcttcctaggcccggacaagctccgattggcaacccaccagtcgggccaattggcggaatgatgcccccacaaccagggatcccccaacaacagggaatgaggccgcctatgccgccacatggacagtacggcggtcaccaccaaggcatgccaggctacctgcctggcgcaatgcccccttatggacagggaccacccatggttccaccgtatcaaggaggaccgccaagaccccctatgggtatgagaccacccgtgatgtcccagggcggtcgctattag

SEQ ID NO: 247416 - DNA, 1344 bp, synthetic construct
  misc_feature 1..1344: note = Description of Artificial Sequence: Synthetic coding sequence
  source 1..1344: mol_type = other DNA
atgggccgaaagaaaaaaaagcagttaaagccttggtgttggtattgcaatagggatttcgacgacgaaaaaatactcattcagcaccagaaggctaagcattttaagtgccatatctgccataaaaagctttacaccgggcctgggctcgcaatccactgtatgcaggtgcacaaagaaacgattgacgctgtccccaatgctataccagggagaacagatatcgagctagagatctacggaatggagggaatcccggaaaaagacatggatgaaagaagaagactgctggaacagaaaactcaggagagtcagaaaaagaagcagcaggacgacagcgacgagtacgatgacgatgattccgcagcctctactagcttccagcctcagccggttcagccccagcagggttacattcctccaatggctcagccaggactgccacctgtacccggagccccaggcatgccccctgggattccccctcttatgccaggggtccccccactaatgcccggtatgcccccagtgatgcctggcatgccacctgggatgatgccaatgggaggtatgatgccccctgggccagggatcccaccacttatgcccggtatgcctcctggaatgccacccccagttccccgacccggtatccctcccatgacacaagcccaggccgtgtccgccccaggtatcctcaacagacctccagcacccactgctacagtgccagctccacagcctccagttacaaaacccctttttccatcagcgggtcaagcccaggccgcagtgcaaggaccggtgggcaccgatttcaagcccctcaattctactccggctaccactaccgagccacccaaaccaacctttccagcctacacccagagtacagccagcacgacatctactacgaatagtactgctgcaaaacccgctgctagcatcacatctaaaccggcaaccttgactaccacgagtgccacatctaaactgatacacccggatgaagacattagcctcgaagagcgcagggctcagctccccaaatatcagagaaacttaccgcgtccaggtcaagcgcctattggaaaccctcctgtgggacccattggtggaatgatgccccctcagccgggtatcccgcaacagcaggggatgcgcccacccatgccgcctcatggtcaatatggaggccaccaccagggaatgccagggtatctcccaggagcaatgcctccgtatggccagggcccacctatggtgccgccttatcaaggaggaccaccgcgaccgcctatggggatgagacctccagtcatgtcacagggcggtagatactag

SEQ ID NO: 247417 - DNA, 1491 bp, synthetic construct
  misc_feature 1..1491: note = Description of Artificial Sequence: Synthetic coding sequence
  source 1..1491: mol_type = other DNA
aatacagttatggggagaaagaagaaaaaacaactgaagccatggtgttggtattgcaacagagacttcgatgacgagaagatcctgatccaacatcagaaggctaaacactttaagtgccatatctgccataaaaagctgtataccgggcctggcctggccattcactgcatgcaggttcataaagaaaccatagacgcagtgcctaacgctatccctggcaggaccgacatagaactagagatctatggtatggaagggatccccgaaaaagatatggatgaaaggaggcgcttgctggaacagaaaacacaagagagtcaaaagaagaagcagcaggacgattcagacgaatacgatgatgatgactcggctgcgtcaaccagctttcagccacagcccgtgcagccgcagcagggatacataccaccaatggcccaaccaggcctgccaccagtacccggagctcctggcatgcctcctgggatcccccctctcatgcctggggtaccccctctgatgccaggaatgccgccagtgatgcctggcatgcctcccggactgcatcatcagaggaaatatactcagagcttttgcggtgaaaacatcatgatgccaatggggggaatgatgccaccagggcctgggatccccccactaatgcctggcatgccgcctggcatgcctccgcctgtgccgagacctggcattcctcccatgactcaggctcaggctgtttccgccccaggcatcctaaacagaccgccagcccctaccgctactgtcccagctccgcagccccctgttaccaagcctctatttccctcagcaggtcagatgggcacgccagtaacgtcttcatcgactgcaagctcaaactctgagtccttgagcgcatcttcaaaagctctcttccccagcacggcccaggcgcaggctgccgtgcagggaccggtcggaacagattttaagcctttgaactccacacctgccacaactaccgaaccaccaaaaccaacgtttcctgcctacacacagtcaactgcctcgacaacatcaaccactaattcaactgctgccaaacctgccgcaagcataacttcaaaaccagctaccctgaccaccacatccgctacgtctaagttaatacacccggatgaagacatcagcctcgaagaaaggagagcccagcttccaaaatatcagagaaacttgcccagacctggtcaagcccctattggaaacccgccagtcggcccaatcggcggaatgatgcctccccagccaggaatcccccagcagcagggcatgcggcctcccatgcctcctcatggccagtatgggggacatcatcaggggatgcctggataccttcccggagctatgccaccctacgggcagggccctcccatggtccctccttaccagggcggacccccaagaccacctatgggaatgcgaccacccgtgatgtcccaaggccttccgtag

SEQ ID NO: 247418 - DNA, 3843 bp, synthetic construct
  misc_feature 1..3843: note = Description of Artificial Sequence: Synthetic coding sequence
  source 1..3843: mol_type = other DNA
atgggcagtctgacttttagggatgtagcaattgagttttcgctggaggagtggcaatgcttagatacagctcagcagaatctgtatcgcaatgtaatgcttgagaactatagaaacctcgtctttcttgggattgccgctttcaaacctgacctgatcattttcttggaggagggcaaggaatcatggaacatgaagaggcacgaaatggtggaggagagccctgtgatttgttcccatttcgcacaagatctgtggccagaacaaggaattgaggactcttttcagaaagtcatcctgcgccgatatgaaaagtgcggtcatgaaaacctacatctgaagattggttacactaatgttgatgaatgcaaggttcataaggaaggctataataagttaaaccagtccctgacaacaacacagtctaaggtgttccagcgaggtaagtatgcaaatgtcttccacaagtgttccaattctaatagacataaaatccgacacaccgggaagaagcatctccagtgcaaagagtatgtgagatccttttgcatgctctcgcatctcagtcagcataaacgcatctacaccagggaaaattcctataagtgtgaagaaggcggaaaggcattcaactggagttctacacttacctattacaagagcgctcacactggagaaaaaccataccgatgcaaagagtgtgggaaagcgttttccaagttttccatcctgactaaacataaggtgatccacacaggagagaagagttacaaatgcgaagaatgtggcaaggcattcaaccagagtgcaattctcaccaagcacaaaattatccacactggcgaaaagcctaataagtgcgaggagtgtggcaaagccttttccaaggtatccactttaaccacgcataaagccattcacgctggcgagaaaccgtataagtgcaaggaatgcggtaaggcttttagcaaggtttccacactgatcactcataaggccattcatgcaggcgagaagccatacaaatgcaaggaatgcggtaaagctttctccaagttctcaatcttgaccaagcacaaggttattcatacaggtgaaaagccgtacaagtgtgaggagtgtgggaaagcatacaaatggccgtcaacactttcctaccacaaaaagattcacactggcgagaaaccttataagtgtgaggagtgcggaaagggttttagcatgtttagtatactcaccaagcatgaagttatccatacaggcgagaagccctacaaatgtgaagagtgtggtaaagctttcaattggtcgtctaatctaatggagcataagaaaatccatacgggggagactccatacaagtgcgaagaatgcggaaagggattttcgatgtttagtatccttaccaagcataaggtaatccataacggcgagaagccttataaatgcgaagaatgtgataaagcaactcatgcgggtgaaaaaccttacaagtgcgaggagtgtggcaaagcttttaactggtccagcaacctgatggagcacaaaaggatacatacaggagagaagccctacaagtgtgaagaatgcggaaagtccttttctaccttcagcatcctgactaaacacaaggtcatccatacgggggagaaaccatacaaatgtgaagaatgtggaaaagcctataagtggtcttctacactctcataccacaagaagatacatactgtagagaagccatacaagtgcgaggaatgcggaaaagccttcaatcagtctgcaattcttataaaacacaaacggatccataccggggagaagccctataaatgtgaagagtgcggtaagacctttagcaaagtcagtacactgacgactcataaagccattcacgcaggagaaaagccgtataaatgcaaagaatgcggaaagacgtttatcaaggtgtctaccctgacaacccataaggccattcacgccggagaaaaaccctacaagtgtaaggagtgcggcaaagccttttccaagttctccattctcaccaagcacaaggtcatccacactggtgagaagccctataagtgcgaggaatgcggcaaagcctttaattggagcagcaatctgatggaacacaagaggatacataccggggagaagccttacaaatgcgaagagtgcggtaagtccttttccacgttcagcgttctgacaaagcacaaagtgatccacactggcgaaaaaccttacaagtgcgaggaatgtggaaaggcctataaatggtccagtaccttatcctaccacaagaagattcacacagtggagaaaccctataagtgcgaggaatgcggaaaggcattcaacaggtctgcgatccttatcaagcataagcgaatccataccgacgagaagccttacaagtgcgaggagtgtgggaaaaccttcagcaaggtgtctactttgaccactcataaggctatccatgcaggagaaaaaccctataagtgcaaggaatgtggaaaggcatttagtaagttttccatcctcacaaaacacaaggttatacacacaggtgagaaaccatacaagtgcgaggaatgtggtaaggcttataaatggccatccacgctcagctatcacaaaaaaatacacacaggcgaaaaaccgtataagtgtgaggaatgtgggaagggcttcagcatgttttcaatcctgactaaacacgaggttatccatacaggcgagaaaccttataaatgcgaagaatgcggaaaggccttttcatggctatctgtgttctcaaagcacaaaaagactcacgccggagagaagttctataaatgcgaggcttgtgggaaggcttacaaatcttccagcaccctgtcttaccacaaaaaaattcataccgaagaaaagccctacaaatatgaggaatgtggcaagggattttccacgttttcaatactgaccaagcataaggtcattcatacgggggagaaaccctacaagtgtgaagaatgtggcaaggcctttaattggagctcaaacctgatggagcataaaaaaattcacacaggtgagaccccttacaaatgtgaggagtgtgataaagccttttcgtggccaagctccctgaccgagcacaaggccacgcacgcgggtgaaaagccttataagtgtgaggagtgcggcaaggctttttcctggcctagtcgcctcactgagcacaaagccacgcatgctggcgaagagccttacaaatgcgaggaatgtggcaaggcattcaattggtcctccaaccttatggagcataagcgcatccacacaggggaaaagccctacaaatgtgaagagtgcggaaagtcgtttagtacattcagtatcctgacaaagcacaaggtgatccataccggggagaaaccatacaaatgcgaagagtgcggaaaggcctacaagtggagttctaccctgagctaccacaagaaaatccatactgtcgagaagccctacaagtgtgaagaatgcggcaagggattcgtcatgttttcaatccttgcaaaacacaaagtgatccatacaggtgagaagctttacaagtgcgaagaatgcggaaaagcatataagtggccgtcaacattacggtatcacaaaaagattcacacgggggaaaaaccctacaagtgcgaggagtgtgggaaagcgttctccaccttttccatcttgaccaagcacaaggtgatccacaccggggagaaaccctacaaatgtgaggagtgcggaaaggccttctcgtggctctctgtttttagcaagcataagaagattcatacaggggagaaactgtag

SEQ ID NO: 247419 - DNA, 123 bp, synthetic construct
  misc_feature 1..123: note = Description of Artificial Sequence: Synthetic coding sequence
  source 1..123: mol_type = other DNA
gggaaaggcttctccatgttctctattctgacgaagcacaaagcaacacatgcgggtgaaaaaccctacaagtgcgaagagtgtggtaaagcctttaattggagctccaacctaatggaatag

SEQ ID NO: 247420 - DNA, 3504 bp, synthetic construct
  misc_feature 1..3504: note = Description of Artificial Sequence: Synthetic coding sequence
  source 1..3504: mol_type = other DNA
atgggctctcttaccttcagggacgtggcgatcgaattctctctcgaagaatggcaatgcctggacactgcccagcagaatttgtatagaaatgttatgctcgagaattatcgcaacctggttttcctgggcatcgctgcatttaaacccgacctgattattttcctcgaggaaggcaaggaatcctggaacatgaagagacacgagatggtggaggaatcccctgtgatctgctcccacttcgcccaggacctgtggcctgagcagggcatcgaggacagtttccaaaaagtcatcctgagacgatacgaaaaatgcggtcacgaaaatctgcacctgaagattggttatacaaacgtggacgagtgcaaagtacataaggaaggatacaacaagctgaatcagagtttaaccaccacacagagcaaggtctttcagcggggaaaatacgccaacgttttccataagtgctcaaacagtaacaggcataaaatacgtcataccgggaaaaagcacctccagtgtaaggaatatgtgcgatccttttgtatgttatcccacctgtcacagcacaagcgtatatatactcgcgaaaattcctacaagtgcgaggagggcggaaaggccttcaactggtcgagtacattaacttattacaaaagtgcccatacaggcgaaaagccctacagatgtaaggaatgtgggaaggccttctccaaattcagcatcttgacaaaacacaaggttattcataccggcgagaagtcctacaagtgcgaagaatgcggcaaagcctttaaccagagtgcaatactcaccaaacacaagatcatccatacgggcgaaaaacctaacaaatgcgaggaatgtggcaaagccttttcaaaggtgagcactctgaccacccacaaagcaatccatgctggagaaaaaccctataaatgcaaagaatgcggcaaagctttcagtaaagtatcaaccctcattacccacaaggccatccatgccggtgagaaaccttataagtgcaaagaatgtggtaaggccttttcaaaattttcaattctcactaagcataaagtgattcatacgggggaaaagccctataaatgcgaggagtgtggcaaagcctataagtggccctccacactttcataccacaaaaaaattcatacaggggaaaagccatacaaatgcgaggaatgtggcaaaggcttcagcatgttttctatcctaactaagcatgaagtgatccacaccggcgaaaaaccctataagtgcgaagagtgtggcaaggcctttaattggagctccaatctgatggagcataaaaagattcacacaggtgagactccctataagtgtgaggagtgcggcaagggcttcaagtggtcctctactctgagctaccacaaaaaaatccataccgtagaaaaaccatataagtgcgaagagtgcgggaaagcgtttaaccaatcagccatcctgattaagcacaagaggatccatacaggggaaaaaccatataagtgcgaagaatgcgggaagactttcagcaaagtgtctacgttaactacacataaagcaatacacgctggggagaaaccttataagtgcaaagagtgtggcaagactttcataaaagtatccacgctgactacccacaaggccatccacgctggggagaagccttacaaatgcaaggaatgcggcaaggccttttctaaattctcaatactgacaaagcataaggtcattcatacgggtgagaagccgtacaagtgcgaggagtgcggaaaggccttcaactggagcagcaatctgatggaacataagaggattcataccggagagaaaccgtacaaatgtgaagaatgcggaaaaagcttcagtactttttccgtgctcactaagcacaaggtaattcacacaggggagaaaccttataagtgcgaggaatgcggtaaggcttacaagtggagctctactctatcttatcacaaaaagattcataccgttgagaagccctataagtgtgaggagtgcggtaaggcgtttaaccgctctgctatacttattaagcataaacgtatccacacagatgaaaagccttataagtgtgaagaatgcggtaagaccttctccaaagtaagcacattaactactcacaaggccatccacgcaggcgagaaaccctacaaatgcaaagagtgtgggaaggctttttccaaattttctattttaacaaagcataaagtgatccataccggggaaaaaccatataaatgtgaagaatgtggtaaagcgtataaatggccatccaccctgtcttaccataaaaagattcatactggcgagaagccctacaagtgcgaagagtgcgggaagggctttagcatgttttctatcctcaccaagcacgaggtgatccacaccggggagaagccgtacaagtgtgaggaatgtggcaaggcattcagttggctgagtgtattttcaaagcacaagaagacacacgcgggagaaaagttctataaatgtgaagcctgcgggaaggcctataacactttttcaatcctgactaagcataaagtcatccacacgggagagaagccatataaatgtgaagagtgcgggaaggctttcaactggtcctcgaacctgatggagcataagaaaattcacaccggcgagacgccatataaatgcgaagagtgtgacaaggcattttcctggccatccagtctcacagagcataaggcgacacacgccggagagaaaccatacaaatgtgaagaatgcggaaaggcattcagttggccgtcacgcctgacagagcataaagccacacacgccggagaggagccctacaagtgcgaagagtgcgggaaggcctttaattggagcagcaacctcatggagcacaagcgcatccacacgggcgagaaaccctacaagtgcgaggagtgcggcaaatcattcagcactttcagtatcctgactaagcacaaagttattcacacaggtgaaaaaccatataagtgtgaggaatgtggtaaggcttataagtggagttccacattatcgtaccacaagaagatccacactgtcgaaaaaccttataagtgtgaagagtgcggtaaagggttcgtcatgtttagtattttagctaaacacaaagtgatacacactggggaaaaactgtacaaatgcgaggaatgtggcaaggcgtacaagtggccaagcacgcttagataccacaaaaaaattcatacgggcgaaaaaccttataaatgcgaagaatgtggcaaggccttctccaccttttccatccttacaaagcacaaggtcatacataccggagagaagccctacaaatgtgaggaatgtggcaaggctttctcatggctttcagtcttttcaaagcataagaagattcatacaggggtacctaatccacctacccacaaaaagatacacgcaggggagaaactgtataagtag

SEQ ID NO: 247421 - DNA, 1488 bp, synthetic construct
  misc_feature 1..1488: note = Description of Artificial Sequence: Synthetic coding sequence
  source 1..1488: mol_type = other DNA
atggccgagtccgctcctgccaggcatcgcagaaaacggaggagcaccccattgacgtccagcaccttaccttctcaagctactgaaaagtcatcatacttccagactacagagatctccctatggaccgtggtggctgctatacaggctgtggagaagaaaatggaatctcaagccgctcgcctccagtcactcgaaggaagaacaggaacggccgaaaagaagctcgcagattgcgagaaaatggcagtggaattcggaaatcagttagagggcaagtgggctgtgctaggcacactgctccaggaatacggcctgcttcagcggaggctggaaaacgttgagaatctcctgcgcaacaggaacttttggatcttaagattaccgcctggatcgaaaggcgaagcccctaaagtgagccggtcactggaaaacgacggggtgtgtttcacggaacaggaatgggaaaacctcgaggactggcagaaggagctttaccgaaacgtcatggagagcaactatgagacactggtgtctctcaaggttttgggccagacagagggagaagcagaactgggcacagaaatgttgggcgatctggaggaggagggcccaggaggtgcgcatcctgccggaggagtcatgataaaacaggaactgcagtacactcaggaaggccctgccgacctgccgggagaattctcttgtatagctgaagagcaggcctttctttcccccgagcagacggagctttggggtggccaagggtcaagcgtactcctggagaccggaccaggggactcgactctggaagagcccgttggatctagagtgccaagtagcagcaggacggtgggctgtccaaaacagaagtcacatagacaggtgcaactggatcaggagtgtggccaaggtctgaagctcaagaaggatacaagccggccttatgagtgttcggagtgcgagatcacatttcgctacaaacaacagctagcgacgcatctgcgctctcactccggctggggctcctgcactcctgaggaaccagaagagagtctgcgcccaaggccgagactgaaaccccagactaaaaaagccaagctgcaccagtgcgacgtgtgtctgcgcagttttagctgcaaagtgagtctggtcacgcatcagcgatgtcatctgcaggaggggcctagtgcaggacagcatgtgcaagaaaggtttagcccgaacagcctagtggctcttccaggtcatattccttggcggaaaagccgtagtagcctgatctgtggctactgtggcaagtctttcagtcacccctcggatctggtaagacatcagaggatccacaccggcgaacgtccatacagctgcactgagtgtgagaagtcttttgtgcagaaacagcatctgttacagcaccagaagattcaccagcgagagaggggcggactcgcattggagccgggtcgaccaaatggcctgctgtag

SEQ ID NO: 247422 - DNA, 1380 bp, synthetic construct
  misc_feature 1..1380: note = Description of Artificial Sequence: Synthetic coding sequence
  source 1..1380: mol_type = other DNA
atggctgcaccgcttgaagctcaggaccaggcaccaggggaaggcgagggactgctgatcgtcaaggtggaagattcatcttgggagcaggaatccgcccaacacgaggacggcagggattctgaagcttgtagacagcggttcaggcagttttgctatggggacgtacatggcccacacgaagccttttcacaattgtgggaactctgttgccgttggctacgtccagaacttagaactaaagaacagatactggaacttctggtactggagcagttcctcacggtgctgcccggagaaattcagggttgggtgcgcgaacagcaccccggtagtggtgaggaggctgtggcattggtggaggacctgcagaaacagcctgtaaaagcatggaggcaggatgtaccaagtgaggaagccgagccagaagccgcaggaaggggctcacaggccacgggtccgcctccaacagttggagcgagacgtcgtccttcagttccacaggaacaacactctcactctgcacagcctccagccttactcaaagaagggagacccggagagacaacagatacctgctttgtgagcggtgtacacggtcctgttgctttgggcgacataccattctatttctcccgcgaggagtggggtactctcgaccccgcacagcgagaccttttctgggacatcaaaagagagaactccaggaacacaaccctggggttcgggctcaaaggccagtcagaaaagagcttattgcaggagatggtgccagtggtgcctgggcagactggcagcgacgtgaccgtctcttggtcccccgaagaggcagaagcctgggaatctgagaacagaccgagggcagcacttgggcctgtggtcggggcacggcgaggccgaccaccgactcggagaaggcagtttcgggacctcgcagcagagaagccacatagctgtgggcagtgtggcaagcgctttcggtggggaagtgatctcgctcggcatcaacggacgcataccggagagaaaccccacaaatgcccagagtgcgacaagtcctttcggtcctcttcggacctagttagacaccagggtgtacacactggagagaaacctttcagctgtagcgagtgcggtaagagcttcagcagaagcgcctatctcgcagatcaccagcgtatccatactggagagaaacctttcggctgtagcgattgcggcaagagcttttccctgagaagctacttattggaccaccgccgtgttcacaccggtgaaaggccattcgggtgcggggaatgcgataaaagctttaaacaacgcgctcatctgatagcgcaccagtcattacacgccaaaatggcacagccggttgggtag

SEQ ID NO: 247423 - DNA, 906 bp, synthetic construct
  misc_feature 1..906: note = Description of Artificial Sequence: Synthetic coding sequence
  source 1..906: mol_type = other DNA
atgtgcccccgtcggcgaaggaaccctcggcttcaagccggagacccaagacccaggggtctgcctaggcgatggggccatgggggaggtcgtctcttcccacgcagttctaccgccatagccggacccgttgctcttggagatattcccttttacttttcaagggaagaatggggcaccctcgaccctgcccaacgggatctgttttgggacatcaaacgcgaaaacagccggaatacgaccctgggcttcggcctgaagggacagtctgaaaagtccttacttcaggagatggtacctgtagtgccaggccaaacagggagcgacgtgactgtgagttggagtcccgaagaggcagaagcttgggagtctgagaataggcctagggccgctctcggtcccgtcgtgggtgccagacgaggacgccctccaacacgccgaaggcagtttcgagatctggctgcagagaaaccacatagctgcggccagtgcggtaagcgcttcagatggggttccgacctcgcgaggcaccagcggacacacacgggagagaagcctcataaatgccccgaatgcgataaatcctttagaagctcctccgatctggtcaggcaccagggggtccacaccggagagaagccttttagttgttctgagtgtggcaagagctttagccggagtgcttatctcgccgatcatcaacgtatccataccggggagaaaccgtttggatgctccgattgcggaaaatctttctccctgcgaagctatctcctcgaccacagaagagtgcacacaggcgaacgccctttcggttgtggagagtgcgacaagtcatttaaacaacgcgctcacctgattgcacaccagtcccttcacgctaaaatggctcagcccgtcggctag

SEQ ID NO: 247424 - DNA, 1821 bp, synthetic construct
  misc_feature 1..1821: note = Description of Artificial Sequence: Synthetic coding sequence
  source 1..1821: mol_type = other DNA
atggctgttacttttgaagacgtgactattatctttacttgggaggagtggaaatttctcgattcgtctcagaagcggttgtaccgtgaggtaatgtgggagaactatactaacgtgatgtcagttgaaaactggaatgagtcttataaaagccaggaagagaaatttcgttacttagagtatgaaaacttcagctactggcagggctggtggaacgccggagcacagatgtacgaaaaccagaactatggagagacagtccaggggactgactccaaggatctaacccaacaagacagatcacagtgtcaggaatggctgatcctgtccacccaggtccccggatatggcaattacgagctgaccttcgaatccaagtctttgcgaaacctcaaatacaaaaatttcatgccctggcagagcttggagacaaagacaacacaagactacgggcgagagatatatatgtctggctcccatgggttccaggggggaagatacaggctgggcatttcccggaagaacctgtcaatggaaaaagaacaaaagctaatcgtccaacactcctacatacccgtggaggaggcgttgccccagtatgttggagtgatctgtcaggaggacctcctgcgcgactccatggaagaaaagtattgcggatgcaataagtgcaagggtatctactattggaactcaaggtgcgttttccacaagcgcaatcagcctggcgagaatttgtgtcagtgttctatctgcaaagcatgtttttctcagcggagtgacttgtatcgacacccccgaaaccatattggcaaaaagttgtatggatgtgacgaggtggacggtaacttccaccagagttctggcgtgcatttccatcagcgggtgcacattggagaggtgccatacagttgcaatgcctgcggcaagagcttctctcaaatatccagtctccacaaccaccagagggtgcataccgaagagaagttctataagattgagtgtgataaggatctgagtcgcaatagtctgctccacattcaccagcgcttgcacatcggcgaaaagccttttaaatgtaaccaatgtggcaaatccttcaatagaagttcagtcctacatgtccatcagcgtgtgcacaccggcgaaaaaccatataaatgcgacgagtgtggcaaggggttcagtcagtcttcgaacctgcggattcatcagctcgtccacactggggagaagagttataagtgcgaagactgtggcaagggctttacacagagatcaaacctgcagattcatcagagggtccacacaggggagaagccgtacaaatgtgacgattgtgggaaggatttctcccatagctccgacctgcgcattcatcagcgggtgcacacaggcgagaagccctacacctgcccggagtgtggcaaggggttttctaaatccagtaagctgcatacacatcagcgggtgcacaccggggagaagccttataagtgcgaggagtgcggaaaagggttctcccaacgctctcacttactcatccaccagagagtgcataccggcgagaaaccatacaagtgtcacgactgtggaaagggattctcgcactctagtaatctgcatattcatcagcgagtccacactggagagaagccctatcaatgcgccaaatgcgggaagggcttttcccactctagtgctctccgtatccatcaacgagtgcacgccggagagaaaccctataagtgcagggagtactataagggctttgaccacaacagtcacttgcataataatcacagaaggggaaatttgtag

SEQ ID NO: 247425 - DNA, 1821 bp, synthetic construct
  misc_feature 1..1821: note = Description of Artificial Sequence: Synthetic coding sequence
  source 1..1821: mol_type = other DNA
atggcagtcacatttgaggacgtgactattattttcacatgggaggagtggaaatttctcgacagcagccaaaagaggctgtatcgggaggtgatgtgggagaactacacaaacgttatgtctgttgagaactggaacgagagttataaaagccaggaggaaaaattccggtacttggagtacgagaatttttcctattggcaaggatggtggaacgccggtgcccagatgtatgaaaaccagaactacggcgagacagtgcaaggcaccgatagtaaggatctcacgcaacaagacaggagccagtgccaggaatggttgattttaagcacccaagttcccggatacggcaactatgaactaacgtttgaatccaaatccctccggaacctgaagtacaaaaacttcatgccttggcaatccctggagaccaagacgacccaggactatgggagggaaatctacatgagtggatcccatggttttcaggggggaaggtacaggcttggaatttccaggaaaaacctgtctatggagaaggagcagaagctcatcgttcagcactcatatatcccggtggaggaagctctgccccaatacgttggcgtcatttgccaagaagacctcttgcgcgactctatggaagagaagtactgcggatgcaacaagtgcaagggcatatattattggaatagcaggtgtgtcttccacaaaaggaaccagccaggcgagaatttatgccagtgttctatttgcaaggcttgcttctcacagcgctccgacttataccgacaccccaggaatcatatcgggaagaagttgtacggctgcgatgaggtcgacggaaattttcatcagagtagtggagtgcacttccatcagcgcgtacacattggagaagtcccatattcctgcaatgcctgcggcaagagctttagtcagatttcaagtctgcacaaccaccagcgggtgcacacggaagaaaagttctataagatagagtgtgacaaggacctgtccagaaattctctcctgcacatccatcaaagactccatataggtgaaaagcctttcaaatgtaaccagtgtggtaagagctttaatcggtccagcgtgctgcatgtgcatcaaagagtgcacaccggagaaaagccctacaagtgcgacgagtgtgggaaagggttctcccaatcttctaatttgcggatccaccagctagtccatacaggcgaaaagagctataaatgcgaagactgtggaaaaggtttcactcagcgcagtaacctgcaaattcaccaaagagtgcatacaggtgagaagccctataagtgtgatgactgtggtaaggacttcagtcacagttcggacctgcggattcaccagagagttcacaccggcgaaaaaccttacacttgcccagagtgtgggaagggtttcagtaaaagctccaagctccatacccaccaacgggtgcataccggtgaaaagccctacaagtgtgaagagtgtggaaaaggcttttcccagcgatcccatctgcttatccaccaaagagtacataccggcgaaaagccgtataagtgccacgactgcggaaaggggttcagtcatagtagcaacctacatatccaccaacgggtacatactggcgagaaaccttaccaatgtgccaaatgtggaaagggtttttcgcattcttccgccctacgcatccaccagcgggttcacgccggagaaaagccatacaaatgccgtgagtactacaaaggcttcgaccacaattctcacctccacaataatcacagacgaggcaacctttag

SEQ ID NO: 247426 - DNA, 1554 bp, synthetic construct
  misc_feature 1..1554: note = Description of Artificial Sequence: Synthetic coding sequence
  source 1..1554: mol_type = other DNA
atgcagccactgagtaagctgatggcgatttccaagcctagaaacctgagcctgcgtgaacagagagaggtcttacgtgctgatatgagctggcagcaggaaacaaatcctgtggtggagactcacgactccgaggcctcccgtcagaagttcaggcatttccagtatctgaaggtgagtgggcctcatgaagccctgagccagctgtgggagttgtgtctccagtggctccggccagagatccatacaaaaaagcagataattgagttgctggtgttagaacagttcttggcaatcctgccagaagaggtgaggacatgggtgaacctgcagcatcctaataatagtaaggacatggtgactttgatagaagacgtcatcgagatgctggaggatgaagacatgccatgcaaagactcagccctccagatgggttcaattaaggagaaaatgaaagctggaagcaggacaggcaagccacaggagcccgtcactttcaaggacgtggtcgttgaatttagtaaagaagagtggggccagctggacagtgccgttaagaacctctatcgaaatgttatgctggagaattttcggaacctgaacagcctgcggaaggcccatctgctttctaaaccttttgaaagcctgaaactggagtctaaaaaaaagcggtggattatggaaaaagaaatccccagaaaaactatctttgatatgaaatccatatcgggggaagagtcctcccacggggtcatcatgacaagactcaccgagtctgggcatcctagttcagatgcctggaagggagagaattggctgtatcggaaccaaaaaaaatgggatattaatctgcctcaggaggcattcattcctgagaccatatacacagaagaggaggatttcgagtgctctgagaataagaagagcttcgacataaactccgtgtctagcatttgtgccatccaggttggcataccctcacgtaagggcagccctaagtgcgacaaatttaagacttactttaagttcaaccttgacagcgtggggaaacagcattcagaatatgaatatgggaatgacctcagtctctctactgacattcgccaccaaaagagccatacaacaatgaattcatacgagtgttatcagtgcgggaaagccttctgtcgctcgtcatcgctcatcagacatcagatcatacacaccggtgagaagccgtataaatgcagcgaatgcggcagattcttcaaccgacggacaaacctgaccaagcaccagaaattacacgctgaagccaaggcctgtacttcaaataagtgcggaaaggcttttagtaaatccgaggatagtaacaaccctacacttcacttcgggaacaatttctaccagtgtgtgaattgcgggaaatcttttaaccggtcatccagcctgatccggcaccaaatgatccatacaggagagaaaccgtttaaatgtaaggaatgtagcaaggctttcaacaggagttcaaatctggtgaaacaccaaaagctgcacacacgtgacaagagctag

SEQ ID NO: 247427 - DNA, 1554 bp, synthetic construct
  misc_feature 1..1554: note = Description of Artificial Sequence: Synthetic coding sequence
  source 1..1554: mol_type = other DNA
atgcaaccgttatccaagctgatggccatctcaaaacccaggaatttaagcctgcgggaacagcgcgaggttttacgggctgacatgagttggcagcaagagaccaaccccgtggtggagacacacgattccgaggcttctcgacaaaagttcaggcatttccagtacctcaaggtgagtggccctcatgaagccttgagccagctttgggagctctgtctgcagtggctgcgccctgaaattcacaccaagaagcagataatagaactattagtgctcgaacagtttctggctatcctccctgaagaggtgagaacatgggtgaatttgcaacaccccaacaactcaaaggacatggttacacttattgaggatgtgatagagatgctcgaggatgaggacatgccatgcaaggatagcgccctccaaatgggctccataaaggagaagatgaaggccggttcacgaactggcaagcctcaggaacccgttacctttaaagatgtagtggtagagttctcaaaagaggagtggggccagttggactccgccgtgaagaacctataccgtaacgtgatgttggaaaatttccggaatctgaacagcctaagaaaagcccacctcctcagtaaaccctttgaaagtctgaaattagagagcaagaagaagcgttggatcatggagaaggagattccacggaaaacaatatttgacatgaaatctatcagcggcgaggaaagcagccacggcgtgatcatgactcggttgacagagagcgggcacccaagctctgacgcttggaaaggagaaaactggctctatagaaatcagaaaaagtgggacattaatctgccacaagaagcattcataccggaaaccatatatactgaggaagaagactttgagtgcagcgagaataagaagtcttttgacataaactcagttagttcaatttgtgcgatacaagtcggcattccaagcaggaagggcagccccaagtgcgacaagttcaaaacatatttcaagttcaacctggactccgtggggaagcagcacagcgagtacgaatacggcaacgacctgtccttatctactgacattcgccatcaaaagtcacacacaaccatgaacagctatgagtgctatcagtgtggcaaagcgttttgcagatccagctctctcatcaggcatcagatcattcatacgggcgaaaaaccttacaaatgtagcgaatgcggcaggtttttcaacaggcgcacaaatctgactaagcaccagaagctgcacgccgaggcaaaggcctgcacttctaacaaatgcggaaaggccttctccaaaagtgaagattctaacaaccctactcttcattttggcaacaacttttaccagtgtgtgaattgtggcaaaagtttcaatcgcagctcctcactcattaggcaccaaatgatccatacaggtgaaaaacctttcaagtgtaaagagtgttctaaagccttcaatagatcctctaaccttgttaagcatcagaaactacacacgcgggacaagagctag

SEQ ID NO: 247428 - DNA, 915 bp, synthetic construct
  misc_feature 1..915: note = Description of Artificial Sequence: Synthetic coding sequence
  source 1..915: mol_type = other DNA
atgcagcctctttccaagcttatggcaattagtaagccgcgaaatctctcacttcgagaacagagagaagtgttacgagccgacatgagctggcagcaggagaccaatcccgtcgtcgagacacacgatagcgaggcatccagacagaaattccgccattttcagtacttaaaggtgagcggtccccacgaggcactttcgcaactgtgggagctatgcctgcagtggctgcgaccagaaatacacacgaagaaacagattattgagctgttagtcctagagcagttcctcgctatcttgccggaagaggttaggacttgggtcaacttacagcatcctaataatagtaaggatatggtcaccctcatcgaagacgtaatagaaatgctggaggatgaagatatgccatgcaaagactccgcgttacagatgggaagtattaaagaaaagatgaaggccggttctagaacggggaagccacaggagcccgtaacattcaaagacgtggttgtggaattctccaaggaagagtggggtcagctggattctgccgttaagaatctataccgaaatgtcatgcttgagaatttcaggaaccttaattcattacgtaaggcacacctgctgagcaaaccttttgaatccctgaaactcgagtcaaaaaaaaaaaggtggatcatggagaaggagatcccacgcaagactatatttgacatgaaatctatcagcggtgaggaatcttcacacggagtcatcatgacaagattaacagagtctggacacccgagttccgacgcatggaaagacggagtttcacttctccttccaaggcttgagtacaatgatgccgtgtctgcccattgcaacctgcatttgtgggtacaggtcattctgttgccacagccaccagaatag

SEQ ID NO: 247429 - DNA, 3147 bp, synthetic construct
  misc_feature 1..3147: note = Description of Artificial Sequence: Synthetic coding sequence
  source 1..3147: mol_type = other DNA
atgcaatccaaagtgacgggaaatatgccaacgcagtccctgctgatgtatatggatggtcctgaggtgattggatcctccttgggctcccccatggaaatggaggatgcactgtctatgaagggcaccgctgtcgttcctttccgggctacccaggagaagaatgtgattcagatcgagggctacatgccactggactgtatgttttgctcacagacttttacacactccgaagatttgaataagcacgtgttgatgcagcacaggcctaccctctgcgagcctgctgttctgcgtgtagaagctgaatacctgagtcctctcgacaaatcccaggtgcggacagaaccacccaaagaaaaaaattgcaaagaaaatgaattttcttgcgaggtatgcgggcaaactttccgcgtggcgttcgacgtggagatccatatgaggactcacaaggattctttcacatacggatgtaacatgtgcggaaggcggttcaaggagccttggtttctgaagaaccacatgcggacacacaacggcaagtcaggtgccaggtccaagctgcagcaggggctcgagagctctcccgcaactatcaatgaggtggtgcaggtccacgccgctgagtctatcagtagcccttacaagatttgtatggtgtgtggttttctgtttcctaataaggagagcctgattgaacaccggaaagttcacacgaagaagacggcctttggaacatcatccgctcagactgatagcccacaggggggaatgcctagttcacgtgaagacttcttgcaattgttcaacctgagacccaagtctcacccagagaccggaaaaaaacccgtacgctgcatacctcagcttgacccctttacaacgtttcaggcttggcagttggcgactaaagggaaggtggcgatctgtcaggaggtcaaggagagtggacaggaaggcagcacagataacgatgacagctcctctgagaaggagctgggtgaaacaaataaaggcagttgtgctggactctcccaagagaaggaaaagtgcaaacatagccacggcgaggcgccttccgtggacgcagaccctaagctcccgagctctaaggagaaaccaacccactgctctgaatgtggcaaggctttcagaacttatcaccagcttgtcctccattctcgcgttcacaagaaagataggcgcgcaggagccgagtctcctaccatgagcgtagacggacgacagccgggaacctgttcccctgacctggctgccccactggatgaaaacggagccgtggataggggtgagggtggttccgaagacggctccgaagacggcctcccagaagggattcacctggataagaacgacgatggaggaaaaattaagcatctgacaagcagtagagaatgttcctactgtggcaaatttttcaggtctaattactatttgaacattcacttgagaacacacaccggtgaaaagccctacaagtgcgaattctgtgaatacgcagctgcccaaaaaacttcacttcgctatcacctggaacggcaccataaagagaagcaaacggacgtagcggctgaggtaaaaaacgacgggaaaaaccaagatacagaggatgcactgctgaccgccgacagcgctcagacaaaaaatttaaagcggttcttcgatggcgcaaaggatgtgacgggatctccacctgccaaacagctgaaggaaatgccgtcagtgtttcagaacgttctgggtagcgccgtactgagtccagcccataaggatacacaggacttccacaaaaacgcagctgacgatagcgctgataaagtgaacaagaaccctacacctgcttacttggatttgctgaagaagcggtctgcagtagagacccaggccaataacctgatttgccgcactaaggccgacgtgacccccccacctgacgggtcaactacccataacctagaggtgtctcccaaggagaaacagacagaaacagcggcagattgtagatataggcccagtgtggactgccacgagaaaccactgaatctgtcagtcggggcactccataattgtccggctatctctctcagcaagtcattgattcctagcataacatgcccattctgcacttttaagacgttttaccccgaggtgttgatgatgcaccagcggctggagcataagtataatccagacgtgcataagaattgtaggaataaaagccttctgaggtccaggaggacaggctgccccccagccttgcttggaaaggacgtgcctcctttatcctccttttgtaagcccaaacctaagtctgcgtttccagcacagagtaagagcctaccaagcgctaaaggtaagcagtcgccacctggacccggaaaggctcccctaacttcaggcatcgacagttctaccctcgcaccttccaatctcaaaagccaccgtccccagcagaatgttggcgtgcagggcgcagcgactcgccagcagcagagcgagatgttcccaaaaacctctgtcagccctgcaccggataagacaaagcgccctgagactaaattgaagcctcttcccgtggcaccctctcaacccaccctggggagctcaaacatcaacggttccattgattatccggcaaaaaacgatagcccttgggcccctccgggacgagactacttctgcaatcgaagtgcttctaatactgcagctgaatttggggagcccttgccaaaacggctgaagtcctcagtggtagcccttgacgtggaccagcccggagccaattatagaagggggtatgatctgccaaagtatcatatggtcagagggatcacctcactacttccccaggattgcgtgtatccttctcaggctctgccacctaaacctagatttctgtcaagttccgaggttgattcccctaacgtcctgactgtgcaaaagccatatggaggatcaggtccactctacacatgcgtccccgcaggaagccctgcttcctcttctaccctggagggtaagagacctgtgagctaccagcacctctcaaattccatggcgcaaaaacgtaactacgagaattttatcggtaacgctcactataggcctaatgacaagaagacctag

SEQ ID NO: 247430 - DNA, 3147 bp, synthetic construct
  misc_feature 1..3147: note = Description of Artificial Sequence: Synthetic coding sequence
  source 1..3147: mol_type = other DNA
atgcagagcaaagtgacggggaacatgcccacacagagtctactcatgtacatggacggacccgaagtgatcggatctagtctaggatctcccatggaaatggaagatgctctgtctatgaaggggaccgccgttgtgcccttccgcgcaacgcaagaaaagaacgtgatccagatcgaaggttacatgcccttggactgcatgttttgctctcaaactttcactcactctgaagacctcaacaaacacgtgctgatgcagcaccggccaacattgtgcgagccggcagtgttgcgagtcgaggctgaatatctatctccactcgataagtcccaagtgcgaaccgagcctcccaaggaaaagaactgtaaggagaacgaattttcttgtgaagtatgcggacagacgtttagggtggccttcgatgtggagattcacatgcgaacccacaaggacagcttcacttatggctgtaacatgtgcggccgaaggtttaaggagccctggtttctcaaaaatcacatgcgaacacataatggcaaaagcggggctagaagcaagctccaacaaggtctggaaagttcccccgcaacgattaacgaagtagttcaagtccatgccgctgagtctatatcatcgccctataagatttgcatggtgtgtggctttctgtttccgaacaaagagtcactgatagaacaccgcaaggtgcacaccaagaagacagcattcggcacgtcttcagcccagacagatagccctcagggcggtatgccctcgtccagagaagattttttacagttatttaacctgcgccctaaatctcaccctgaaacgggcaagaaacccgtgcgatgtatcccccagcttgacccctttacgacattccaggcttggcaactggccacaaaaggaaaggtggccatctgccaggaagtaaaagaatccggtcaggaggggagtacggacaatgacgattccagcagcgagaaggagctcggagaaaccaacaaaggcagctgtgccggactttctcaagagaaggagaaatgtaagcattcgcacggtgaagccccatctgttgatgctgacccaaagctgccttcttctaaggaaaaacctacacattgttcagagtgcgggaaggccttccggacatatcatcagctagtcctacattctcgggttcataagaaggatcgacgagctggcgcagaaagcccgacaatgtccgtggatgggcgacagcccggaacatgctctcccgacctcgctgctccactggatgagaatggtgctgtcgatcggggagagggagggagcgaggatgggtccgaggacggcctgccagagggcattcacttggataagaatgatgatggcggaaaaattaaacacttaacatcctcaagggagtgttcatactgcggcaaatttttccgttctaactattatctgaacatccatttgcgtacgcacacgggagagaagccgtataaatgcgaattttgcgagtacgccgcagcacaaaagacatccctgcgctaccatctggaacgtcatcacaaagagaaacaaaccgacgtggctgcagaggtgaagaacgacggaaaaaatcaggacactgaggacgctcttctcaccgctgacagcgcacaaacaaagaatttaaaacgattcttcgatggggctaaggacgttaccggctcgccacccgctaagcagctgaaggagatgccgagcgtgttccagaatgtactgggtagcgctgtcctctctccagcacataaagacacacaggacttccataaaaatgccgctgatgattcagctgataaggtgaataaaaacccaacaccagcctatttagacctcttgaagaagcggtcagccgtggagacgcaggctaacaatctgatctgtcgcacaaaggccgacgttaccccaccacctgacgggagcacaacccataacctggaagtgagtcctaaggaaaagcagaccgagacggcggcagattgccgctatagaccgagcgtggattgccacgaaaagccattaaacttgagcgtgggagctcttcataattgcccagctatcagtttatcaaagtctctcatcccttctatcacatgccccttttgcactttcaaaaccttctatcctgaggtgctcatgatgcaccagagactcgaacacaagtataaccctgacgtgcataaaaattgtcgcaataagtcgctgctgcggtcaaggcgcacaggatgtccgcctgctctccttggtaaagatgttccgcctctgagctcattctgtaagcctaagccgaagtccgcatttcccgctcagtcaaagtccctccccagcgccaagggcaagcagagccccccaggtcctggaaaagcccctctgacatctggaattgattcttctactttggcaccttcgaacctcaagtcccacaggcctcagcagaatgtgggagtacaaggtgcagccacacgtcagcagcagagcgagatgtttcccaaaacctccgtatcaccagcccctgacaaaactaaacggcctgaaaccaaactgaaacccctccccgtggcacctagtcagccgactctgggctcttccaacattaatggctctatagattaccccgcaaaaaacgactccccttgggcaccgcctggacgcgactacttctgtaacagatccgcttccaataccgcggctgagttcggtgagccactcccaaaacgcctcaaatctagcgtggtggcattggacgtggatcaacccggtgccaactacagaaggggttacgatctgcctaaataccacatggtccgaggtatcacaagcctgctacctcaggactgtgtgtatccatcgcaggctctgcctcctaagccaagatttctctcatccagtgaagtagacagcccaaacgtattgacagttcaaaagccatatgggggatccggcccactgtatacatgtgtccccgcagggagcccagcctcaagctcaactttagaaggtaagcgcccagtttcatatcaacatctgtctaacagtatggctcagaagcgcaattatgaaaactttatcggtaacgctcattacaggccgaacgacaagaagacgtag

SEQ ID NO: 247431 - DNA, 666 bp, synthetic construct
  misc_feature 1..666: note = Description of Artificial Sequence: Synthetic coding sequence
  source 1..666: mol_type = other DNA
atgtttccaaagaccagtgtgtcacccgctcctgataaaacaaaacggccagaaacaaagctcaaaccactacctgttgccccatcacagccaactctcggcagcagcaacattaatggtagcattgattatcccgctaagaatgacagcccctgggcacccccaggcagagactacttctgtaaccgcagtgcttcgaatactgctgccgagttcggggagccactgccaaaacgtttgaaatcaagcgttgttgccctggacgtggatcaacctggtgctaactacagacggggatacgacttgccgaagtatcatatggttaggggaataacatccctcttgcctcaggattgcgtttacccatctcaggcattacccccaaagccaagattcctgtcatcctccgaagtggatagccccaatgtcctgacagtgcagaagccatacggtggatccggaccgctctacacctgtgttccggcaggttctcctgcttcttcatccaccctggaaggattgggtggctgccagtgtctactacccatgaaactaaattttacctcctcttttgagaagcggatggtaaaagcgacggaaatatcatgcgattgcaccgtacataaaacctacgaagaaagcgctcggaatactacagtagtgtag

SEQ ID NO: 247432 - DNA, 288 bp, synthetic construct
  misc_feature 1..288: note = Description of Artificial Sequence: Synthetic coding sequence
  source 1..288: mol_type = other DNA
atgcagagcaaggttacagggaatatgcccacacagtctctgctcatgtacatggatgggcctgaagtgatcgggagctcgctaggctctcccatggaaatggaagacgcattgtcaatgaagggcactgccgtggtgccatttagagccacacaagagaagaatgtgattcagatcgagggctacatgcccctggactgtatgttctgttcgcagactttcacacatagcgaggatctaaacaaacacgtgctgatgcagcacagaccaaccttgtgcgagccatag

SEQ ID NO: 247433 - DNA, 2169 bp, synthetic construct
  misc_feature 1..2169: note = Description of Artificial Sequence: Synthetic coding sequence
  source 1..2169: mol_type = other DNA
atggaggggtctaggccacgcgctccatcgggccatctggctcctagccctcccgcttttgacggggaactggatttacagcgatattccaatggtcccgcagtatctgctggttctctagggatgggcgcagtaagttggagcgaaagccgggcaggtgagcggcgttttccctgtcccgtgtgcggcaaaaggtttagattcaactctattctggccttacatttaagggcccaccctggggcacaggcctttcagtgcccccactgtggacaccgagcggctcagagggctctacttcggtcacacctgagaacccaccaaccagaaaggccccgttctcccgcagccaggttgctcctagaacttgaggaaagagctctgttgcgggaggccaggctgggacgtgctcgttcgagcggcggaatgcaggcaacgcctgctacagaggggctggcaaggcctcaggccccaagtagtagtgcattccgctgtccgtattgtaagggcaagttcagaacatccgccgaacgggagagacatctccacatcttacacagaccgtggaagtgcgggctctgcagtttcggctccagtcaggaagaagagctcctacatcactcactgacagcccatggggcaccggagcggccacttgcggcaacctccgccgctccgccaccacagcctcagccccaacctccccctcagccagagccacggtccgttccgcaaccagagccagaacccgaacccgaacgagaggcgactcccacacctgctcccgcagctcccgaggagccgccagccccacccgaatttaggtgtcaagtctgcggacagtccttcacacagtcctggttcctgaaaggtcacatgcgaaagcataaagcctcattcgaccatgcatgtcccgtgtgtgggaggtgtttcaaagagccttggtttctcaagaatcacatgaaggtgcacgcatccaagctgggacccctaagagcgccaggccctgcctccggacctgctagagcccctcagccgccagacctggggctcttagcctatgagccccttggccctgccctgctgcttgcccctgccccaaccccagcagagcggagggagcccccatctctgctggggtatctgagtttgcgggcaggagagggacgcccaaatggagaaggcgctgaacctggccctgggagatcttttggaggctttcgaccactctctagcgcactccctgctagggcacgaagacaccgggctgaggaaccagaggaggaggaagaggtcgtagaagcagaggaggagacatgggcgaggggcaggtcactgggctcattggcgagcctccatcctaggcctggtgagggacctggacactccgcaagcgccgcaggcgctcaggcgaggagcaccgccacgcaggaagagaatggcctgctggtgggaggaacccgccctgaagggggtcgaggtgccactggaaaggactgcccattttgcggcaagtcattccggtccgcccaccacctcaaggtgcatttacgcgttcacacaggcgaacgaccatataagtgtcctcactgcgattacgccggaacccaatcaggatcattaaagtaccacttacaacgccaccacagggaacagcgttccggagcgggacccggtcctcccccagagccgccaccaccttcacaacgcggatctgcaccacagtcaggagcgaagccatcacctcagccagctacgtgggtggagggagcatctagccctcgtcctccttcttcaggagccggacccggttctaggagaaagccggcaagccccggaaggactttgaggaatggacgtggcggtgaagctgaacctctcgacttgtctctcagagcagggccaggaggtgaggctggccctggcggagccctacaccggtgtctgttctgtccttttgccaccggtgcccctgagctcatggccctgcatctacaggttcaccactccagacgcgctcggggacggaggcccccacaggcagacgcctcgccgccatatgcacgggtaccaagcggtgagaccccaccttctcccagtcaggagggggaggaaggcagtgggctgtctaggccgggagaggcgggattgggaggacaggagcgatag

SEQ ID NO: 247434 - DNA, 2169 bp, synthetic construct
  misc_feature 1..2169: note = Description of Artificial Sequence: Synthetic coding sequence
  source 1..2169: mol_type = other DNA
atggagggaagccgacctagggcaccttcaggacacttggcgcctagcccaccagcattcgacggagagctggacctgcagagatatagcaatggccctgcagtgtccgccggatccttgggcatgggagccgtctcgtggagcgagtcaagggcaggagaacgtcgattcccatgccctgtgtgtggtaagcgcttccgctttaattctatacttgcgctccatctgagggctcaccccggagcacaggcttttcaatgtccccactgcgggcatcgggctgctcagagagcccttctgagatcccacctccggactcaccaacccgagcggccacgcagcccagcagcgaggctcctcctggagctcgaagaaagggcactccttcgcgaagcacgactcggcagggcgagaagctccggcggaatgcaggcaaccccagcaactgaaggcctggccaggcctcaggcacccagtagctccgcattccggtgtccgtattgcaaggggaaatttaggacttccgccgagcgggagcgccacttgcatattctccataggccatggaagtgcggcctgtgcagtttcggctcctcacaggaggaagagctgctgcaccactcactcacagcccacggtgctccggagaggccactcgcggctacctccgctgctccaccaccacaaccgcagccccagccgcctcctcagccagagccaagatccgtgccacagcccgagcccgaacctgaaccagaacgcgaggctacccctacacctgcgcctgctgctccagaagagccccctgcccctcccgagtttcgctgccaggtgtgcggtcagagcttcactcagagctggtttctcaaaggccacatgcgaaaacataaggcaagcttcgaccatgcatgtcctgtgtgcggaaggtgttttaaagagccatggttcctgaaaaatcatatgaaagtccacgcctcgaagctcgggcctttgcgggctcctggaccagcctccggaccagctcgtgcccctcagcccccagacctgggtttgctggcttatgaaccactaggacccgctcttctgctcgcacccgctccgacgcccgctgaacgcagagagccgccatccttacttggataccttagcctgcgagctggcgaaggaaggcctaacggtgaaggggcagaaccaggtccgggaaggagcttcggaggatttcgtccgctcagctccgcattacctgctcgagcacggagacatcgcgctgaagaaccagaagaagaggaagaggtagttgaagctgaggaagagacttgggcccgaggaagaagccttggcagcctcgccagcctccaccccaggcccggagagggtcccggtcacagtgctagcgccgctggcgctcaggccaggagcactgctacgcaggaggagaacggcctgctagtgggaggaacccgcccagaggggggacggggagctacgggaaaggattgccccttctgtgggaagagtttccggtctgctcaccacctgaaggtgcatttaagagtgcatacgggggagcggccatacaagtgcccacattgtgactatgctgggacgcagagtggaagcctcaaatatcacctccagcggcatcatcgtgaacagagaagcggagctggacccggtccccctcctgaacctcctcccccttctcagcggggaagcgcaccccagagcggtgccaagccttccccacagccagcaacctgggtggagggcgcatcaagtccaaggcctccgagcagtggggcaggtccaggctcaaggcgcaaaccggcaagtccaggtcgtaccctgaggaatggcagagggggagaggccgagcccctcgacctgtccttgcgggctggccctggaggggaggcaggccctggtggtgcgcttcatcgctgcctgttttgtccattcgccacaggagcgccagagctgatggctctgcatctgcaggtgcatcactcaaggcgcgctcggggaaggcgtccaccacaggcagacgcgagccccccatatgcgcgagtcccgagcggggaaacacctccttcccctagccaagagggagaggagggtagcgggctttcgcgccctggtgaagctggtttgggagggcaggaaagatag

SEQ ID NO: 247435 - DNA, 2169 bp, synthetic construct
  misc_feature 1..2169: note = Description of Artificial Sequence: Synthetic coding sequence
  source 1..2169: mol_type = other DNA
atggagggatcccgaccgagggcaccctccggtcacttggctccatcccccccagccttcgatggggagctcgatctccagcgctattcaaacgggccagccgtctctgctgggagcttgggcatgggcgctgtgtcttggagtgaatccagagccggtgagaggcggtttccatgccccgtctgtggcaagaggttcaggttcaactcgatcttggccctgcacctgcgggctcatccgggtgcacaggctttccagtgcccccactgcggtcatcgagccgctcaaagagccctccttcgatcacatttgagaacccaccaaccagagcgtcccagatcccccgcagcccgtcttctcctggaacttgaagagcgagccctcctgcgggaggcacggttgggcagagctagaagctctgggggtatgcaggcaactcctgcgaccgaaggtctcgctcgacctcaggcgccttctagctctgctttcagatgtccctactgtaaggggaagtttagaaccagcgcagagagagagcgccacttgcatatcttgcaccgaccctggaagtgcggtctctgttcattcggatcttcccaggaggaagaactactgcatcacagtctgacggcccatggagccccagagcgaccactggccgctacctccgccgcacctccaccgcagccccaaccgcagccgccaccgcagccagagccgcgttctgtcccccagcccgaacccgagcctgagccggagagggaagcaactcctactccagcacctgcagctcccgaggaaccaccggcacccccagagttccggtgccaggtctgtgggcagagtttcacccagagctggttcctcaaaggacatatgaggaaacacaaggcctcattcgaccatgcatgtcccgtctgcggtagatgttttaaggaaccctggttcctgaagaaccatatgaaggtgcatgcaagtaagcttgggccattacgcgctcctggtcctgccagcggccctgccagggcaccacaaccccctgatctgggcctgctggcatacgagcctttaggcccagcactgctgctggccccagccccaactccagcagaacgcagggaacctccttccttactgggatacttaagcttgcgggcaggcgagggacgtccgaacggcgagggagcagagccaggcccaggccgtagttttggtgggtttcggcctctgagctccgctcttcctgctcgggctcggagacatcgcgctgaagaacccgaagaagaggaagaggtggtggaggcggaggaagagacttgggctagggggagaagtcttgggagtctggcatctctgcaccccaggccaggggaagggccaggacatagtgcctcagccgctggcgctcaggccagatccaccgccacgcaggaagagaacggcttgctagttggagggacccgccctgaaggcggaaggggggctacagggaaggattgcccgttttgtggaaagtcctttagaagcgcccaccatctgaaggtccacttgcgcgtgcataccggggagaggccctataaatgcccccattgcgactatgcaggcacccaatccggctcacttaaatatcacttgcagcgtcaccacagggagcagcggtcaggggcaggaccagggcctcctcctgaaccccctccgcctagtcaacgtggttctgcccctcagagcggggctaagccatcacctcagcccgctacatgggtggaaggtgcttcctcacccagacctccatcgtctggtgccggacctgggtccaggaggaaacccgcatcacccggacggacgctgcgaaacggcagggggggtgaagctgagcccttggacctatccctccgtgctgggccaggtggcgaggccggtccaggtggagctttgcataggtgtctgttctgccccttcgccacaggcgcaccagaactgatggcactgcatctacaggtgcaccattcacggagagcgagaggacgacggccacctcaggctgacgcttccccaccttatgccagggttccgtccggggaaaccccaccttcaccctctcaggagggcgaggaggggtcagggctgtcacgacctggagaagccggtctgggtgggcaagaacgttag

SEQ ID NO: 247436 - DNA, 324 bp, synthetic construct
  misc_feature 1..324: note = Description of Artificial Sequence: Synthetic coding sequence
  source 1..324: mol_type = other DNA
atggaaggctctcgccctcgagctccttcaggtcatcttgccccatcaccccctgcctttgacggggaactggacttgcagcggtactcaaatgggcctgcagtgagtgcaggctctctcggcatgggagctgtgtcttggtcagagtcacgagcaggtgaaaggcgttttccctgtcctgtgtgcggaaagcgctttcggtttaacagcattctggctctgcacctgagagctcatcctggcgcacaggcttttcagtgtcctcactgcggccacagggcagcccagagggccctgctgcgctcacatctcagaacccactag

SEQ ID NO: 247437 - DNA, 636 bp, synthetic construct
  misc_feature 1..636: note = Description of Artificial Sequence: Synthetic coding sequence
  source 1..636: mol_type = other DNA
atggagggatcccgcccacgcgcaccatctggccacttggccccaagcccaccagctttcgatggcgaacttgacttgcagcgctactctaacggtccggctgtgagtgcgggatcattaggaatgggagccgtgagttggtctgaaagtcgcgctggtgagcgacggtttccttgtccagtgtgtgggaagagattccgattcaattcgatactggccctccacttacgggctcatcctggtgcacaagccttccagtgtccccattgcgggcatcgagccgcacagagagctctgctcaggtcgcacctgagaacccatcagcccgagagacctagaagtcccgctgctcgcctactcctggagctggaggagagggcactcttacgggaggcccgtctgggacgggcacgttccagcggaggcatgcaagcaacccctgcaacagagggacttgcgagaccgcaggctccctcatcttctgcatttcggtgcccttactgtaaggggaagttccggacttcagctgaaagagagcgtcatcttcacatcctccataggccttggaaatgtggactgtgctcatttggctcctcccaggaagaagagctgttacatcacagtctgacggcctag

SEQ ID NO: 247438 - DNA, 96 bp, synthetic construct
  misc_feature 1..96: note = Description of Artificial Sequence: Synthetic coding sequence
  source 1..96: mol_type = other DNA
atggagggctcccgccctcgggcacccagtggacacctggcccctagcccaccagctttcgatggtgaactggaccttcagcgctattccaattag

SEQ ID NO: 247439 - DNA, 336 bp, synthetic construct
  misc_feature 1..336: note = Description of Artificial Sequence: Synthetic coding sequence
  source 1..336: mol_type = other DNA
atggaggggtcccgcccaagggctcctagtggtcatctagctccatcccctccagcctttgatggagaacttgatttgcagcgctatagcaatgggccagccgtgtccgccggatctctcggaatgggtgctgtgtcctggagtgagtcaagggccggagagcgcagatttccatgtcccgtttgtggtaaaaggtttcggttcaacagcatacttgcattacatctgagggcacacccaggtgctcaggcattccagtgccctcattgcgggcacagggccgctcagcgggctttactccgtagccacttgagaacgcatcagcccgaacggtag

SEQ ID NO: 247440 - DNA, 675 bp, synthetic construct
  misc_feature 1..675: note = Description of Artificial Sequence: Synthetic coding sequence
  source 1..675: mol_type = other DNA
atgagactcgccaagccaaaggccggaatttctcgcagctcaagccagggtaaggcctacgagaataagcgtaagacaggcaggcagcgccagaaatgggggatgacaattcgttttgatagcagcttttctcggctgaggcgatcattggatgacaaaccatacaagtgcacggagtgcgagaagtcatttagccagagctctaccttgttccaacatcagaagatccacacaggcaaaaagtctcataaatgtgcagattgcggcaagtctttttttcagtcctccaaccttattcagcaccggcgtattcacaccggagagaagccttataaatgtgatgagtgtggtgagtcatttaaacaatcctccaacttaattcaacatcagcgtattcacaccggggagaagccatatcagtgtgatgaatgtggcagatgcttttcacagtctagtcaccttatccagcatcagcggacccatactggcgagaagccctatcaatgctcagaatgtggcaaatgcttttctcagtcctcacaccttcgccagcacatgaaagttcataaagaagaaaagccaagaaagaccagaggcaaaaacattagggtcaagacccacctcccctcttggaaggctggtacgggcagaaagagtgtggctgggcttcggtag

SEQ ID NO: 247441 - DNA, 237 bp, synthetic construct
  misc_feature 1..237: note = Description of Artificial Sequence: Synthetic coding sequence
  source 1..237: mol_type = other DNA
atgacaactttcaaagaggcaatgacgttcaaggatgtggcagtggttttcaccgaggaggagttagggctactggacctggcccagcggaagctgtaccgagatgtcatgttggagaatttccgcaatttactcagtgtgggccatcaagcatttcatcgcgatacattccactttcttcgggaagagaagatctggatgatgaaaacagccattcagagggaaggcaattcttag

SEQ ID NO: 247442 - DNA, 2124 bp, synthetic construct
  misc_feature 1..2124: note = Description of Artificial Sequence: Synthetic coding sequence
  source 1..2124: mol_type = other DNA
atgactacctttaaagaagccatgacattcaaggatgtggctgtggtgttcaccgaggaagagttggggctgcttgacctagcccagagaaagctctatagagatgttatgctcgagaactttcgcaacctgctgtcagtgggacaccaagctttccatcgggacactttccattttctgcgcgaagagaaaatttggatgatgaagactgccattcagagagaggggaacagtggagacaaaatacaaaccgaaatggagacagtgtccgaagccggaacgcaccaggagtggtcattccaacagatatgggaaaagatagctagtgacctaacacggagccaggatctgatgatcaactctagccagttcagcaaggaaggtgacttcccctgccagacagaggcgggtctatctgtgatacacacaagacagaagtcatcccaaggcaacggatataagccatccttttctgacgtcagtcacttcgactttcaccagcaactccacagtggggagaaaagtcacacgtgtgacgagtgcgggaagaacttttgctatatctcagccctcaggatccaccagagagtccacatgggcgagaaatgttacaagtgtgatgtttgtggaaaggagttctcacagtcttcccatctgcagacccaccagcgggtccataccggtgaaaagccttttaagtgcgtggaatgcggaaaggggttttcacggcgaagcgccctgaacgttcaccacaaattacacaccggtgaaaagccctataactgcgaggagtgcgggaaggcatttattcatgattcccagttacaggagcaccagaggatccataccggagagaaaccctttaaatgcgatatctgtggcaagtcattttgcggcaggtctcgcctgaaccgccactcgatggtacatactgccgagaagcctttcagatgcgatacatgtgataagtcctttcggcaaaggtccgctcttaactcccaccgcatgattcatactggggagaagccgtataaatgtgaagaatgcggtaaaggcttcatctgtcgaagggatctgtacacccaccacatggtccatacaggcgagaagccttacaattgcaaagaatgtggcaagtctttccggtgggcttcatgtttgctgaaacaccagagagtgcatagcggagagaagcctttcaagtgcgaagaatgcggcaagggtttttataccaattctcagtgttattcacaccaacgatcacactccggcgaaaagccttataagtgtgtggaatgcgggaaggggtacaaacgcaggctggacctagactttcatcagcgagtgcataccggggagaaattatacaattgcaaggagtgcggaaagtccttttccagagctccttgtctcctcaaacatgaaagactccattctggggaaaaaccttttcagtgtgaagaatgtggtaagaggtttactcaaaattctcatctgcattctcatcaacgggtgcatactggtgagaagccctacaaatgcgaaaaatgcgggaaaggatataactccaaatttaatctggacatgcaccaaaaggtgcacaccggcgaaaggccatacaactgcaaggaatgcggcaagtcttttggctgggcgagctgcctgctcaaacaccagaggctgcactctggagaaaagccttttaaatgtgaagagtgtgggaaaagatttactcagaatagtcagctgcactcgcaccaacgtgtgcacactggcgaaaaaccatataagtgtgacgagtgcggcaaaggcttcagctggtcatccacacggctaacccaccagagacgccattctcgcgaaactcctctgaaatgtgagcagcacggaaaaaacatcgtccagaattcattctctaaagttcaggaaaaagtgcacagcgtggagaaaccctataaatgcgaggattgcggcaaggggtacaacaggaggctgaacttagatatgcatcagcgagtacacatgggcgaaaaaacctggaaatgccgagaatgcgacatgtgcttctcacaggcctctagcttaaggcttcatcagaatgtccacgtgggcgagaaaccttag

SEQ ID NO: 247443 - DNA, 1932 bp, synthetic construct
  misc_feature 1..1932: note = Description of Artificial Sequence: Synthetic coding sequence
  source 1..1932: mol_type = other DNA
atgctggagaactacggaaatgtggcgagtttaggcttccccttactgaaaccagctgtgatttcacagctagagggtggctctgagttaggtggatccagccctttggcagccggaacaggcctgcaagggctgcaaactgacattcaaaccgacaacgacttgaccaaggagatgtatgaaggaaaggaaaatgtgtcttttgaactgcagagagacttctctcaggaaactgatttcagcgaggcctcactgctcgagaagcagcaggaggttcattccgctggaaatatcaaaaaggaaaaaagtaataccattgatggcactgtcaaggacgagaccagccccgttgaggagtgcttctttagtcagagctccaactcttaccagtgtcacaccattactggcgagcaaccctccggttgcaccggcctcgggaaatcaatctcttttgacaccaaactcgtgaagcacgagatcatcaatagcgaggaaagaccattcaagtgtgaagagctggtggaacccttcaggtgtgattcccaactgatacagcatcaagagaataacacagaagagaagccgtatcaatgttccgagtgtgggaaggctttctctattaatgagaagctcatatggcaccagcgtctacactctggtgagaaaccgttcaagtgcgtagaatgtggtaagtccttctcatatagctcacattatatcactcaccagaccatccactccggtgaaaaaccctatcagtgcaaaatgtgtggcaaggccttcagcgtgaacggctccttgtcaagacatcagcgaatccacactggagaaaagccctatcaatgcaaagaatgcgggaatggcttcagctgctcatccgcatatataacgcaccaacgcgtacacacgggggagaagccatacgagtgcaacgactgtggcaaggcctttaatgtaaacgccaaattgatccagcaccagaggatacacaccggggagaaaccttatgaatgcaatgaatgcgggaaggggttcaggtgctcaagccagctgagacagcaccagtccatacataccggagaaaaaccatatcagtgcaaagaatgtggaaaaggctttaacaataacaccaagcttattcagcatcaacgaattcatacgggggaaaagccttacgaatgcacggagtgcggcaaagccttctctgtgaagggaaaactcattcaacaccagagaatacataccggggagaagccctatgagtgcaacgagtgcgggaaggctttccgttgcaattcccagtttcgccagcacctgaggattcataccggtgagaagccctacgaatgcaacgaatgcggcaaggccttttctgtaaacggtaaactgatgaggcaccagaggattcataccggagaaaaaccttttgagtgtaatgagtgtgggcgatgctttacctccaaaaggaatctgctggaccaccacagaatacacaccggggagaagccttatcaatgcaaagagtgcggaaaagccttttcaattaacgccaaactcactagacatcagaggatacacactggagaaaaaccctttaagtgcatggaatgcgaaaaggcgttcagttgctcctcaaattacatcgtgcatcagcgtatccatacaggggagaagcccttccagtgtaaggagtgcggaaaggcttttcatgtgaacgcacatctcattagacaccagaggtcccacactggcgagaaaccctttcgctgcgtagaatgcggaaaagggttttccttttcctccgactatatcattcatcaaactgtacatacctggaaaaagccatacatgtgttccgtgtgtggaaaggcttttcgatttagttttcagttgtcacaacatcaatccgtacactcagaagggaagtcttag

SEQ ID NO: 247444 - DNA, 1248 bp, synthetic construct
  misc_feature 1..1248: note = Description of Artificial Sequence: Synthetic coding sequence
  source 1..1248: mol_type = other DNA
tgcggcaaggccttttcaataaatgagaagctgatctggcaccagcggttgcacagcggagagaaaccttttaaatgcgtagagtgcggcaagtctttctcctactcatctcattacatcacccatcaaaccatacactctggcgagaagccttatcaatgcaaaatgtgcgggaaagcatttagcgtaaacggatcccttagcagacaccagcgtattcacactggtgaaaaaccataccagtgtaaagagtgcggtaatgggttttcttgctctagtgcttatataacgcaccagcgtgtgcacaccggagaaaagccatacgagtgcaatgattgtgggaaggcctttaatgttaacgcaaaactcatccagcaccagcgaattcacacaggcgaaaagccatatgaatgtaacgagtgcggcaagggctttaggtgttcatcgcagctgcgacagcatcagtctattcatactggcgagaaaccataccagtgcaaggaatgcgggaagggattcaataacaacacaaaactgatccagcatcaaaggattcatactggcgaaaagccgtatgaatgcaatgagtgtggtaaggcctttcgctgtaacagccagtttaggcagcatctacgcattcacacaggagagaaaccttatgagtgcaacgagtgtggaaaggccttctccgtcaatggaaagctgatgagacatcagcggattcatacgggagagaaacccttcgaatgcaatgaatgcggaaggtgctttacaagcaagcggaacctgcttgaccaccaccgcattcacacaggggagaaaccctaccaatgtaaggaatgcggaaaggccttttctattaatgccaagctcacacgacaccagcggatccatacaggggagaagccttttaagtgtatggagtgcgagaaagcctttagttgcagctcgaattacatagtgcatcagagaattcacacgggagagaaacctttccagtgcaaagaatgcggtaaggcctttcatgtcaacgcccatctgattaggcatcagcgtagtcataccggcgaaaaaccgtttagatgcgtggaatgtggaaagggtttcagcttcagctccgattacatcattcaccagaccgtgcatacatggaaaaagccctatatgtgttcagtatgcgggaaagcgtttagattttcattccagctgtcccagcatcagtcagtccactcagaaggaaaatcatag

SEQ ID NO: 247445 - DNA, 1932 bp, synthetic construct
  misc_feature 1..1932: note = Description of Artificial Sequence: Synthetic coding sequence
  source 1..1932: mol_type = other DNA
atgcttgaaaactacgggaacgtcgcttcacttggctttccacttttgaagcctgccgtcatctcccagctggagggcggatcagaattgggaggatccagtcctctggctgctggcactggcctacaagggctgcagactgacatccagaccgacaacgaccttaccaaagaaatgtacgagggcaaggaaaacgtgtcttttgagctccagcgagattttagtcaggagacagatttcagcgaggcctccctcctcgagaagcaacaggaagtgcactcagccggaaatatcaaaaaagaaaagtctaacactatcgacggcaccgtcaaggacgagacctctccggttgaggaatgtttcttcagccaaagcagtaactcttaccaatgccacaccattactggcgagcagcccagcgggtgcacggggctgggcaaatcaatcagtttcgacaccaagttggtgaaacatgagattattaattctgaggaaagaccctttaaatgtgaagaactggtagagcccttcagatgtgactctcaacttatccagcaccaggagaataatacggaagagaagccttaccagtgcagcgagtgcgggaaggccttctctatcaacgagaagctgatttggcatcagaggctccattctggtgagaagcctttcaagtgcgtggagtgcggtaaaagcttttcttattcaagtcattatatcacccatcagacaatacatagcggggagaaaccgtatcagtgcaaaatgtgcggtaaggcattttctgtaaatggtagcctctcacggcatcagcgcatacataccggtgaaaagccctatcagtgcaaagaatgtggcaacgggttttcatgtagttcagcatacattacccaccagagagttcacaccggcgagaagccatatgaatgcaatgactgcgggaaggctttcaacgtcaacgccaaactgatccagcatcaaagaattcacaccggggagaagccgtatgagtgtaacgaatgcgggaaaggctttagatgcagttcccagctgaggcagcaccagagcatacacacaggcgaaaagccttatcagtgcaaggaatgcggaaaaggatttaataataacacaaagctaatccagcaccaacggatacacactggcgaaaaaccttacgagtgtaccgaatgcggtaaggccttcagtgtcaaaggcaaactgattcagcaccagagaatccacaccggagagaagccttacgaatgtaacgaatgcggtaaggccttccggtgcaatagccaattccgccaacatctgcgtattcacactggagagaaaccctatgagtgtaatgaatgtggaaaggctttcagcgtgaatgggaagctaatgagacaccagagaatccacactggcgaaaagcctttcgaatgcaacgaatgtggcagatgcttcacttcaaagcggaacttactggaccatcatcggatacatactggcgagaaaccataccagtgcaaggagtgcgggaaggctttctcaatcaatgccaagctaacgcgccaccagcggatccacaccggagagaagccttttaagtgcatggagtgtgagaaagctttttcgtgcagcagcaattatattgtgcaccagcggattcacacgggcgaaaaaccctttcagtgtaaagagtgcggaaaagctttccacgttaacgcccatctgataagacaccagcgcagccacacaggcgagaaacccttcagatgtgtggaatgcggaaagggcttttccttttcctccgactacataattcatcaaacagtgcacacttggaaaaagccttacatgtgttccgtctgcgggaaggcgttccgcttctcttttcagctgagccagcaccagagtgtgcatagtgagggtaaatcctag

SEQ ID NO: 247446 - DNA, 1932 bp, synthetic construct
  misc_feature 1..1932: note = Description of Artificial Sequence: Synthetic coding sequence
  source 1..1932: mol_type = other DNA
atgctggaaaactacgggaatgtggcatcgcttggcttccctttgctgaagccagccgtgatcagccaactcgagggaggctctgaactgggcggttcgtccccattggccgctgggaccggcctgcaaggactgcagaccgatattcagaccgataatgatctgaccaaagagatgtatgaaggcaaggaaaatgtatcttttgaacttcaacgagacttttcccaggaaactgacttctctgaggcctcactgttagagaagcagcaggaagttcacagtgcaggaaatattaaaaaggaaaaatcaaacactattgacggcaccgtgaaggacgaaactagtcccgtggaagagtgtttcttctcccaaagctcaaatagctaccagtgtcacaccataacgggggagcaaccttctggttgtacaggattaggtaagtccatctctttcgacacaaaattagttaagcatgagatcattaactccgaggaacgtccgttcaaatgtgaagagctggttgaaccctttcgctgcgattctcagctgatccagcatcaggagaataacactgaggagaaaccctatcagtgcagcgagtgtggaaaggccttctcaataaacgaaaagctgatatggcatcagcgccttcacagcggggagaagccctttaaatgtgtggagtgtggaaaaagcttcagctattcttcccactacattacacatcagacaatccacagcggggagaagccctaccaatgcaaaatgtgtgggaaagctttctcagtgaatggtagcctttcacgacatcagaggatccacaccggagagaagccctaccagtgcaaggagtgtgggaacggatttagttgctcatcagcttacataacacaccagcgtgtgcacaccggcgagaaaccatacgagtgcaatgactgtggcaaagcctttaacgtaaacgccaagctgattcaacaccagcgtatccacacgggggaaaagccctatgaatgcaatgagtgtgggaaagggtttaggtgcagcagccagttaaggcagcatcagagtattcatactggcgagaagccctaccagtgtaaagaatgcggaaagggctttaataataacactaagctcatccaacaccaacgtatccatactggagagaagccttacgagtgcactgagtgcggtaaggctttctctgtgaaaggaaaactgatccagcaccaaaggatccataccggagagaagccctatgagtgcaacgagtgtggaaaggccttcaggtgtaactcgcaattcagacaacatttgagaatacacacaggcgagaaaccatacgagtgcaacgaatgcggaaaagcttttagtgtaaacggcaagctgatgcggcatcagcgtatacacaccggggagaagccctttgaatgcaatgagtgcggcagatgcttcacctccaagcgaaacctgctggatcaccatagaatacacacaggagagaagccctaccagtgcaaggaatgcggaaaggcctttagcatcaatgccaaactcactagacatcagagaatccacactggagagaaaccgtttaaatgtatggagtgcgaaaaggcattttcctgcagcagcaactacatcgtgcaccaaagaatccacactggtgaaaaaccattccagtgtaaagagtgcggaaaggccttccacgttaatgcccacttaattagacatcagagaagtcacacaggggagaagccgttccggtgcgtcgagtgcggaaagggattttcattttctagcgactacataatacaccagacggtgcatacatggaagaaaccctacatgtgctccgtgtgtggcaaagctttcaggttttcctttcagctctctcagcaccagtccgttcacagtgaaggaaagagctag

SEQ ID NO: 247447 - DNA, 1758 bp, synthetic construct
  misc_feature 1..1758: note = Description of Artificial Sequence: Synthetic coding sequence
  source 1..1758: mol_type = other DNA
atgtacgaaggcaaagagaacgttagtttcgagcttcagcgcgatttctcccaggagactgatttctctgaggcgtcgcttctcgaaaaacaacaggaagtccattcggctggaaacataaaaaaagagaaatccaatactatcgatgggactgtaaaagatgaaacctcaccggtcgaagaatgttttttttctcagtcttccaactcataccagtgccacaccatcaccggtgagcaaccatcaggctgcacaggtcttgggaaatcaatctcgttcgacaccaagctcgtgaagcacgaaatcatcaatagcgaggagcgaccatttaagtgcgaggagctagtggaaccctttaggtgtgactctcagttgattcaacaccaggaaaacaacactgaggagaaaccttatcaatgctcagagtgcgggaaggcttttagtataaatgaaaaacttatatggcatcagcggttacacagcggggaaaagcctttcaagtgtgtggaatgtggtaagtctttctcctactcctctcactacataacccatcagactatccactccggcgagaaaccttaccagtgtaaaatgtgcgggaaggcgttttcagtgaacggctctcttagtaggcatcaacggattcacaccggtgaaaagccttaccagtgcaaggaatgtggcaacgggttctcctgcagtagtgcgtatatcactcaccagcgagtgcacacgggcgagaaaccctacgagtgcaacgactgcggcaaagcttttaatgtcaacgcgaagctgattcagcaccagcgaattcacactggagagaaaccttatgaatgcaatgagtgtggaaagggctttcggtgcagctctcagctgaggcagcaccagagtatccacacaggcgagaagccttatcaatgcaaggaatgtgggaaaggattcaacaacaacacaaaactgattcaacatcaacgcattcacactggagagaagccgtacgaatgtaccgaatgcggcaaagccttcagcgttaagggaaagctgatacagcaccagagaattcacactggagagaagccctacgagtgtaacgagtgtgggaaagcttttcgatgcaactctcagttccgccagcatctcagaattcacacaggcgagaaaccatacgagtgtaacgaatgtggaaaagccttcagcgtcaacggaaaacttatgaggcatcaaaggattcacactggtgaaaagccttttgagtgtaacgagtgcggtcgttgttttacaagcaagcggaatctgctggaccaccatcggatccatacaggagagaagccctaccagtgtaaggagtgcggcaaggctttttcaatcaacgctaagcttacccggcaccagaggatacacactggcgagaaaccttttaagtgtatggagtgtgagaaagcctttagctgttctagcaattacatcgtacaccagcggatccatacgggtgaaaaaccctttcagtgtaaagagtgcggaaaggctttccacgtgaacgcacacctaatcagacaccagcgaagccacacaggggaaaagccctttcgctgcgtcgagtgcggcaaggggttcagttttagtagtgattacatcattcaccagactgtgcatacatggaagaagccatacatgtgctccgtgtgcggcaaagccttccggtttagttttcagctatcccagcatcagtctgttcactctgagggtaaaagctag

SEQ ID NO: 247448 - DNA, 1758 bp, synthetic construct
  misc_feature 1..1758: note = Description of Artificial Sequence: Synthetic coding sequence
  source 1..1758: mol_type = other DNA
atgtatgaaggcaaggaaaatgtgtcttttgagttgcagagagatttctctcaagaaacagacttctccgaggcaagtcttcttgaaaagcaacaggaggtgcattctgctggcaatattaagaaagagaagtccaatacaatagatggcacggtcaaagatgaaactagtccagtcgaagagtgcttttttagccagtccagcaatagctatcaatgccacaccattacaggagagcagccaagtggatgcacagggctcgggaaatcaatcagctttgataccaaactcgtgaagcatgaaattattaattcggaggaaaggcccttcaagtgcgaggagttggtggagccctttcgctgtgattcacaactgattcagcaccaagagaataatacggaagaaaagccgtaccagtgcagtgagtgcggaaaggcattcagcattaacgagaagctgatctggcatcaacggctccacagcggggagaagcctttcaaatgcgttgaatgcggaaagtctttctcttattccagccattacattacccatcagactattcactcgggtgaaaaaccgtatcagtgcaagatgtgcggcaaggcttttagtgtcaatggctcgctaagccgccaccagaggatccacactggcgaaaagccttaccagtgtaaagaatgtgggaatggattttcgtgttcttccgcatacatcactcaccagagggtccatactggcgagaaaccgtacgaatgcaatgactgtgggaaggcattcaatgtgaatgctaagttgattcaacaccagcgcattcacacaggtgaaaagccgtatgaatgtaatgaatgcgggaagggttttcgttgcagctctcagctgaggcaacaccaaagcattcacacgggagagaagccatatcagtgcaaggagtgtggcaagggcttcaataacaacactaaactgattcagcatcaaaggattcacacaggggaaaagccttacgagtgtacggaatgcgggaaagctttctcggtcaaggggaaactcatccagcaccagcggattcataccggggagaagccttatgaatgcaacgagtgtggaaaagccttccgctgcaactctcaattccgccaacacctgagaattcacacaggtgagaagccatacgaatgtaatgaatgtggcaaagccttcagcgtcaatggcaaactcatgcggcaccagcgtatccatacaggcgagaagccgttcgagtgcaatgaatgcggaaggtgcttcacctctaagcgcaatctgcttgatcaccatcggattcacacaggagagaaaccttaccagtgcaaggagtgcggaaaggcattcagcataaatgcaaaactgacccgccaccagcggatccatacaggcgagaagccctttaagtgtatggaatgcgagaaagccttctcttgtagcagtaattacatcgtacatcagagaatacacactggagaaaagcctttccagtgcaaggaatgcggcaaggcctttcacgtgaacgcacacctgatcaggcatcaacgttcccatacaggagaaaagccatttcgctgcgtcgagtgtggaaagggcttctccttctcctccgattacattattcatcagacagtgcacacttggaaaaagccatacatgtgctccgtttgtggcaaagcgttcaggtttagcttccagttgtctcagcaccagagtgtgcatagtgaagggaaaagctag

SEQ ID NO: 247449 - DNA, 5538 bp, synthetic construct
  misc_feature 1..5538: note = Description of Artificial Sequence: Synthetic coding sequence
  source 1..5538: mol_type = other DNA
atgggactctgcggcctcctcgagcgatgctggctccatcacgaccctgacggggtcttgactttgaacgccgaaaacactaactacgcataccaggtgcccaacttccacaagtgtgaaatttgcctcctctctttccctaaggagtctcagttccagagacacatgagagaccacgaacggaatgacaaaccacaccggtgtgaccagtgcccccaaacgtttaacgtagaattcaatctaacactgcataaatgcacacactctggggaggatcctacttgcccagtgtgtaataaaaagttcagccgagtcgccagcctcaaagcccacataatgcttcatgagaaagaggaaaatctgatctgctcggaatgtggggacgaatttactctgcaaagccagcttgcggtgcacatggaggagcaccgccaggaactggccggaacacgccagcacgcgtgcaaggcctgtaagaaggaatttgaaacatccagcgaactgaaggagcatatgaaaactcactacaagattagggtgagtagcacacggtcatacaacagaaacatagaccgctccggctttacctactcttgcccccactgcggtaagacctttcaaaagccctctcagcttactagacacataaggattcataccggggagcgaccctttaagtgttccgagtgcggcaaggcgtttaatcagaagggcgcactccagacacacatgatcaaacatactggagagaagccccatgcttgtgcgttctgccctgccgctttttcccaaaaggggaacctgcagagccatgttcagagggtgcacagcgaagtgaagaatggcccaacatacaactgcactgagtgcagctgtgtcttcaaatctttgggatccctcaacactcacatttccaaaatgcatatgggcggaccacagaacagcacctccagcactgagacagcgcatgtgctcaccgcaacattgtttcagaccctccccctgcagcaaactgaagctcaggccacttccgcctcctctcagccgtcatcacaagcagtgagcgatgtcattcagcaactgctcgagctgtcagagcctgctcccgtggaatccggtcagtcaccccagcctggacagcaactaagcatcaccgtgggtattaaccaggatattctccagcaagcactggagaattccggcctgtcgtctataccagccgctgcccatccaaacgactcatgccatgctaaaacatctgcgcctcatgcccagaatcccgatgtgagctccgtctcgaatgagcagacagacccaaccgatgccgagcaggaaaaggagcaggaatctcctgagaagctggacaaaaaagaaaaaaagatgatcaaaaagaagagtccattccttccaggctccatacgggaggagaatggtgtccgctggcacgtttgcccgtactgcgctaaggaattccggaagcccagtgatctggtacgacacataagaatccatacacatgagaaaccattcaaatgccctcaatgtttcagagcattcgccgtgaagtccacgctcacagcccatatcaaaacccacaccggcataaaagcttttaagtgtcagtattgtatgaagagctttagtacctctggatctttgaaggtgcacatccgtctacacaccggcgttaggccatttgcttgcccacattgtgataagaaattccgaacttctggtcaccggaaaacacatatcgccagccatttcaagcacactgaattaagaaaaatgcggcatcaacggaaaccagcgaaagtgcgtgtagggaagacgaacattccagttcctgatattcccttgcaagaacccatcctgatcacggatctgggtttgatccagccaatacccaagaaccaattttttcagagttacttcaataataattttgtgaacgaagcagacaggccttacaagtgcttctattgtcacagggcgtacaaaaagtcttgccacttgaaacaacacatcaggtcacacacaggagagaagcctttcaagtgttcacagtgcggtcggggatttgtcagcgcaggcgtgctgaaagcgcacattaggactcacacaggtcttaagagttttaaatgtctgatttgtaacggcgcttttacaactggaggatcgctacggaggcacatgggcatccacaacgaccttcgtccctatatgtgtccctattgccagaaaacctttaagaccagcttgaattgcaagaaacacatgaagacccacagatatgaattggcacagcagttacagcaacaccagcaggccgcaagtatagacgacagcactgtggaccagcagtcaatgcaagcctccacacagatgcaggtggagattgaatcggacgagcttcctcagacggccgaggtggtagcagccaaccccgaggccatgctcgacctcgagccccagcacgtcgttggtaccgaagaagcgggtctgggccaacaattggcagaccagccactggaggcggacgaagatggcttcgtagcccctcaggaccctttaagaggacacgtggaccagtttgaagagcaatccccagcccagcaaagctttgagccggctgggctccctcaggggtttacagttaccgacacataccaccaacaacctcaattcccaccagtgcaacagttgcaagattcttccactcttgagtcacaggctctgtccacgtcatttcaccagcaaagcctgttgcaggcccctagcagcgacgggatgaacgtcactaccaggctgatccaggaaagcagccaagaggagttagacctacaggctcaaggatcacagttcctagaggataacgaggaccaaagtcgtaggagctatcgctgtgactactgcaacaaaggattcaaaaaatccagccatcttaaacaacatgtgcgcagtcacacaggagaaaagccgtataaatgcaagctgtgtggaagaggttttgtctcatccggggtgcttaaaagccatgaaaagacccacacaggagtcaaagcttttagctgcagtgtgtgtaacgccagctttacaaccaatggatccttgacccgccatatggccacacacatgtcgatgaagccatataaatgccccttctgtgaggaagggttcaggacaactgtgcactgtaaaaagcacatgaaacgccaccagacagtgccgtctgccgtatcggctactggagagacggaggggggagatatctgcatggaagaagaggaggagcactccgatcggaatgcatcccggaagagtcggcctgaggttattacattcaccgaggaggaaacagctcagctggccaaaataaggccccaggaaagtgcaacagtgtctgaaaaggtgctcgtgcagtcagcggctgaaaaggacaggatttctgagctgcgggataagcaggcagaactccaggatgaacccaagcacgctaattgctgtacatactgtccaaaatcatttaagaaaccttccgatctggttcgccatgttcggatccacaccggcgaaaaaccgtataagtgtgatgagtgtggcaagtcattcactgtcaagagtacactggattgccatgtgaaaacccacactgggcaaaaacttttctcctgtcatgtttgcagcaatgcctttagcacaaagggatccctcaaggttcatatgcgcctccacacaggagctaaacctttcaagtgtcctcattgcgagctgcgattcagaacgtccggccgaaggaagacacacatgcagtttcactataaaccagatcccaagaaggcccgtaaacccatgacgaggtcctcctctgaaggtctgcaaccggtcaacctactaaactcaagctccacggacccaaacgtttttatcatgaataattccgtcctgaccggccagtttgatcagaatctgctacagcccggacttgtgggccaagccatattgcccgcatcagtgtcagccggaggcgatctcaccgtctcgctgacagacggctccctcgcgacattggagggcattcaactgcagctcgccgcaaatctggttggaccaaacgtgcagatttccggcatcgacgccgcttctattaacaatattacacttcagatcgacccctcaatcctgcagcagaccctgcagcaagggaatcttcttgcacagcagctgactggtgagccaggcctggcgcctcaaaattcctcacttcaaacgagcgattcaaccgttcctgcctctgtggtcattcagccaatttcgggattgagcttgcagccgacagtgacatccgctaacctgacgatagggcctctgagtgagcaggattcagtcctgacaacaaatagcagcgggacgcaggatctgacacaggtcatgacgagccagggactagtgtctccgtcggggggacctcacgagatcacactgacaattaacaattccagtttatctcaagtgttagcccaggccgctggacctacagccacttccagcagcggatctccccaggaaatcacactcacaatctctgaacttaataccacgtctggctctttacctagcaccacaccaatgtccccctcagccattagtacacaaaacctggtgatgtctagcagcggagtcggtggggacgcctccgttacattgactttggcggacactcaggggatgctgtctggaggccttgacactgtgactctcaatattactagtcaggggcagcagttcccagcactgctaaccgacccatccctgtctggacagggaggggctggatcaccgcaggtgatcctcgtttcccacactccacagtccgcctcagcagcctgcgaggagattgcctatcaagtggcgggagtttccggaaatctcgctccgggtaatcaacccgaaaaagaaggacgagcacatcagtgtctggaatgcgatcgcgcatttagttcagccgctgtgctaatgcatcattccaaggaagttcacggacgagagagaatccatggttgtcccgtctgccgaaaggcatttaagagagctactcacctcaaggaacatatgcagactcatcaggccggacccagtctgagctcccagaaacctagggttttcaagtgtgatacttgcgaaaaagcgtttgctaagccctcccagctggagagacactccagaattcacacaggagagcgcccttttcattgtacattatgtgaaaaagcattcaatcagaaatctgccttgcaagtccatatgaagaagcacactggcgaaaggccttacaaatgtgcatactgcgttatgggtttcactcagaaaagcaacatgaagctgcacatgaaacgtgctcactcttatgctggcgcactccaggagtctgccggtcaccccgaacaggacggcgaggaactctctaggactctgcatctggaagaagtcgtacaggaggctgccggagagtggcaggcactgacccacgtgttctaa

SEQ ID NO: 247450 - DNA, 4677 bp, synthetic construct
  misc_feature 1..4677: note = Description of Artificial Sequence: Synthetic coding sequence
  source 1..4677: mol_type = other DNA
atgggcctgtgcggcttgctagaacgctgctggctacatcacgatcccgatggcgttctaaccttgaacgctgagaacaccaactatgcttaccaggttccaaactttcataaatgtgagatctgcctactcagcttccccaaagagtcgcagttccagcggcatatgcgcgatcacgagaggaacgataagccccaccgatgtgatcagtgccctcagacatttaacgtagagttcaacctaacgctccataaatgcacacattcaggagaggatccgacctgcccagtctgtaacaagaagttcagccgggtagcctccctcaaggcacatatcatgcttcatgaaaaagaggagaatcttatctgctccgagtgcggagatgaattcaccctccagagccagttagccgtgcacatggaggagcatagacaggagctggccggtacccgacagcatgcttgtaaggcatgtaagaaggagtttgagacaagcagcgagctgaaggaacatatgaaaactcactacaagataagggtgtccagcacccgatcctacaacaggaacattgatcgctctggatttacttactcatgcccccattgtgggaagacctttcagaagccttcccaattaacacgacatattaggatacatactggggagaggccgtttaaatgttccgaatgcgggaaagccttcaaccagaaaggggctctacagacgcacatgatcaaacatacaggggaaaaaccgcatgcgtgcgcgttctgccctgccgctttcagccaaaaaggcaaccttcagagccacgtacagcgggtgcactccgaagtcaagaacggcccaacttataattgtactgagtgctcctgcgttttcaagtctctcggatccctgaatacacacatatccaagatgcacatgggcggaccacagaacagcaccagtagtacagagactgcccatgtgttgactgcgaccctgttccaaaccttgcccctgcaacagacagaggctcaagccacctcagcctcttcacaaccttcaagccaggcggtgtccgacgtcatccagcaacttcttgagctgagcgagcccgcacctgtggaatccggacagagcccccagccgggacaacaattgtctattaccgtgggaattaaccaggacattctgcaacaagcgctggagaattctggactttccagcatccctgcggctgcccacccaaatgacagttgccatgcgaagacatcggccccacatgcccaaaatcccgacgtaagctcggtgagcaacgaacagacagacccaaccgacgctgaacaagagaaggagcaggaaagccccgaaaagcttgataagaaggagaaaaagatgatcaagaagaagagcccattcttacctgggagcatccgggaagaaaatggcgtgcggtggcacgtgtgtccttattgcgccaaggaattccgcaaaccctccgacttagtcagacacataaggattcatacacacgagaagccattcaaatgcccccaatgtttccgggcatttgccgtcaagtccacacttacagcccacataaaaacccacaccggtatcaaagcctttaaatgtcagtattgtatgaaaagcttcagtactagcggaagcctgaaggtccacatccgtcttcacaccggagtgcgtccattcgcttgcccgcattgcgacaaaaaatttcggacctctgggcaccgaaagactcatatcgctagtcactttaagcacaccgagcttagaaaaatgagacatcagcgcaagccagctaaagtccgcgtgggcaagactaatatccccgtgcccgatatccctctgcaagagcccatcctgatcacagatttgggtctgatacaacctattcccaagaaccaattcttccaatcatacttcaacaataacttcgtgaacgaagcagatcggccttataagtgcttttattgccaccgagcctacaagaagagttgtcacctgaaacagcatatccgatcgcatacaggggaaaagccatttaagtgttcccagtgcggacgcggttttgtgtcagcaggggtgctgaaggcccacatcagaacccacacggggctgaaaagctttaagtgtcttatttgcaatggagccttcactaccggcggaagtctgcgacgtcacatgggcattcacaatgatctgagaccatacatgtgtccctattgtcagaaaactttcaaaacttcacttaattgcaagaagcacatgaagacccaccgctatgaactggctcagcagttacaacagcatcagcaagccgcatcaatcgatgatagcactgtagaccagcagtccatgcaggcttccacacagatgcaggtggagattgagagtgacgaactgccgcagacggcggaggtggtggcagctaaccccgaagccatgttggatcttgaaccgcagcacgtggttggcactgaggaggcaggtttaggacaacagctcgcggatcagcccctagaggctgacgaagacggcttcgtcgctccgcaggatcccctgcgtggccacgtggatcaatttgaagagcagtccccagcacagcagtccttcgagcccgcaggcctcccccaaggatttacagtaaccgacacctaccaccagcagccacagtttccacccgtgcaacagttgcaagatagtagcaccttagaatcgcaagcattaagtactagcttccaccagcaaagcctgttacaggcaccctcttccgacgggatgaacgtaacaactcgtctcatccaggagtctagccaggaagagctggacctccaagcacagggcagtcagtttcttgaagacaatgaggaccaatctcggagaagctataggtgcgattattgcaacaagggctttaagaaatcgtcccatctgaagcagcatgttaggagccacacaggtgagaagccctataaatgcaagttgtgcggaagaggtttcgtgtcaagtggcgtgctgaagtcacatgagaagacccacacgggcgtgaaggcatttagctgttcagtatgcaatgcgtcattcaccacaaacggctctctgactcgccatatggcgactcatatgagcatgaagccctacaaatgccccttctgcgaggaggggtttcgaacaacagttcactgtaagaagcacatgaagcggcatcagacagtgccctctgccgtctccgctaccggcgagaccgagggaggcgacatatgtatggaggaggaagaagagcacagcgatcgaaatgcttctaggaagagccgcccagaagtgataacctttaccgaggaagaaaccgcacagcttgcgaagatccgaccgcaggagagtgccactgtgagcgaaaaggtactggtgcagagcgccgctgaaaaagaccggatctccgaactgagggacaaacaagcagagcttcaggatgaacctaagcatgcgaactgctgcacctattgccccaagtcgtttaaaaagccctctgatctcgtgcggcacgtgcggatccatactggcgagaaaccctataaatgcgatgagtgtggtaagtcctttacggtgaaatcgactctggattgccacgtcaagactcataccggacagaagttgttcagctgccatgtgtgctcaaacgcattttcaacaaaagggtcattaaaagtccatatgagactccacaccggcgctaagccatttaagtgcccccactgcgagctgcgatttagaaccagcgggcgacggaagacacacatgcagtttcactacaaacctgatccgaagaaggccaggaagcctatgacgaggtcttcctccgaaggactccaacctgtgaatctgcttaacagctcatcaaccgaccccaacgtgtttatcatgaacaactcagtccttaccggccagttcgatcagaatctgctccagccgggattggtagggcaggccatactgccagcctcggtttcagcgggaggagatctgaccgtcagtctgactgacggttcactggcaaccctcgagggcatccagctgcagctagcggcaaatcttgtgggcccaaacgttcaaatctcaggcattgacgccgcaagtattaataatatcacgcttcagattgatccaagcatattacagcagaccttacagcagggcaatttactcgcccagcagttaacaggtgaacccggactggcaccgcagaacagctctctgcagacctctgattccacggttccagccagcgtagtgatccaacctataagcggcctgtccctgcagcccacagtcacatcagcgaacctgacaatcggaccgctgagcgagcaggattcagtcctgactacaaattctagcggcactcaggatctgactcaggtcatgaccagtcaggggctggtctccccgtctggcggaccgcacgagatcactttgaccattaacaattctagtctcagccaggtgctggcacaggccgctggacctactgctacgtcttcttcaggctcacctcaggaaatcactcttacaattagtggctctcgtagtgtgcagcactccgtgggacctcaagagtgcggcagtgtcgaagcactgtatctggagaacagcagtgacaaaacctag

SEQ ID NO: 247451 - DNA, 4676 bp, synthetic construct
  misc_feature 1..4676: note = Description of Artificial Sequence: Synthetic coding sequence
  source 1..4676: mol_type = other DNA
atgggtctgtgcgggctgttagagagatgctggctgcaccatgaccctgatggggtcctgaccttgaacgcggagaacaccaactacgcttaccaggtgcctaacttccataagtgtgagatatgcttgctgagcttccccaaagagtcccaatttcagcggcatatgcgagaccacgagaggaacgataaacctcacaggtgcgatcagtgcccgcagacattcaatgtcgagtttaacttgaccctccacaagtgtacacactccggagaagacccgacttgccctgtgtgtaacaaaaagtttagcagagtggcttcactgaaagcacatatcatgctgcatgaaaaagaggagaacttgatctgtagtgagtgtggcgacgagtttacgctccaatcccaactggccgtccatatggaggagcatagacaagagctcgctggcacccgccagcatgcatgcaaagcctgtaagaaggagttcgaaacgtcatcggagctgaaagaacatatgaagacccactacaaaatccgggtgagctcaacgcggagctataataggaacatcgacagaagcggctttacatatagttgcccccactgcggcaagacgttccagaaacctagtcagctcacaaggcatatcagaattcacacaggcgaacgtcctttcaaatgtagtgaatgtggtaaggccttcaatcagaagggagcactgcagactcatatgattaagcacactggagagaagccccacgcgtgtgccttctgtcccgctgcatttagccagaagggcaatctgcagtcacacgtgcaacgagtacactccgaagttaaaaacggtcccacttacaactgcaccgagtgctcatgtgtgtttaaaagcctggggagtctcaacacccacattagcaagatgcacatgggaggcccacagaattcaacatcctccactgagaccgcccacgtgctgacggccacactctttcagacgcttccattgcaacagactgaggcccaggccactagcgcctctagccagccctcctcacaggccgtttctgatgtcatccagcagttgctggaattaagcgagcctgcgcctgtagaatccggccagtctccccagccaggccagcagctttccatcactgtgggaatcaaccaggacatcctacagcaggcgctagagaactctggcctgtcctctatccccgctgctgcacatccaaatgactcatgccacgctaagacctcagcacctcacgcccagaaccctgacgtgagctcagtttccaacgagcagactgatccgacagatgctgagcaggagaaagaacaggagtcccctgagaaactggacaagaaggagaaaaagatgatcaaaaagaagtctccgttcctgcccggatctatcagagaggaaaacggggtccgctggcacgtctgtccctattgcgccaaagaatttaggaaaccgagcgatctagtgaggcacatacggatccacacacatgagaagccatttaagtgccctcagtgcttccgcgcatttgcagttaaatccacccttaccgcccatatcaaaacccacactggcataaaggccttcaagtgccagtattgtatgaaaagttttagcactagtggatctctgaaagtccatatacggctgcataccggcgtgcgtccattcgcctgcccccactgtgataagaaattcagaacgagcggtcaccgcaaaacccatattgcctctcattttaaacacactgagctaagaaagatgaggcatcagagaaaacctgccaaggtacgagtgggcaaaaccaacattcctgttcccgacatcccattacaagaaccgatactgattacagatcttggccttattcagcccataccaaaaaaccagttttttcagtcttacttcaataataattttgtgaatgaagcagatcgaccctacaagtgcttctactgtcacagagcctacaaaaaatcttgtcacctcaagcagcatattcggagccataccggcgaaaaaccctttaaatgttcccagtgtggccgtggctttgtctctgctggggtattgaaggcacacataaggacacatactggtctcaaatcttttaaatgcctgatctgtaacggcgcatttactaccgggggtagtcttagaaggcatatgggcatccataatgatttacgaccttatatgtgcccctattgccagaaaacctttaagacaagcctcaactgcaagaaacacatgaagacccacagatacgagctggcgcaacagctgcagcaacaccagcaggccgctagcattgatgatagcacagtggaccagcagtcgatgcaagcatctacccagatgcaagttgaaattgagtcagacgagctgccgcagacagcagaagtggtggcggctaacccagaggccatgcttgacctcgaaccccaacacgtggttggcacggaggaggccggacttggtcagcagttagcagaccagcctttggaggccgatgaagacggattcgtagcgcctcaggaccctctacggggtcatgtcgatcagttcgaagaacagtccccagctcagcagtccttcgagccagctggtctgccacagggcttcacagtaacagacacctaccatcaacagccacaatttcctccggtccagcagctccaggactccagcacactcgagagccaggcactgagtacttcgttccaccagcaatcgctgctacaggctccttcctccgacggtatgaacgtgactactaggttaatccaagaatcatcccaggaagaacttgatctacaggctcaggggtcacagttcctggaagataacgaggatcagtcacggaggtcctatagatgtgactactgcaacaaagggtttaagaagagttcccacctgaaacagcatgtgaggagccacactggggaaaaaccctacaaatgcaagttatgcggccgtgggttcgtctcatcaggcgtgctgaaatctcacgagaaaacccacactggcgttaaggcattcagttgtagcgtttgtaacgcctcttttacaaccaatgggagtctcacacgacacatggccactcatatgagtatgaagccgtataaatgccccttttgcgaagaagggttcaggacaactgtccattgtaagaagcatatgaaaaggcatcagaccgtgccttcagccgtctctgccacaggcgaaaccgaaggcggagacatctgcatggaggaagaggaggagcactcggacaggaacgcctcacgtaagagccgccctgaggtgataactttcactgaagaagaaaccgctcagctggccaaaatccgacctcaggagagcgctaccgtcagtgagaaggtgctggtgcaaagcgcggcagaaaaagacaggatctcagaactccgggataaacaggccgagttgcaggatgagcctaagcacgcaaactgctgcacatattgcccaaaatctttcaaaaagcccagcgacctggtgcgccacgtcagaatccacactggcgaaaaaccttataagtgtgatgagtgcggtaagagctttaccgtcaaaagcactctcgattgccacgtgaaaacgcataccgggcagaagctgtttagttgccatgtgtgtagcaacgctttctcgacaaaggggtccctgaaggtgcacatgagattgcataccggcgcaaaaccttttaaatgccctcattgtgagctgcgttttagaacctcaggaaggcggaagacacacatgcagttccactacaagcccgaccccaagaaggcgaggaagccaatgacgagaagcagctccgaaggtcttcaacctgttaatctgttgaactcaagctctactgacccaaatgtgttcatcatgaataatagcgtccttacagggcaattcgaccaaaacttgttgcagcctgggctcgtagggcaggcaatcctgcctgcctctgtgtctgccggaggcgatctcaccgtttcacttactgacgggtcattagccactctcgagggaatacagttgcagcttgccgcaaatctggtcggtcctaatgtacagattagcggtatcgacgcagcatcaatcaacaatatcactctgcagatcgatccaagcatcctgcaacaaactctgcaacaggggaacctgctagcacagcagctcaccggcgagcctggactggccccacagaacagtagcctgcagacctccgactccactgtacctgccagcgtggtaatccagccaattagtggattaagtctgcagcccacggtaacaagtgctaacttaactattgggccactctccgaacaggattccgtcctgacaactaatagtagcgggacacaggacttaacacaggttatgacctcacaggggttggtctcacccagcggcggtcctcatgagattacactcaccataaacaattcatccttgtctcaggtcctcgcgcaggcagcgggacctacggccacctccagtagtggctcacctcaagaaattactctgaccatatccggctctaggtccgtccagcactccgtggggccacaggagtgcggatccgtcgaggcattgtatctggagaattcttctgacaaaacgta

SEQ ID NO: 247452 - DNA, 1596 bp, synthetic construct
  misc_feature 1..1596: note = Description of Artificial Sequence: Synthetic coding sequence
  source 1..1596: mol_type = other DNA
atgtgtcctaagggatacgaggattctatggaatttcctgatcattctaggcacctcctgcaatgcctgagcgagcaaaggcaccagggatttctctgcgactgtaccgtgctcgttggcgacgctcagtttagagctcacagagccgtgctggccagttgttccatgtactttcacctgttctataaggatcagctggacaagagggacatagtgcacctcaattctgacatcgtgacggcccctgccttcgcactcctcctcgagtttatgtatgagggcaagctgcagtttaaggaccttcccatcgaagatgtgcttgctgctgcgagttatctccacatgtatgatattgttaaagtctgtaagaaaaaactcaaagagaaggcaactacagaggctgattctactaagaaggaggaggacgcctcatcgtgttccgacaaagtcgagagcctctctgatggatcgagccatattgcgggtgatctgccatctgacgaagatgagggggaagatgaaaaactgaacatcctgccgtccaaaagagacctggcagctgagccgggtaatatgtggatgagattaccctccgacagcgccggaattccccaggccggaggcgaggctgaaccacacgccacagccgctggcaagacagtggccagcccctgctccagcactgagtctctcagccagagatctgtgactagtgtcagagatagcgccgacgtggattgtgtgttggacttgtctgtaaagtctagtctgtcgggcgtggagaatctgaacagcagctacttctcgtctcaggacgtactcaggagtaacctggtccaagtgaaggttgaaaaagaggctagctgtgacgagagtgatgtgggtactaacgattacgatatggaacactctaccgttaaagaaagtgtctcaaccaacaacagagtgcaatatgagcccgctcacttagcccctttgcgagaagactcagtactgcgggagctcgacagggaagataaagcgagcgacgatgaaatgatgacaccggagtcagaacgcgtgcaggtggagggaggtatggagagttcgttactgccttacgtgtccaatatcctttcaccggctggacagatcttcatgtgccccctttgcaacaaagttttccccagtccacatatcctccaaatccacctgtcaactcatttcagagaacaggacgggatcaggtcgaagccggctgctgacgtgaatgttcctacatgctctctgtgtggcaaaaccttctcctgtatgtataccctgaagcgacatgagaggacccacagtggggagaaaccatacacatgcactcagtgtggcaagtcctttcagtatagtcacaatctaagcaggcacgccgtggtgcacacgagagagaagccccacgcttgcaaatggtgtgaaaggagatttacgcagagtggcgacctgtataggcatatccggaaattccactgtgagctggtgaactccctctccgtgaaatctgaagcgctgtcactgccaactgttagagattggacgctggaggattcttcccaggaattatggaaatag

SEQ ID NO: 247453 - DNA, 1464 bp, synthetic construct
  misc_feature 1..1464: note = Description of Artificial Sequence: Synthetic coding sequence
  source 1..1464: mol_type = other DNA
atgtgtcctaagggttatgaagactcaatggagtttccagaccactcccgccacctcctgcagtgcttatctgagcagcggcaccaaggattcctctgtgattgcacagtgctggtcggggatgcgcagtttagagcccaccgcgcagttctcgcctcatgtagcatgtatttccatcttttttataaagatcagctggataaaagggacatagtgcatctcaactccgatatcgttacagctcctgcattcgcccttttgctagaattcatgtacgagggcaagctgcagttcaaggatctccccattgaggacgtgcttgctgccgcatcttacctccacatgtatgacatcgttaaggtctgcaaaaaaaaactgaaggagaaggccacaaccgaggccgacagcaccaaaaaggaagaggacgcttcctcttgctctgacaaagtagagtctctgagtgatgggtcctctcatattgccggtgacctgccaagcgacgaggacgaaggggaagatgagaaactgaacatattacctagtaagcgagatctcgcagcggagcccggtaacatgtggatgagactgccatcagacagcgccggaattccccaggcgggtggggaagcagagcctcacgccacagctgccggtaagacggtggcgagtccttgtagcagcaccgagtctctgagtcagagatcagtgaccagcgtaagagacagcgccgacgttgactgcgtgctggatcttagcgtgaagagctcactgtcaggagtagaaaatctcaattcttcatacttttcttcacaggacgttctgagatcaaatttagtgcaggtgaaggtagagaaagaggcctcatgcgacgagagcgacgtgggcactaacgactatgacatggagcacagcacagtgaaagaaagcgtgtccacaaacaatagagtgcagtacgaaccagcgcatctggcccctctccgggaggactctgtgctgcgtgaactggacagagaggataaggcatccgatgatgagatgatgacccccgagtcagagcgcgtacaggtggaaggcggaatggagagcagcctactgccctatgtaagtaacatcttatcccccgcagggcagatatttatgtgccctctttgcaataaagtgttcccctctcctcatattcttcagatccatcttagtacacactttcgagaacaggatggaattagatcaaagccagctgcagacgtcaatgtacctacctgttctctctgtggtaagaccttttcttgcatgtatactttgaagagacacgaacgcactcatagtggagagaagccctacacctgcacccagtgcgggaagtccttccagtactctcacaatctgagtagacttcaagttgtgagggcccaggtccacgccgtaaggggcccagtgcagactcactcccaggtgcccctgtag

SEQ ID NO: 247454 - DNA, 1377 bp, synthetic construct
  misc_feature 1..1377: note = Description of Artificial Sequence: Synthetic coding sequence
  source 1..1377: mol_type = other DNA
atggcaagcacgattaccggatctcaagactgtattgtaaatcatcggggagaggtcgacggtgaaccagaactcgatatctccccctgtcagcagtggggcgaggcctcatccccaatttcccgtaacagggatagcgtgatgaccctgcagtccggatgtttcgagaatatagagtctgaaacctatctgcctcttaaggtgtcaagtcagatagacacacaggatagcagtgtcaagttctgtaagaatgaaccgcaggaccaccaggaatcacgaaggcttttcgttatggaggaatcaactgaacgcaaagtgatcaagggagagtcctgtagcgaaaatctccaggtgaaactggtgtcagacggccaggaacttgcatctccgctgctgaacggggaagcgacctgtcagaatggccagttgaaggaaagtttagatcccattgattgcaattgcaaggatattcatggctggaagtctcaggtggtgtcttgcagccaacagcgtgcacacacggaagagaaaccttgtgaccacaacaattgtggcaaaatactgaacactagccctgacggacacccttacgagaagatccacaccgcagaaaagcagtatgaatgcagccagtgcggcaagaacttctcacagagttcagaactgttgttgcaccagcgagaccacaccgaggagaaaccttataagtgtgagcagtgcgggaaaggcttcacccgcagcagctcactgctgatccaccaggctgttcacacagatgaaaaaccttataagtgcgataaatgcggtaagggattcacccggtcgtccagcctgctaatccatcacgctgtccataccggcgagaaaccctataaatgcgataagtgcggcaaaggctttagccagtctagtaaattacacatccaccaaagagtacacactggggagaagccctatgagtgtgaggaatgcgggatgtcattttcacagcgctctaacctccatatacaccaacgcgttcacactggagagagaccttacaagtgcggtgaatgcggtaagggctttagtcagtcttcgaacttgcatattcacagatgcattcataccggggagaagccctaccagtgttacgaatgcggaaaaggcttttcacagagctccgacctgcggattcatttacgtgtacataccggggaaaaaccctaccattgtgggaaatgcggcaaggggttctctcagtcatccaaactgcttatccaccagcgcgtgcacaccggcgaaaaaccatatgagtgctctaagtgcggaaaagggtttagtcagtccagtaacctacatatccaccagagagtgcacaaaaaggatcctaggtag

SEQ ID NO: 247455 - DNA, 1377 bp, synthetic construct
  misc_feature 1..1377: note = Description of Artificial Sequence: Synthetic coding sequence
  source 1..1377: mol_type = other DNA
atggcctcaacgatcactggcagccaagactgtattgtaaaccaccggggagaagtagacggcgagcctgagctggacatctcaccctgccagcagtggggggaggcttcctctccgatcagtaggaatagagatagtgtgatgacacttcagtctggctgctttgagaatatcgagtcagagacgtatctaccactgaaagtcagtagccagatagacacacaggactcctctgtcaaattttgcaagaatgaaccccaggatcatcaagaatctcggaggttgtttgtgatggaagagagcacagagcgcaaagtgattaagggcgagtcttgtagtgaaaatctccaggtcaaactggtgagcgatggtcaggagctagccagccccctgttgaacggcgaagctacctgccaaaacgggcaattgaaggagtccctcgatccaattgattgcaactgtaaggacatccatggttggaagagccaggtggtcagctgcagccagcagcgcgcacataccgaggagaaaccatgtgaccacaataactgcggcaagatcctgaacacctcccctgatggccacccctatgaaaagatccacactgccgaaaagcaatatgaatgctcacagtgtggcaagaacttcagccaatcgtcagagctcctgctccaccagcgagatcatacagaggaaaaaccgtacaagtgtgagcagtgcgggaaagggtttactcgttcatcttccctgctcatccaccaggctgttcatactgacgaaaagccttataaatgcgacaaatgcggaaaggggttcacccggagcagcagcctcttgattcaccatgccgtgcacactggggagaagccttataaatgtgataagtgcggaaagggattttctcaatctagtaagctccatatccatcaacgggtgcataccggggagaaaccatatgagtgcgaagagtgcggtatgagtttttcccaacggtctaacttgcatattcatcaaagggtccacacaggggaacgcccatataaatgcggcgagtgtggcaagggcttctcacaaagttccaatttacatatacatcgatgcatccacacaggggaaaagccctaccagtgttacgagtgtggaaagggattttctcagtcatcggacctgcgaattcatctccgcgtgcacaccggcgaaaaaccataccactgcggaaaatgcggcaagggttttagtcagagctcaaagcttctgatccatcagagggtgcatacaggtgaaaagccttacgagtgcagcaaatgtggcaagggatttagtcagtcatctaatttgcatatccatcaaagagtgcataagaaagaccccaggtag

SEQ ID NO: 247456 - DNA, 1377 bp, synthetic construct
  misc_feature 1..1377: note = Description of Artificial Sequence: Synthetic coding sequence
  source 1..1377: mol_type = other DNA
atggctagcacaatcacagggagccaggattgcatagtaaaccatcgtggcgaagtcgatggcgagcccgagttggatatttcgccctgtcaacaatggggtgaggcttcttcccccatctcacgaaacagggatagcgtgatgaccctgcagtcagggtgctttgagaacattgaatccgaaacatatctccctctgaaagtgtcatcccagatcgatacacaggactcttctgttaaattttgtaagaacgagccccaagaccaccaggagagtcggagactattcgtgatggaggagagcaccgaacgcaaggtgatcaaaggggaaagttgttctgagaacctgcaggtgaagttagtgtccgatgggcaagagctcgccagccctctgctcaatggagaggctacatgccaaaatggccagcttaaggagagcctggatcctatcgattgtaattgcaaggatatacatgggtggaaatcccaagtcgtgtcttgttcgcagcaacgggcacacaccgaggagaagccatgcgatcacaacaattgcggcaaaatcctgaacacaagtcccgacggccacccttatgaaaagatacacactgcggagaaacaatatgaatgctctcaatgcggcaaaaacttttcccagagtagcgagctgcttctgcatcagagggaccatacagaggagaaaccatataagtgtgagcagtgcgggaagggatttacccgtagcagtagcttgctcattcaccaagcagttcataccgatgaaaaaccctacaaatgcgataagtgcggcaaagggttcacccgcagttcctccttactgatccaccacgccgtgcataccggtgagaaaccatacaaatgcgataaatgcggcaaaggattcagccaatcctccaagctgcacatccatcagagggtccacacaggagagaagccgtacgagtgtgaagagtgcgggatgtcattctcccagcgtagcaacctccatatccaccaacgcgtgcacaccggggaacggccttacaaatgtggagagtgtggcaaaggattcagtcagagtagcaatctccatatccacagatgcattcacaccggtgaaaagccgtatcaatgctatgagtgtggaaagggctttagtcaatcttctgacctgcgtatacaccttcgagtgcatacaggggaaaaaccataccactgtggaaaatgtggcaaggggtttagtcagtcttcaaaattgttaatccatcagcgtgtgcacacgggggaaaaaccctacgaatgctcaaaatgcggcaaggggttttcacagagtagcaatctccacatccatcaaagggtccataagaaggacccacggtag

SEQ ID NO: 247457 - DNA, 1377 bp, synthetic construct
  misc_feature 1..1377: note = Description of Artificial Sequence: Synthetic coding sequence
  source 1..1377: mol_type = other DNA
atggcaagcacaattaccggctctcaagattgtattgtgaatcaccgcggagaggtagacggggaacctgagcttgacatctctccatgccagcagtggggagaggcctcatcccctatttcccggaacagagattcagttatgactcttcagagcggctgcttcgagaatatagaatcagagacctacttaccactgaaagtgtccagccaaatcgacacacaggattccagcgtaaagttctgcaagaatgagcctcaagatcaccaggaatcacgcagactgttcgtcatggaagaatcaaccgaacgcaaggtgatcaaaggcgagagctgcagtgagaatctgcaggtgaagcttgtcagtgacggccaggaactagcctcacccctgctgaatggagaagccacttgtcagaacggacaactgaaagaaagcctggaccctatcgattgtaactgcaaagacattcacggatggaagtcccaggtcgtcagctgttctcaacagcgggctcacaccgaagaaaagccctgcgatcacaacaattgtggcaaaatcctcaataccagccccgacggccatccgtacgaaaagattcacactgcagaaaaacagtatgagtgctctcaatgtggtaagaatttctcacagtcctccgagctgcttctgcatcaacgtgaccatacagaagaaaagccatataagtgtgagcaatgcggcaaagggttcacccggtcaagctctctgttgatacaccaggccgtgcatacagatgagaaaccctacaagtgcgacaagtgcgggaaggggtttacgagatctagttctctgctcattcatcacgccgtccacactggcgaaaaaccttataagtgtgataagtgcggaaagggattcagccagagctctaagctgcacatacatcagcgggttcatactggggaaaaaccttatgaatgtgaggagtgcgggatgagtttttctcagagaagtaacctccatatccaccaaagggttcacaccggggaacgaccctacaagtgtggcgagtgtgggaagggtttttcacaaagcagcaacctccatattcatcgctgtattcacacaggagagaagccctaccagtgctatgagtgcggaaaagggttctcacagtcctctgacctgcggattcacctgagggtgcacactggggagaagccataccactgcggaaagtgtggcaaaggattctcccagtcatctaagctgctcattcaccaacgggtgcatacaggagagaaaccttacgagtgtagtaaatgcggaaaaggcttttctcagagttcaaacctccatattcatcagcgcgtccacaaaaaagacccccgttag

SEQ ID NO: 247458 - DNA, 1377 bp, synthetic construct
  misc_feature 1..1377: note = Description of Artificial Sequence: Synthetic coding sequence
  source 1..1377: mol_type = other DNA
atggcttctaccatcactgggagccaagattgtattgtgaaccatcgaggagaggtggacggtgagcccgagctggatatcagcccatgccagcagtggggcgaggcgagcagccccattagcaggaaccgtgatagtgttatgacactgcagtccggttgcttcgagaacattgaaagtgagacttacctacctcttaaggtcagctctcagatagacacacaggactcaagcgttaaattttgtaagaacgagccccaggatcaccaagagagtaggagactgttcgtgatggaggagtctaccgagagaaaagtcattaagggcgaaagttgcagcgaaaacctacaggtgaaactcgtgtccgatgggcaggagctggcctctcctttactcaacggcgaggctacctgtcaaaatggtcagctgaaagagagtcttgatcccatcgactgcaattgtaaggatatccatggctggaagagccaggtagtaagctgtagtcagcagcgcgctcataccgaggaaaagccttgtgaccataacaactgtggaaaaatcctgaatacctccccagatggtcatccttacgagaaaattcacactgcagaaaaacaatacgagtgttcccagtgtgggaagaattttagccaatctagtgaactcttactccatcagcgtgatcacaccgaagagaagccttacaagtgcgaacagtgcggaaaggggttcacacggtcttcatcgttgctgattcatcaagcagtgcacacagacgagaagccatacaaatgcgataagtgcggcaaaggatttacccggagttcttcactgctgattcatcacgctgttcatactggcgagaagccctacaaatgcgacaaatgcgggaagggtttttcccagagtagcaagctgcacattcaccaacgagttcataccggcgaaaaaccatacgagtgtgaggagtgtggaatgtctttctctcagcggtccaacttacatatccaccagcgcgtccacactggagaaagaccgtacaaatgcggggagtgcggaaaggggttttctcagtccagtaacttgcacatacaccgctgcattcacactggcgagaagccgtatcaatgctatgagtgcggcaaggggttttctcagagctccgacctgcgcattcacctgagagtgcataccggggagaagccgtaccattgcggcaagtgtggcaaaggcttctctcaaagctccaaactcctgatccatcaacgggtacatactggggagaaaccctatgagtgctctaaatgcggaaaggggtttagccaaagctccaatctacacatccaccagcgggttcataagaaagaccctagatag

SEQ ID NO: 247459 - DNA, 1107 bp, synthetic construct
  misc_feature 1..1107: note = Description of Artificial Sequence: Synthetic coding sequence
  source 1..1107: mol_type = other DNA
atgtctgcacagtctgttgaggaagatagcatactcataatcccgactcccgacgaggaggaaaaaatccttcgcgtgaaattagaggaggatcccgatggagaagaaggctcgtcgattccctggaaccatcttcccgatcccgagattttccgccaaagattcagacagtttggctatcaggattctcctggcccaagagaggcggtctctcagctccgggaactgtgtaggttgtggctcagaccagagacccacactaaggagcagattctcgagttagtggtgctggaacagttcgtagcaattctcccaaaagagctccagacctgggtgagagaccatcatccagagaatggcgaggaagccgtgacagtcctggaagacttggagtcggagttggatgacccaggacagcctgttagcttgcggcgaagaaagcgggaggtgctggtagaagacatggtgtcccaggaggaagctcagggactgccctcatcagagttggacgcggtggaaaaccagctgaagtgggcctcatgggaactgcattccctccgacattgtgacgatgacggaaggaccgaaaacggggcactcgctcccaagcaagaactaccttcagccctggaatcccacgaggtgcccggtactctcaacatgggagtgccacagattttcaagtatggcgagacatgttttcctaaaggccgattcgagagaaaacgcaacccatcaagaaaaaagcagcacatctgcgacgaatgcggaaaacatttcagtcagggctcagcactaatactccaccagcggatccattctggagaaaagccttacggctgcgtggagtgtggtaaggctttcagcaggtcatctatcctggtgcaacaccagcgcgtccacactggcgaaaaaccctacaaatgtctggaatgtggtaaagccttcagccagaatagcggccttatcaatcaccaaaggatacatactggtgaaaaaccctacgagtgcgtccagtgcgggaagtcgtatagccaatccagtaatctgttccggcaccagcgccgtcacaacgctgaaaaacttcttaatgtcgtcaaagtatag

SEQ ID NO: 247460 - DNA, 1107 bp, synthetic construct
  misc_feature 1..1107: note = Description of Artificial Sequence: Synthetic coding sequence
  source 1..1107: mol_type = other DNA
atgtctgcacaaagcgtggaggaggatagcattcttattattcccacacccgacgaggaagagaagatactgcgagttaagttggaggaagatcccgatggtgaggagggatcttccataccctggaatcacctgcccgatcccgagatttttaggcagagattcaggcagtttgggtatcaggattcccccggtcccagggaagctgtgtcccagttgcgagagctttgtcggttatggcttaggccagaaacccacaccaaggagcagattttagagctagtggtgctcgaacagttcgtcgcaatcctcccaaaggagctacaaacatgggtgagggaccaccaccctgagaatggcgaggaggccgtgaccgtcctagaagacctggaaagtgagctggatgatccaggtcagcccgtcagcttgagaagaagaaagcgtgaagtcttggtggaggatatggtcagtcaagaagaagctcaaggtttgcccagcagcgagctagacgcggtcgaaaatcagctgaaatgggcctcatgggagctccatagcttaagacactgtgacgatgatggcagaactgagaatggagcgctggcccctaaacaggaactaccatcggccctagaatcacacgaggttcccggtacactgaatatgggtgtgccccagattttcaagtatggagaaacttgttttccaaagggaaggttcgagagaaagcgtaatccgtctagaaagaagcagcatatttgtgatgaatgcggaaagcacttttcacagggcagcgccctgattctccaccagagaattcactctggcgagaagccttacggctgcgtggagtgtggaaaagccttctcccgatcctccatcttggttcagcaccaacgggtgcatacaggagagaagccgtataagtgccttgaatgtgggaaagcattctcacagaactcggggctgattaaccatcagcgaatccacacgggcgagaaaccctacgagtgcgtccagtgcgggaagtcctactcccaaagctcaaacctttttaggcatcaaaggagacataacgccgagaaattgttaaacgtcgtgaaggtatag

SEQ ID NO: 247461 - DNA, 1371 bp, synthetic construct
  misc_feature 1..1371: note = Description of Artificial Sequence: Synthetic coding sequence
  source 1..1371: mol_type = other DNA
atgaataagtttcagggacctgtgacgcttaaggatgtaattgtggagtttacaaaagaagaatggaaactcctcacgcctgcacaaaggacactctacaaggacgtcatgctggagaactacagccacctagtgtccgtaggctatcacgttaataaacctaatgccgtcttcaagttaaagcagggcaaggagccatggatcctcgaggttgaatttccccaccgcggtttccctgaagatctgtggtccatccacgacctggaggcacggtaccaggaatcccaagcagggaactcccgaaatggcgagctaaccaaacatcagaagactcacacaactgaaaaagcttgtgagtgtaaagagtgcggaaaattcttttgtcagaagtccgctctgatcgtgcatcagcacacacactcgaaaggcaagtcatatgactgcgataagtgcggcaaaagcttctcgaaaaacgaagacctgatccgacaccaaaagattcacacgagagataagacctacgaatgcaaagaatgtaaaaagattttttatcatcttagcagtctgtcacggcatctgagaacccacgctggggaaaaaccatatgaatgtaaccagtgtgaaaaaagtttttaccagaagccccaccttactgagcaccagaagacacatactggcgagaaacccttcgaatgcaccgagtgcgggaagtttttttatgtcaaggcctacttgatggtgcaccaaaaaacgcacaccggggagaagccctatgagtgcaaggaatgtgggaaggctttcagccagaaatcccacctgaccgtccaccagcggatgcatactggcgagaagccatacaagtgtaaggagtgcggcaaattcttctcacggaactcccatctgaagacacaccagcgcagccacacaggggaaaagccttatgaatgcaaggaatgtagaaaatgcttctaccagaagagtgcgctgacagttcaccaacgaacgcacacgggtgaaaagccatttgagtgcaacaaatgcggcaaaaccttctactacaagtcggatctgacaaagcatcagagaaagcacacaggagaaaaaccctacgagtgtaccgagtgtggcaaatcgttcgcagttaactctgttttgaggcttcaccagagaacccatacaggagagaaaccctatgcttgtaaggaatgtggaaagagttttagtcagaaaagccatttcatcattcatcagcgcaaacacaccggcgaaaaaccctacgagtgtcaggagtgcggggagacgtttatacagaagagtcagctgacggcccaccagaaaacacatactaagaaaaggaatgctgaaaaatag

SEQ ID NO: 247462 - DNA, 1263 bp, synthetic construct
  misc_feature 1..1263: note = Description of Artificial Sequence: Synthetic coding sequence
  source 1..1263: mol_type = other DNA
atgctcgagaactactcacacctcgtatccgtcggataccacgtgaataagcccaatgccgtgtttaaactgaagcagggtaaggagccttggatcttggaggttgagttcccccatagaggtttcccggaggacctttggtccatccacgatcttgaggccaggtatcaggagtctcaggccggtaattctcggaacggggagctcaccaagcatcagaagacacacacgaccgagaaggcatgcgaatgtaaagaatgcggcaaattcttttgccagaagagcgctctaatcgtccatcagcatacacattccaaaggcaagagctatgattgcgataaatgtgggaaaagctttagtaagaatgaagaccttattcgccatcagaagattcacacccgcgataaaacttacgagtgcaaagagtgtaaaaaaatcttctatcacctaagctcattgagtcgccatctgaggacccatgccggtgaaaaaccctacgagtgtaaccagtgcgaaaagtccttctaccagaagccacatttaacggagcaccagaaaacccatactggcgaaaagccgttcgagtgcacagagtgcggcaagttcttttacgtaaaggcctacctcatggtgcatcagaaaactcatacgggtgagaaaccctatgagtgcaaggagtgtggaaaagcatttagccagaagtcccatttgactgtacaccagcgcatgcacaccggagaaaagccctacaaatgtaaggagtgcggcaagtttttctcccgaaacagtcacctgaaaacccaccaacgatctcacaccggagagaagccctatgaatgcaaggaatgccggaagtgcttttaccagaagtctgctttaaccgtccatcagaggacccacaccggagagaagcctttcgagtgtaataagtgcgggaagacattctactacaagtccgatctgactaagcaccagaggaagcacactggtgagaaaccttacgaatgcaccgaatgcggtaagtcttttgcagtgaattctgtgttacggctgcatcagcgaactcacacaggagaaaagccatatgcttgtaaagaatgcggcaaatccttcagccagaagtcccattttattatacaccagcgaaaacataccggggaaaaaccatatgagtgtcaagaatgcggcgaaacatttatccagaaaagccagctaacagcccatcaaaagacacataccaaaaagagaaacgcagaaaagtag

SEQ ID NO: 247463 - DNA, 1500 bp, synthetic construct
  misc_feature 1..1500: note = Description of Artificial Sequence: Synthetic coding sequence
  source 1..1500: mol_type = other DNA
atgggacctttgcagtttcgtgacgtggctatcgaattctccctggaggaatggcactgcctggacaccgcccagaggaatctttatagagatgtgatgctagaaaattacagaaatctggtcttcttgggcatcgttgtgtcaaagcccgacctcgttacttgtctcgaacagggcaagaaaccgttgactatggagaggcacgaaatgatcgccaaaccgccagttatgagctcccactttgcccaggacctgtggccggaaaacatacaaaactccttccagatcgggatgctgcgcaggtacgaggaatgtaggcatgataaccttcagctgaaaaaaggatgtaagtccgtgggtgagcataaggtccataaaggtggatataacgggctgaaccagtgtctgacgaccacgcagaaggaaattttccaatgcgataagtacggtaaggtcttccataaattctctaattcaaatacgtacaagacacggcataccggtattaatctgtttaagtgcatcatttgcgggaaggctttcaagcgaagcagtacacttactacacacaaaaagattcataccggcgaaaagccgtacaggtgcgaggaatgtggcaaggcattcaaccagtcagccaacttgaccactcacaaacgcatccatacgggggagaaaccctacaggtgcgaggagtgtggcaaagccttcaaacagagctctaacttgaccacccataagaaaattcataccggcgagaaaccatataagtgtgaagagtgcggaaaagccttcaaccgaagtaccgaccttactacccacaagattgtgcatacaggtgaaaagccctacaagtgcgaggaatgcggaaaagcgttcaagcacccctcccatgtgaccacgcataaaaaaatacacactaggggcaaaccctacaactgtgaagagtgtggcaaaagctttaagcactgtagtaatttaacaatccacaagaggattcacaccggcgaaaagccgtacaaatgtgaggagtgcgggaaggcctttcatctcagcagccatctgaccacacacaaaattctgcacaccggggaaaaaccgtatcgttgtagggaatgcgggaaagctttcaaccactctacgaccctctttagccatgagaagatccacactggcgagaagccttataagtgcgatgaatgcggcaaaacgtttacctggccctcaatcctctccaaacacaaacgtactcacaccggagaaaaaccttacaagtgcgaagagtgcggcaaatcgtttactgctagcagtacactgacgactcataagcgtattcacaccggagaaaagccttacaaatgcgaagaatgcggcaaagcctttaattggagttcagatctcaataaacataaaaaaatccacatagaacggaaaccatacatagtcaaaaatgttactgacctcctgaacgtccccccactgctgatctctatacgctag

SEQ ID NO: 247464 - DNA, 1500 bp, synthetic construct
  misc_feature 1..1500: note = Description of Artificial Sequence: Synthetic coding sequence
  source 1..1500: mol_type = other DNA
atgggtcctctacagttccgagacgtcgctattgaattctcactggaggagtggcactgtctcgacacggcccagaggaatctgtaccgagatgtcatgttagagaactacagaaatcttgtgtttttggggattgtcgtttcaaaacccgacctggtgacctgcctggagcaggggaagaaacccctgacaatggagcgtcacgagatgatcgccaaacctcccgtcatgtcttcacacttcgcacaggatctgtggcccgagaacatccagaactcctttcaaattgggatgttgcggagatacgaagaatgccggcacgacaacctgcagctaaaaaagggctgtaagagcgtaggggaacataaggtgcacaaggggggatacaatggcctcaaccagtgtttgacaacaactcagaaggaaatcttccagtgtgataagtatggtaaggtctttcataagttcagcaattcaaacacttacaagacccgccacacaggcattaacctctttaagtgcattatttgcgggaaggctttcaaaagaagctccacactcacgactcacaaaaagatccacacgggtgagaagccatacagatgtgaggaatgtggaaaggcttttaaccagagcgccaatctgacaacgcacaagcgaatccacaccggagagaaaccatatcggtgtgaggagtgcggaaaggcatttaaacagtcctctaacttaactacgcacaagaaaatccatactggcgagaagccctataaatgtgaagagtgcgggaaagcctttaaccgctctacagacctcaccacacacaaaattgtgcacacgggagaaaagccctataagtgcgaagagtgcgggaaggctttcaaacaccccagtcatgtcacaactcataagaagattcatacaaggggtaagccgtacaattgcgaagagtgcggaaaaagctttaagcactgttctaatctgactatacacaaacgtatccacactggcgagaagccctataaatgcgaggagtgcggcaaggctttccacctgagctcccatcttaccactcataagatactgcataccggcgagaagccctacaggtgcagagaatgtggtaaggccttcaatcatagtaccacactttttagtcacgaaaaaatccatactggagagaaaccttacaaatgtgatgagtgcgggaaaacctttacgtggccatccatattgtcaaagcacaagagaactcacacgggggagaagccttataaatgtgaggaatgtggcaagagctttacagccagctcaacacttacaactcacaagcgaatccacacaggagaaaagccctacaaatgtgaagagtgtggaaaggcgttcaattggtcttctgatctgaataagcataaaaagatacatatcgaaaggaagccctacatcgttaagaatgtgactgatctcttgaacgttccacctctgctgatcagtatccgttag

SEQ ID NO: 247465 - DNA, 276 bp, synthetic construct
  misc_feature 1..276: note = Description of Artificial Sequence: Synthetic coding sequence
  source 1..276: mol_type = other DNA
atgccaggaccgccacggtccctcgaaatggggctcttgacttttagggacgttgctatcgaatttagcctggaggaatggcaacatctggatatagcccagcaaaacctgtaccgcaacgtgatgctggagaattatcgtaaccttgcattcttgggaatcgctgtgtctaagcccgatctgatcacctgtctggaacaagggaaagaaccgtggaatatgaagcggcacgaaatggtcgatgaacccccaggtctggacttcagcctgctgtag

SEQ ID NO: 247466 - DNA, 1725 bp, synthetic construct
  misc_feature 1..1725: note = Description of Artificial Sequence: Synthetic coding sequence
  source 1..1725: mol_type = other DNA
atgtgtccccactttgcgcaggatctgtggcccgagcagggtatggaggattcatttcagaaagctatcttgcggcgatacggcaaatatggtcacgagaatctgcagctgaggaaggggtgtaaatccgtggacgagtacaaggtcaacaaggagggatataatggcctaaatcagtgctttaccactgcacagagtaaggtgttccagtgcgataaatatctgaaagttttctataagtttctgaacagtaatcgcccaaagattagacacactgagaaaaaatccttcaaatgcaaaaagcgagttaaattattttgcatgcttagccacaaaacgcagcacaagagtatatatcatagggagaaatcctacaaatgtaaagagtgcggcaagacctttaattggagctcaactttaaccaaccatcgcaaaatttacaccgaggagaaaccatataaatgtgaagagtacaataagtcaccaaagcaactgagtacccttaccacgcacgaaatcatccacgccggtgagaaactgtataagtgtgaagaatgtggagaagcttttaaccgatctagtaacctcactactcacaaaattatccacacaggagagaaaccctacaagtgcgaggaatgtggaaaagcgtttatttggagttccaccctcactgagcacaaaaaaatccacactcgtaaaaagccatacaagtgcgaggaatgcggtaaagcctttatatggtcttcaacattgactcgacacaagagaatgcacactggcgagaagccctacaaatgtgaggaatgcggtaaggcatttagccagtccagtacgctaacaacgcataagattattcatactggggagaagagatacaaatgccttgagtgtggaaaagcttttaaacagttgagtaccctgacaacccacaaaatcattcacgtaggcgaaaagctgtataagtgcgaagaatgcgggaaaggctttaaccgatcaagcaatctaacaacccataagataattcataccggggagaaaccctataaatgcgaagagtgtggcaaagcattcatctggtcttccaccctcacgaaacacaagagaatccatacgcgggaaaagccttataaatgcgaggagtgcgggaaggcgtttatttggtcctcgaccctcacacgccataagcgcatgcacaccggagaaaagccctataagtgcgaggagtgcggaaagagcttcagccagtcctccacgctaacaacccacaaaataattcacactggtgagaaaccttataagtgtgaggaatgcggcaaggcctttaattggagttctacgctaacaaagcataagattattcacactgaagaaaaaccctataaatgcgagaaatgcggtaaggcctttaagcagtcttctatcctaaccaaccacaagagaattcacaccggcgagaaaccatacaagtgtgaagagtgcggcaagagcttcaacagatctagcacatttaccaagcacaaagtgatccacaccggcgtgaaaccatataaatgtgaggaatgcggaaaagcattcttctggagcagtacgctgacaaagcacaagcggatacacaccggcgagcagccctataagtgggaaaaatttggcaaggcgtttaacagatcttctcacctgaccactgataagataacccactggagagagatactgcaagtgtag

SEQ ID NO: 247467 - DNA, 1980 bp, synthetic construct
  misc_feature 1..1980: note = Description of Artificial Sequence: Synthetic coding sequence
  source 1..1980: mol_type = other DNA
atgcctggccctcccagatcactggagatgggcctgttgacttttagagacgtcgcaatcgagttttcccttgaagagtggcagcaccttgacatcgcacagcagaatttgtacagaaacgtgatgctcgagaattatagaaaccttgctttcctgggcatcgccgttagcaagcctgaccttattacgtgcctggagcagggcaaagaaccgtggaatatgaaaagacacgagatggtggacgagcccccaggaatgtgcccacacttcgcacaggacctctggccagagcagggaatggaagactcttttcagaaagccatcctccgcaggtatgggaagtatgggcacgaaaacctgcagctgcgcaaggggtgcaagtccgtggatgaatacaaagtgaataaagaaggttacaacggacttaatcagtgcttcaccaccgcccagagcaaggtttttcaatgcgataagtacctgaaggtcttctataagttcctcaactctaatcggccaaaaattcggcacaccgaaaagaagtccttcaagtgtaaaaagagggtgaagctcttctgtatgctgtcacataagacacagcacaagtccatctatcatcgagaaaagtcttacaaatgtaaagagtgtggcaaaacattcaactggtctagtacactcactaatcaccgtaagatttatactgaggagaagccctataagtgcgaggagtataataaatccccgaagcagctgtccacactgacaactcatgaaatcatccacgccggagagaaactgtataagtgtgaggagtgcggagaggcatttaatcgttctagtaatcttaccacacataaaatcatacataccggtgagaaaccatacaagtgcgaagagtgtgggaaggcatttatctggagttcaaccttgactgagcacaaaaagattcatactaggaaaaagccatataaatgcgaagaatgtgggaaagctttcatttggtcaagtaccttaactaggcacaaaagaatgcatactggtgagaaaccgtacaagtgcgaagaatgcgggaaggccttcagtcagtccagcacactcacaacgcacaagatcatacacacgggggagaaacgatataagtgcctcgaatgcggtaaggcattcaaacagctcagcaccttgactacgcataaaatcattcacgtcggagagaaactgtacaagtgcgaagagtgtgggaaggggttcaataggtcctcgaatctgaccacacacaagatcattcataccggtgaaaagccttacaagtgtgaggaatgtggaaaagcctttatctggtctagcacccttaccaagcacaagcgtatccatacccgtgagaagccctataaatgcgaagagtgtggcaaggcatttatatggtcatcaaccctgacgcgacacaagagaatgcacaccggagagaaaccctacaaatgtgaggagtgtggaaagtcattctctcagtcctcaaccttaacaactcataaaatcatccacactggggaaaagccttacaagtgcgaagaatgcgggaaagcgttcaactggtcatccaccttgaccaaacacaaaattattcataccgaagagaaaccgtacaaatgcgaaaagtgtgggaaggctttcaagcaaagctccattctgaccaaccacaaaagaattcataccggcgagaagccctataagtgtgaggagtgtggaaaatcgttcaatagaagctccaccttcacaaagcacaaggtgattcacaccggagtgaagccctacaaatgtgaggaatgcgggaaggcctttttttggtctagcaccctcaccaagcataagcgcattcatactggcgagcagccatacaaatgggaaaaatttggaaaggcctttaacaggtcgtcacacctgactactgacaagattacacactggcgggagattttacaggtctag

SEQ ID NO: 247468 - DNA, 1056 bp, synthetic construct
  misc_feature 1..1056: note = Description of Artificial Sequence: Synthetic coding sequence
  source 1..1056: mol_type = other DNA
atgcccggacccccacgaagtctggaaatgggcttgctaacgttccgggacgttgcaattgagtttagcctcgaggaatggcagcacctcgatatcgctcagcagaacctgtatagaaatgtcatgctggagaattaccgcaatctggctttcctgggtattgccgtgtctaagccagacctcattacttgcttagaacaagggaaggagccatggaacatgaaacgccatgagatggtagacgaaccgccaggtatgtgcccgcattttgcccaggacctatggcccgagcagggcatggaggactcctttcaaaaagccatcttacggcgatacgggaagtacggacacgaaaatcttcaattgaggaaaggttgcaaatcagttgacgagtacaaagtaaataaagaggggtacaacggcctgaatcaatgcttcacgactgctcaaagcaaggtgttccaatgcgacaagtatttaaaagtgttttataaattccttaacagcaatcggccaaaaatacgacatacagagaagaagtcttttaagtgcaagaagcgagtcaaattgttctgcatgctgagccacaaaactcagcacaagagcatataccacagagaaaagtcatacaagtgtaaggagtgcggcaagaccttcaactggagttctacactgaccaaccatcgcaaaatctatacggaggaaaaaccttacaagtgcgaagaatacaataaaagccccaagcagttgagcaccctgacaacccacgagatcatccacgcaggcgagaagctgtacaaatgtgaggagtgtggagaggccttcaaccggagttctacattcacgaagcataaggtcatacatacaggagtgaagccctataagtgcgaggagtgcggcaaggcttttttctggtcctctacgctgacaaagcacaaaaggattcataccggggaacaaccatacaagtgggaaaagttcggcaaagcttttaataggtcttcccatttaaccaccgacaagatcacccattggcgagagattcttcaagtgtag

SEQ ID NO: 247469 - DNA, 1884 bp, synthetic construct
  misc_feature 1..1884: note = Description of Artificial Sequence: Synthetic coding sequence
  source 1..1884: mol_type = other DNA
atggccgctgctgaattgacggcccctgcgcaaggcatagtgacatttgaagatgtggcagtgtatttcagctggaaagaatggggactgctggatgaagcccagaaatgcctgtaccatgacgtcatgcttgaaaacctgactctcaccacctcactcggaggaagcggggcaggggacgaagaggcgccatatcagcagtctacatcaccgcagcgtgtgtctcaagtgcgtatccccaaggctttgcctagcccccaaaagaccaacccttgtgaaatttgtggcccagttcttcgacagattctccatctggtggaacatcaaggaacccatcacggacaaaagctgtacactgatggagcctgcagaaaacaactccagtttactgcctatctgcatcaacaccagaaacagcacgtcggacagaagcacttccgttctaacgggggacgagacatgttcctcagctcctgcacatttgaagtctcagggaagccatttacttgtaaggaagttggaaaagactttctcgtacggtcccggtttctccagcagcaggcagcccatacaagaaagaagtctaatagaacgaagagtgctgtggcatttcacagcgtcaagaaccattataattggggagagtgtgtgaaggcatttagctacaagcacgtacgcgtgcagcaccaaggagaccttattagggagaggagctacatgtgttctgaatgtggcaagtctttttccacatcatgtagcctgagtgaccatctgcgcgtgcatacatccgagaaaccttacacttgtggagaatgtgggaaatcctatagacaatcttcctcactgataacacacagaagaatccacacaggggttcggcctcaccagtgcgacgagtgtggcaaactcttcaaccggaaatatgatctgctgattcatcagagagttcacaccggggaacgaccctacaagtgttccgagtgtggtaagtccttttcacattcatcttcgcttatcactcatcagcggatccacacaggcatgcggccatatgagtgttccgagtgtgggaaaagttttatacactccagtagcttgatcacacaccagcgggtccacactggtacccggccatacatgtgttcagagtgcggcaagagcttttcccagagctgccatctgatcaagcataggcgcctacacatcggcgagggaccgtacgaatgcagtgagtgcggaaaactgtttacatatcgctcaagattttttcagcaccagcgtgttcacacaggtgtacgctcacatgagtgtcatgagtgcgggaaacttttctcccgaaagtttgatctgatagtgcacgagcgcgtgcatactggcgaaagaccctacgagtgtagtgagtgcgggaaaagttttacatgcaaaagctacttgatttctcactggaaggtacacacaggcgctaggccttacgagtgcggcgaatgcggaaaaagtttcactcacagctcgacacttttgcaacaccagcgcgtccacacaggtgaacgcccatacgagtgtaacgaatgtgggaaattcttcagtcagtcttcctcactgatcagacaccgacgctcccacacaggcgaaaggccatatgagtgcagtgaatgttggaagtccttcagtaatcacagctcactcgtgaaacaccgtcgcgtgcacaccggggagcgtccttatgaatgttcggaatgtgggaagtcctttagccaatctagcaatctcacaaatcatcaaagaatccattctggagagagaccttacgagtgcagtgattgcggcaaattttttacctttaactcgaatttgcttaaacatcagaatgtccacaaaggctag

SEQ ID NO: 247470 - DNA, 1608 bp, synthetic construct
  misc_feature 1..1608: note = Description of Artificial Sequence: Synthetic coding sequence
  source 1..1608: mol_type = other DNA
atgggccctctgacaatcagggacgttaccgtcgaattttccctggaagagtggcactgtctggacacagctcagcaaaatctctaccgagatgtaatgttggagaattacagaaatctcgtattcctgggtatcgctgtgagtaaacctgatttgatcacatgcctggaacagggaaaggaaccctgtaacatgaagagacacgagatggtggccaaacctccagtgatgtgcagccacatcgccgaggatctctgccctgagagggacatcaagtatttttttcagaaggtgattctgagacgttatgacaaatgcgaacacgagaacttgcagctccggaagggatgcaaaagcgtagatgagtgcaaggtctgcaaaggaggatataatggcctgaatcagtgcctgatcacaactcaatccaaaatgtaccagtgtgacaagtatgtaaaggtgttctacaagttctctaacagtgaccgccataaaatccgtcatactgaaaagaaaacctgtaagtgtaaagagtgcggtaaagcctttaaccagtcctccgccctgacccgccataagatgactcatacaggggagaagccttacaaatgtgaggaatgcggtaaggcattcaataggtccagtcacctgacacagcacaaggttattcacacacgggaaaaaccctataaatgcgaggagtgtggtaaagccttcaatagatctagccatataactcaacacaagcggatccacaaccgagagaagccatttaaatacgacgagtgttgcaaagcatttaagtggtcctctgcgttgactaccttaacccagcataaacgtatccatacaggagagaagccatacaaatgtgaagaatgtggcaaggctttcaaccaaagttctgccctcacgaggcataaaatgatacacacaggtgagaaaccgtttcagtgtgaggagtgcggcaaggctttcaaccgctccagtcaccttacacagcacaagatcattcacactaaggaaaaaccctacaagtgcgaagaatgcggtaaggcctttaatcgcagctctcacctcactaaacataagagaattcatacacgggagaaggcatacaagtgcgacgagtattgcaaggcctttaactggtcttccgcgctgacaacactaacacagcacaagataatccacaccggggaaaagccatataaatgcgaagaatgtggaaaagcctttaacaggtcctcttaccttatcaggcacaaaatcatccacacgggagagaagccttataagtgtgaggagtgtggcaaggccttcaaccagtccagccatctgacccagcacaagatcattcacaccggagagaaaccttataaatgtgaagagtgcggcaaggcctttaaccggagttctcacctttctcagcacaaaatcattcatactggcgagaagccctacaaatgtgaagaatgtgggaagcccttcaacaggttttcctaccttactgtgcataagcggattcacgccggtgaaaatcccaacaagtatgaggaatgcggtaaggcctgcaatcactcgtctaacttgacaaagcataacagctag

SEQ ID NO: 247471 - DNA, 1692 bp, synthetic construct
  misc_feature 1..1692: note = Description of Artificial Sequence: Synthetic coding sequence
  source 1..1692: mol_type = other DNA
atgggaccgctcacgatccgcgatgttaccgttgaatttagtctggaagaatggcattgtcttgataccgctcagcagaacctgtaccgcgacgtgatgctcgaaaactatagaaatctggtttttcttggcatcgcagtatctaagccggaccttattacatgtctggagcagggcaaagaaccatgcaacatgaaaaggcatgagatggtcgctaagcctcctgtcatgtgttcacatatcgccgaagacctgtgtccagagagagatatcaaatattttttccagaaggtgatactacgtcgatacgataagtgcgagcacgaaaacttgcagctgcgtaaagggtgcaagtccgtagatgaatgcaaagtgtgtaagggcggatataatggacttaaccagtgcctgattactacacagtccaaaatgtaccagtgtgacaagtacgtgaaggtattttataagtttagcaactccgatagacacaagattcgccatactgagaagaaaacgtgcaagtgtaaagaatgtggaaaaagcttctgcatgctgtcccagctgacaagacacaagcgcatccatatccgagagaattcccataagtgcgaagaatgtggaaaagcctttaatcagagctccgccctgactagacataagatgactcacacaggggaaaaaccatacaaatgcgaggaatgcggaaaggccttcaataggagcagtcacctgacccaacataaagtgatccacacccgcgaaaagccatacaagtgcgaagagtgtggaaaagcattcaatcgttcttcacatattacccagcacaaaagaatccataacagggagaagcccttcaagtacgacgagtgctgcaaggccttcaaatggagtagtgccctgaccaccctgacccagcacaagagaatacacactggagagaagccgtataaatgcgaggaatgtggcaaggcatttaaccagagttccgcccttacacgccacaagatgattcacaccggggaaaagccgttccagtgtgaggagtgcggcaaggcttttaacagaagttcccatttgactcagcacaagattattcacaccaaggagaaaccctacaaatgtgaagaatgcggcaaggcattcaaccgcagttctcacctgaccaagcacaaacggatccacaccagggagaaggcttacaagtgcgatgagtattgcaaagctttcaattggagctccgccttgacaacgctaacccagcacaaaatcatccatacgggcgaaaaaccgtataagtgtgaagagtgcggaaaagcattcaacaggagtagttacttgatacggcacaagataattcatactggtgaaaagccatataagtgtgaggaatgtggcaaggcctttaatcagagctcccacctcacacagcacaagatcatccacacaggagagaaaccctataagtgtgaagagtgcggaaaggccttcaatcgctcatctcatttgagccagcacaagattatacatacaggtgagaagccctacaaatgtgaggagtgcggaaaaccctttaatagattttcgtatcttacagttcacaaacggattcacgccggtgaaaaccccaataagtacgaggagtgcggcaaggcctgcaatcacagcagcaacctgacaaagcacaattcatag

SEQ ID NO: 247472 - DNA, 1692 bp, synthetic construct
  misc_feature 1..1692: note = Description of Artificial Sequence: Synthetic coding sequence
  source 1..1692: mol_type = other DNA
atgggcccactgactatcagagacgtgaccgtggagttctccctcgaagagtggcactgcctcgacactgcccagcagaacctttaccgcgacgtgatgctcgaaaactatagaaacctcgtttttcttggaattgccgtttctaagcccgatctgatcacgtgcctagagcagggtaaggaaccttgtaacatgaaacggcacgaaatggtagccaagcctcccgtgatgtgcagccatatcgctgaagacctgtgccccgaaagggatatcaagtacttctttcagaaagtgattcttcgcagatacgataagtgtgagcacgaaaatctgcagctgcgaaagggttgtaaatcggtagatgaatgtaaggtgtgtaagggcggttacaacggcttgaatcagtgcctcatcaccacgcagtctaagatgtaccagtgtgataaatacgtgaaagtgttctataagtttagtaactcagataggcataaaattaggcatacggaaaagaagacctgtaagtgcaaagaatgtggaaaaagcttttgcatgttgtcacaattgaccaggcataagcgcattcatattcgagaaaatagccacaagtgtgaggagtgcggaaaagcatttaaccagtcctccgctctgacccggcacaagatgacacacaccggagagaagccctacaaatgtgaggagtgcggaaaggctttcaataggagtagccatctgactcaacacaaagtcatccacacgcgcgagaagccatataagtgtgaggaatgcggtaaagcatttaatcgttcttctcacattacccagcacaagagaattcataacagagagaagccctttaagtacgacgagtgttgcaaggcctttaaatggtctagcgcactgaccactctgacgcagcataagagaatacacacaggagagaaaccatataagtgcgaagaatgtggaaaggcctttaaccagtccagtgctttgaccagacataaaatgattcacaccggggagaagccatttcaatgcgaagagtgcggaaaagcctttaatcggtctagtcatttgactcaacataagattattcataccaaggaaaagccctataagtgtgaggaatgtgggaaagctttcaacagaagctcccatttaaccaaacacaagcggattcatacaagggagaaggcttacaagtgtgacgaatactgtaaagcattcaactggtcctccgctctgaccactctgacacaacacaagataattcataccggggaaaagccatacaagtgtgaggaatgtgggaaggcttttaatcgctcatcttaccttatcagacacaaaattatccacactggggagaagccctacaaatgcgaagagtgtgggaaggcgtttaatcagagtagtcatctgactcagcacaagatcatccacaccggcgagaaaccttataagtgcgaggagtgtggcaaggccttcaaccggtcttctcatttgtcacagcacaagataatccacactggagaaaagccgtacaaatgcgaggagtgcgggaaaccattcaacaggttctcctacctcaccgtgcacaagagaatccatgctggcgaaaaccctaataaatacgaggaatgcggcaaggcctgtaaccatagctctaacctcacgaaacataactcctag

SEQ ID NO: 247473 - DNA, 1602 bp, synthetic construct
  misc_feature 1..1602: note = Description of Artificial Sequence: Synthetic coding sequence
  source 1..1602: mol_type = other DNA
atggccacatcatttagaaccgcctcatgctggggccttttgagcttcaaagatatatccatggagttcacttgggacgagtggcagctcttggattcaactcagaaatacctttaccgagatgtcatcctggagaactatcacaacctgatctcggtcggatatcacggaacaaagcctgatctgatttttaaactggaacaaggggaggatccttggataatcaacgcaaagataagtagacagtcctgtccggacggctgggaagagtggtatcaaaacaaccaggatgagcttgaaagcatcgaaagatcctacgcatgcagcgtactggggaggctgaatttatccaaaacccatgatagttccaggcagaggttgtataatacacgaggaaagtccctcacccaaaactctgccccatcacgctcatatttgcgcaaaaaccctgacaagttccacggatacgaggaaccgtattttctaaaacaccagcgcgctcactccatcgagaaaaactgtgtttgctctgaatgcggcaaagcttttaggtgcaagtcgcaactcattgtacacctccgcatacacacaggtgaacggccttacgaatgttccaagtgtgaacgcgcattcagcgccaaaagtaatttgaacgcccatcagcgcgtgcacacaggcgagaagccctactcctgcagtgaatgtgagaaagtgttttcctttcggagccagttaatcgttcaccaggagattcacactgggggtaaaccatacgggtgctcggaatgtggtaaggcctacagctggaagtcccagctgctattacaccagcgtagccacaccggagtaaaaccttatgagtgctctgagtgtggcaaagccttctcactcaagagcccttttgtggtgcaccagcgaacccatactggtgtcaagccccataaatgttcagagtgcggaaaggccttcaggtctaagtcatatttgcttgtgcacattagaatgcatactggggaaaaaccctatcagtgttctgattgtggaaaggcctttaatatgaagacacagttgattgtccaccagggcgttcatactggcaacaacccataccagtgcggcgaatgcgggaaggcttttgggaggaaagagcagctgaccgcccatctgcgcgcacacgcaggggagaagccctatggttgctccgagtgcgggaaagccttcagctcgaagtcctacctggtcatacacagacggactcataccggagaacgtccctacgaatgttccctctgtgaaagagccttctgtgggaaatcccaacttatcatccaccagcggactcactcgacagaaaaaccctacgaatgcaacgagtgtgagaaagcctacccaagaaaggcgtcactgcagatccaccagaagacgcacagtggcgaaaaaccttttaagtgtagtgaatgcggaaaagcctttacccagaaatcatccttgagtgagcaccaacgggtgcatacaggagaaaagccatggaagtgttcggagtgtggcaaaagtttctgttggaatagcggcctccggatccatcgcaagacccacaaatag

SEQ ID NO: 247474 - DNA, 1542 bp, synthetic construct
  misc_feature 1..1542: note = Description of Artificial Sequence: Synthetic coding sequence
  source 1..1542: mol_type = other DNA
atggagttcacctgggatgagtggcaactgctggactctacacagaagtacttataccgagatgtgattctggaaaattaccacaatttgatctcagttggataccacggaaccaagcctgacttgatatttaagctcgaacagggcgaagacccctggatcattaacgcaaagatctctagacagagctgccctgatggctgggaggagtggtaccagaacaaccaggatgagctagaaagcatagagaggtcttacgcctgttcggtcctaggccgactgaaccttagtaagacccacgactccagcagacagaggctctacaatacacgcggaaagtctttgacacagaattccgcgccatccagaagctatttgagaaaaaacccagacaagttccacggatacgaggagccatactttctcaaacaccagcgggcacacagcatcgagaagaattgcgtctgttcagaatgtggtaaagcttttcgatgtaagagtcagttgatcgtgcacctgcgaatccacacgggagaaagaccttatgagtgcagcaagtgcgaaagagccttcagcgcgaaaagcaacctgaatgctcatcaaagggtgcacacaggagaaaagccctattcgtgttctgaatgcgagaaagtgttttcattcaggagccagctgattgtgcaccaggagatccacaccggaggtaaaccatatgggtgcagcgagtgcggaaaagcttactcctggaagtcacagctcctgctgcaccagagaagccacaccggtgtcaaaccttatgagtgttccgagtgcggtaaagcatttagcctgaagtccccttttgtcgtacatcagcgcacacacacgggcgttaagcctcacaaatgttcagagtgtggaaaggcttttcgaagtaagagctacttgctagtgcatataaggatgcatacaggcgaaaagccctatcagtgcagtgactgtgggaaggcatttaacatgaagactcagttgattgtgcatcagggcgtgcacaccggaaacaatccctatcagtgtggagaatgtgggaaggcatttgggaggaaggagcaacttaccgcgcacctcagagctcatgctggcgagaaaccatatgggtgcagcgaatgtggcaaggctttcagttcaaaatcctacctggtgatccacaggcggactcacacgggagagcgaccctatgaatgttcactttgtgagagagctttttgcgggaagtctcagctaattatccaccagaggacgcattccacagagaagccctacgaatgtaatgaatgcgaaaaggcttatcctcgaaaggctagtttgcagattcaccagaaaacccatagtggagaaaagccatttaagtgttctgagtgcggaaaagccttcactcaaaagtcatctctttctgaacaccagagggtgcacactggcgaaaagccatggaaatgtagcgagtgcgggaaatcattctgctggaatagtgggctcagaatccaccggaagactcacaagtag

SEQ ID NO: 247475 - DNA, 1239 bp, synthetic construct
  misc_feature 1..1239: note = Description of Artificial Sequence: Synthetic coding sequence
  source 1..1239: mol_type = other DNA
atgattggcatgttggaatctttgcagcacgagtccgatctgctccagcatgaccagattcacactggggaaaaaccttacgagtgcaatgaatgccgcaagaccttcagcctgaagcagaatctcgtggaacataagaagatgcatacaggggagaagagccatgagtgcacagaatgcggaaaagtgtgctcccgcgtgtcatccctcactctgcatttgagaagccacactggaaaaaaggcgtacaagtgcaacaagtgtggcaaagccttctcacagaaggaaaattttcttagccaccagaaacaccacactggagagaagccctatgagtgtgagaaggtgagtattcaaatgccaaccatcatccggcatcagaagaatcacactggaacaaagccctatgcatgcaaggagtgcgggaaagcctttaacggaaaggcctacctgaccgaacacgaaaagattcacacaggggaaaaaccttttgagtgcaaccagtgtgggcgtgccttctcccagaagcaatacttgatcaaacatcagaatatccatactgggaagaaaccattcaagtgcagtgaatgcggaaaggcctttagtcagaaggagaacttaattattcaccagcgcatccacacaggcgagaagccctacgagtgtaaagggtgcggcaaggcttttatccagaaatccagcctaatcaggcaccagcggtctcatacaggggagaaaccctatacatgtaaggagtgcggcaaagccttctctggaaaatccaacttaacagaacacgagaagattcacatcggcgaaaaaccctataagtgcaatgagtgtgggactatttttcgacagaaacaatatctaattaagcaccataatatacataccggggaaaagccgtacgaatgtaataagtgcgggaaagccttctctagaattacatcactcatcgtgcacgtccggatacatacaggcgacaagccatacgagtgcaaggtttgcggtaaggcattctgccagagcagttccctgaccgtgcatatgcggagtcataccggggagaagccatacgggtgcaatgagtgcgggaaggcgttttcacagttttcaaccctggccctacatatgagaatacatactggagaaaagccatatcagtgcagcgagtgcggtaaagccttcagtcagaagagccaccatatcaggcaccagcgaatccacacgcactag

SEQ ID NO: 247476 - DNA, 1239 bp, synthetic construct
  misc_feature 1..1239: note = Description of Artificial Sequence: Synthetic coding sequence
  source 1..1239: mol_type = other DNA
atgatagggatgttggaatcccttcagcatgagtccgatctgcttcaacacgaccaaatccatactggagaaaaaccctatgaatgcaacgaatgcaggaagaccttttcgttaaagcagaacctggttgagcacaagaagatgcacaccggggaaaagtcacacgaatgtaccgagtgtggcaaggtgtgttctcgggtctcttccctgaccttgcacctgaggtcacatacaggaaaaaaggcctacaagtgcaacaaatgcggcaaagccttctctcagaaagaaaacttcttaagccatcagaagcatcacacaggagaaaaaccctatgagtgcgaaaaagtaagcatccagatgcctacaattatacggcaccaaaagaatcacaccggcacaaagccttacgcatgtaaagaatgcgggaaggccttcaacggaaaagcctatctcactgagcacgagaagattcacacaggggaaaaaccatttgagtgcaaccagtgtggtcgggctttctcacagaaacagtacctgataaagcaccagaatattcatactggcaagaagccctttaagtgttctgagtgtggtaaagccttttcacagaaagagaatctgattattcatcaaagaattcacacaggcgaaaagccctatgagtgtaaaggctgcggtaaggctttcatccagaagtcctctctgatcaggcatcagcggagtcacactggcgagaagccctacacctgtaaagaatgcggtaaggccttctctggcaaaagcaatctcaccgaacatgaaaagatccatatcggagagaagccctacaagtgtaacgaatgtggtacaatttttaggcaaaaacaatatctaataaagcaccataacatccataccggtgaaaagccgtatgaatgtaacaagtgtgggaaagctttctctaggatcacctccttgattgtgcacgtgcgtatccatacaggtgacaagccttatgaatgcaaggtctgcggcaaggctttctgccagtcatccagtctcacagtccacatgcgatcacacaccggtgaaaaaccatacgggtgcaacgaatgcggaaaagctttttcacagttttctactctggccctgcacatgcgaattcataccggtgagaagccgtaccagtgttccgagtgcgggaaggccttctcccagaaatcccaccacatacgccaccagcgcatccacacccactag

SEQ ID NO: 247477 - DNA, 1884 bp, synthetic construct
  misc_feature 1..1884: note = Description of Artificial Sequence: Synthetic coding sequence
  source 1..1884: mol_type = other DNA
atggcagccgctgtgttgactgaccgagctcaggtaagtgtgacattcgatgacgtcgccgttaccttcactaaggaggagtggggccagttagacctggcacagaggaccttgtaccaagaggtgatgctcgaaaactgtggattgctggttagtttgggatgcccagttcctaaagcagagctcatatgtcatcttgaacacggacaggaaccttggacacgcaaggaagacctctcgcaagacacgtgccccggtgataaaggcaaacctaaaaccacagagcccacaacatgcgagcctgccctttctgagggcatctctctccaagggcaggtcacgcagggtaattcggtggatagccagctgggccaggcggaggaccaggacggcctgtccgagatgcaagagggccacttccggccaggcatagatccccaggaaaaaagccccggaaagatgagcccagaatgtgacgggctcggcaccgccgacggagtgtgtagtagaattgggcaggagcaagtgagcccaggagaccgcgttagatctcacaacagctgcgaatctggtaaagaccctatgattcaggaggaagaaaacaactttaaatgtagcgagtgtgggaaggtctttaacaagaaacacctcctggccggtcatgagaagatccattcaggtgtcaagccttacgagtgtactgaatgtggcaaaacatttattaagtctactcatcttttacaacatcacatgattcatacaggagagagaccctacgaatgtatggaatgcggaaaggccttcaatagaaagtcctatctcactcagcaccagcggatccatagcggggaaaagccttataagtgcaacgagtgtggcaaggcattcacgcacagaagcaatttcgtattacacaatcgcagacacactggagagaagagctttgtgtgtacagaatgtggacaggtctttcgacacagacccggatttctccgacactacgttgtccacagtggtgagaatccctacgagtgcttagagtgcggtaaggtgtttaaacatagatcctacctaatgtggcaccagcagacccatactggggagaagccctatgagtgttccgagtgcggcaaagtattcctggaatccgcagcactaattcaccattatgtgatacacacaggtgaaaagccgtttgagtgtttggaatgcggaaaggcatttaaccataggagctatctgaaacgacaccaacggattcacactggcgagaagccatttgtgtgttctgagtgcgggaaagcctttacgcattgcagcacattcatcctccataaaagagcccacaccggagagaagccatttgaatgcaaagagtgcggcaaggcgttctctaatcgcaaggacttgatccgtcatttttcaatccacaccggggagaagccctacgaatgtgtagagtgcgggaaagccttcactcgcatgagtgggctcacacggcacaagaggatccactcgggcgaaaagccttatgaatgtgtagaatgcgggaagagtttttgttggagcaccaacttgatccgccatgcaattatccataccggtgagaaaccttataaatgttccgagtgtggtaaggccttctcccgtagcagtagcttgacacaacaccagcgaatgcacacgggaaagaaccctatcagcgtcactgatgtggggcgaccattcacaagtgggcagacctctgtgactctgagggagctccttttaggcaaagattttcttaatgtaacgacggaggcaaatatcctgcctgaagagacatccagtagcgcatcagaccagccctaccagcgcgagactccgcaggtgtcttccctgtag

SEQ ID NO: 247478 - DNA, 1884 bp, synthetic construct
  misc_feature 1..1884: note = Description of Artificial Sequence: Synthetic coding sequence
  source 1..1884: mol_type = other DNA
atggcggcagccgtgctcacggacagggcccaggtctcggtgacgtttgacgacgtggctgttacttttactaaggaggagtggggccagttggatttagcgcagcgaacgctgtaccaggaggtcatgctggagaactgcgggctcctggtgagcttaggatgccctgtgcctaaggctgagcttatctgccaccttgagcacggccaagagccatggactagaaaagaggacctgtcacaggacacgtgcccaggagataaaggtaagcccaaaaccactgagccgacaacctgcgaacccgctcttagtgaaggaatctcactacaaggtcaggtcacacaaggcaattctgtggatagccagctaggccaggcagaagaccaggatggcctctctgaaatgcaggaggggcacttccgcccaggcatcgaccctcaggaaaagagccccggtaagatgtcccccgagtgtgacgggctgggaaccgcagatggagtgtgttcacgcatcgggcaggagcaagtcagccctggagaccgggtgcgctctcacaattcttgtgaatccgggaaagatcctatgatccaagaggaggaaaataatttcaagtgctcagagtgcggaaaggtctttaataaaaagcatctgctggctggacacgaaaagattcattcgggggtgaagccttacgagtgtactgagtgtgggaaaacgtttattaagagcacgcatctgctgcaacaccatatgatccatacaggtgagcggccatacgaatgcatggagtgcggcaaggcttttaaccgtaagagctacctgacacaacaccagaggatacacagcggcgaaaagccctataagtgtaatgagtgtgggaaagccttcacccacagatccaactttgtcctgcacaataggcggcatacaggcgaaaagagcttcgtctgcaccgaatgtggccaggtgtttaggcatcggccagggtttctcaggcactacgttgtacactctggcgagaatccctatgaatgcctggaatgcggaaaggtgtttaaacaccgcagctatctgatgtggcaccagcaaacacacacaggcgagaaaccatatgagtgtagcgaatgtggcaaagtatttctggaatccgcagcactgatccatcactacgtgatccacaccggggaaaaaccatttgagtgccttgagtgcgggaaagcctttaaccatcgctcctatctgaagaggcaccagcgaatacacacgggggaaaagccctttgtatgttctgaatgcggaaaagcatttacccattgctccacatttattctacacaagagagcccacacgggggaaaagcctttcgagtgtaaagaatgtggcaaggcattttctaatagaaaggacctgattcggcatttttccatccacaccggggagaaaccatatgagtgtgtggagtgcgggaaggcatttactcgtatgtctgggttgacgagacacaaacgaatccattcaggagagaagccctacgagtgcgtggagtgtggaaaaagtttctgttggtctaccaatttgatccgccatgcgattatacatacaggcgaaaagccttacaagtgctcagagtgtgggaaagccttctcacggagctcatctctgacacagcaccagagaatgcacacaggaaaaaacccaatatctgtgaccgacgttgggaggccatttaccagtggtcagaccagtgtgacgctaagggagctgctgcttggtaaggattttctgaatgtaaccacagaagccaacatcctgccagaagagacttcatcatctgcctcagaccaaccatatcaacgcgagaccccccaggttagctccctgtag

SEQ ID NO: 247479 - DNA, 1650 bp, synthetic construct
  misc_feature 1..1650: note = Description of Artificial Sequence: Synthetic coding sequence
  source 1..1650: mol_type = other DNA
atgcttgaaaactacaagaacctggcaacggtgggatatcagctgttcaagccctccctcatttcctggcttgagcaggaggaatctcgcactgttcagcgcggtgactttcaagcaagcgagtggaaggtccaactaaagactaaggagctggctctgcagcaggacgtcctgggggaacccaccagcagcggaatccagatgattgggagccataatggaggagaggtctccgatgtcaagcaatgcggggatgtcagctctgagcattcttgcctgaaaacacacgtgaggacccaaaattctgagaacacttttgaatgctatttgtacggcgtggactttctcaccctccacaaaaaaacctccactggggagcagcgaagtgttttcagtcaatgtggcaaagccttttctcttaatcctgatgtcgtctgtcagaggacttgtaccggcgagaaggccttcgattgctccgacagtggaaaatcatttatcaatcacagccacctgcagggacacttgcgtactcacaatggcgagtctctgcatgaatggaaggaatgtggcagaggtttcatacattcgaccgacctcgccgttcgcatccagacacacaggtcagaaaagccctacaaatgcaaggagtgcggcaaagggtttagatactccgcctatcttaatattcatatggggacacacactggcgacaatccatatgagtgtaaagagtgtggcaaagcatttacgaggtcatgtcagctaacccagcacaggaaaactcatactggggagaaaccatacaagtgtaaggactgcggaagggcctttacggtttcttcttgtctctcccaacatatgaagatccatgttggggagaaaccttacgagtgtaaggagtgtgggattgcctttacgcggtcctcccagcttactgaacatcttaagactcacaccgccaaagatccatttgaatgcaaaatttgtgggaagtcgttccgcaacagcagttgcctgagcgaccattttcggatccacaccggtatcaagccctacaaatgtaaagattgtggcaaggcgtttacacagaacagtgacctgacaaaacatgctaggacacattccggcgaacggccatatgagtgtaaagagtgtggcaaggcattcgctcggtcttcacgcctcagtgaacacactcgcacacacaccggcgagaagccctttgaatgtgtgaagtgtggtaaggcgtttgcaatcagctcaaacctctctggacatctccgcatacatactggtgagaagcctttcgaatgtcttgaatgtggcaaagcctttactcattccagcagcctgaacaatcacatgagaacacattctgctaaaaaaccatttacctgtatggagtgtggtaaggcgtttaagtttccaacatgtgtgaacctgcatatgaggattcataccggcgagaagccctacaagtgcaagcagtgcgggaaaagcttttcatactccaatagctttcagttgcatgagcgaacgcacaccggcgaaaagccctacgaatgcaaagaatgtggcaaagccttcagcagttcttcttccttccgtaatcacgagcgaaggcacgcggacgagaggctatccgcctag

SEQ ID NO: 247480 - DNA, 1650 bp, synthetic construct
  misc_feature 1..1650: note = Description of Artificial Sequence: Synthetic coding sequence
  source 1..1650: mol_type = other DNA
atgctagaaaactacaaaaatctggccactgttggttatcagctgtttaaaccctctctgatttcctggctggaacaagaagagtcacgtactgtacagagaggggattttcaagcgtcagagtggaaagtccaactgaaaactaaggaattagcccttcagcaggacgttctcggagagcccaccagtagtggaattcagatgattgggtctcacaatggaggggaagtctctgacgtcaaacagtgcggagatgtgagctctgaacacagctgtctaaagacccacgtgcgtactcagaattctgagaacacatttgagtgttacctatatggggtcgatttcctaaccttgcacaaaaaaactagtacgggtgagcagagatccgtcttttcccaatgcggtaaagcattctctttaaacccggacgtagtctgccagcgtacctgcacaggggagaaggcattcgactgctccgattcaggcaagtctttcataaatcactcgcatcttcagggccatctgcggacccataatggggaatccctgcatgaatggaaggagtgcggacgcggattcatacattctaccgacctggccgtcaggatccagacgcaccggtcggagaaaccctataagtgtaaggagtgcgggaagggtttccgatactctgcttaccttaacattcacatggggacccacacaggggataatccatatgaatgtaaggagtgtggcaaagcatttacgcggtcctgccaattgacccagcaccggaaaacccacactggtgaaaaaccttataagtgtaaggactgcggcagggctttcaccgtgtctagttgcttatcccaacacatgaagattcacgttggggagaaaccctatgagtgtaaagagtgcggaattgccttcacccggagcagtcagttaactgagcatctgaagactcataccgcaaaggacccctttgagtgcaaaatttgcgggaagtcttttcgcaactccagttgtctttctgatcactttaggatacacaccggtatcaagccgtacaagtgcaaggactgtggcaaggctttcacacagaatagcgatttgactaagcatgcacgtacccacagcggcgaacggccttatgagtgcaaggagtgtggaaaagcctttgccagatcgagtagattgtctgagcacacgagaacccatactggggagaagccctttgaatgcgtcaagtgcggtaaggccttcgccatttccagcaacttgtccggacatctgcgcatccatactggtgaaaagcccttcgagtgtcttgaatgcggcaaggcctttactcattccagctctctcaacaaccacatgcgtactcactctgccaaaaaaccctttacctgtatggagtgtggcaaagcgttcaagttccccacttgcgttaacctgcacatgaggatacacaccggggagaaaccttacaaatgtaagcagtgcggcaaaagtttcagctacagcaattcttttcagctgcacgaaaggacccataccggcgagaagccatacgaatgcaaggaatgcggcaaggctttttcctcctcctcttcattcaggaaccacgagcggagacacgctgatgagcgtctgtcagcttag

SEQ ID NO: 247481 - DNA, 1650 bp, synthetic construct
  misc_feature 1..1650: note = Description of Artificial Sequence: Synthetic coding sequence
  source 1..1650: mol_type = other DNA
atgctggagaattacaagaatctggctaccgtggggtatcagctgtttaagccatctcttatatcatggttagagcaggaagaatcacggaccgtgcagcggggagattttcaggcgtccgagtggaaagtccaactgaagaccaaagaattagctttacagcaggacgtgctcggggagcccacatcttcggggatacagatgatcggatcccacaatggaggggaggtgtccgatgtcaaacaatgtggggacgtgtcctctgagcattcatgcctaaaaacacacgtccgcacccagaacagcgagaacactttcgagtgttatttatacggcgtagattttttgactcttcacaaaaagacctccactggagagcagaggtcagtcttctctcagtgtggaaaggcatttagcctgaaccctgacgtcgtctgccagagaacatgcaccggagaaaaggcctttgattgtagcgacagcggtaagagcttcatcaaccactctcacctccaggggcatctccgcacacacaacggtgaatccctccacgagtggaaagagtgcggccgaggttttattcattctactgatttagcggtgcggatccagacacatcgaagcgagaagccatacaaatgcaaagaatgcggtaaggggttccggtactcagcctacctcaacatccacatgggaacacacacaggcgataacccttacgaatgcaaggagtgcgggaaggcctttactcgtagctgccaacttacccagcatcgaaaaacacacactggcgagaaaccctataaatgcaaggattgtgggagggcatttacggtgtcatcgtgtctatcccagcacatgaaaatccatgtaggagaaaagccatatgagtgcaaggaatgtggcatagctttcacccgctcttcgcagctgaccgaacatctgaagacgcacactgccaaggatccgtttgagtgcaaaatctgcggaaagagcttccgaaacagctcatgcctgagcgatcacttcagaatacatacggggataaaaccatacaagtgcaaggactgcggtaaggctttcacacagaattctgacctcacaaagcacgccaggactcacagcggggaacgtccttacgagtgcaaggagtgcggcaaagcgtttgcaaggagttcaaggttatctgaacatacacggactcacaccggggagaaacctttcgagtgcgttaagtgcggaaaagcattcgcaatctctagcaatctttccggacacctcaggatacacaccggggaaaaaccattcgagtgtctcgaatgtggaaaggcttttactcacagctcatccctcaacaaccacatgcgcactcactcagccaagaagcccttcacctgcatggagtgtggtaaggcctttaagtttcccacttgcgtgaacctgcatatgaggattcacaccggtgaaaaaccctataaatgtaagcagtgtggtaaatcatttagctatagcaatagttttcaactccacgaacgaacacacaccggcgaaaagccatatgagtgcaaggagtgcggtaaggcattctcctcctcatcctctttccgcaatcacgagagaaggcatgctgacgaaaggctgagtgcctag

SEQ ID NO: 247482 - DNA, 2232 bp, synthetic construct
  misc_feature 1..2232: note = Description of Artificial Sequence: Synthetic coding sequence
  source 1..2232: mol_type = other DNA
atgggtctcctgacctttcgcgatgtggccgttgaattctctctggaggagtgggaacatctggaaccagcacagaaaaatctctatcaggatgttatgctggagaattaccgcaatctggtatctttgggtcttgttgtctccaagcccgatcttataaccttcctggagcagcggaaagagccttggaatgttaaatcagaggagacagtggctatccagcccgatgtattctcccactacaataaggatctgctgacggagcactgtaccgaagcctcattccagaaggtgattagtaggagacatggatcatgtgatttagagaacctgcacctccgcaagaggtggaaacgcgaagagtgcgaggggcacaatggatgctatgacgagaaaacattcaaatatgaccagtttgacgagtcctccgtggaatctctgtttcaccagcagattctcagctcgtgtgctaagagctataactttgatcaatatagaaaagtgtttacccatagcagccttcttaatcagcaggaagagattgatatatgggggaaacaccacatttacgataaaacttctgttctgtttcgacaagtttctactctcaactcctataggaacgtgttcatcggagagaagaactaccattgtaataacagcgaaaaaacactcaatcagtcatcatcccctaagaaccaccaggaaaactacttcctggaaaagcaatacaaatgtaaagagtttgaggaggtattcctccagtcaatgcacggacaagagaagcaggaacagagttataaatgcaataagtgcgttgaggtgtgcacacagtcacttaaacacatccagcaccagaccattcatattagggagaattcgtactcgtataacaagtatgacaaggacctttctcaatcctctaacctccggaagcagataattcacaacgaggaaaagccatacaagtgcgagaagtgtggagactcgctcaaccactccctccatctcacacagcatcagatcattccgaccgaagagaaaccctgtaagtggaaggaatgtggaaaggtcttcaacttgaactgctccctctatctcactaaacagcagcagattgacaccggcgagaatttgtataagtgtaaggcttgcagcaaaagcttcacccggtcgtccaatctcatcgtccaccagcggatccacacgggtgagaaaccctacaagtgcaaggaatgcgggaaagccttcagatgcagttcatacctgaccaagcataaacgcattcacacgggcgagaaaccatacaagtgcaaggaatgcggtaaagcattcaaccgaagttcgtgccttacgcaacatcaaacgacccacacaggagaaaaactctacaagtgtaaggtttgttccaagagttatgccagatcctccaatctgatcatgcatcagcgtgttcatacaggagaaaaaccttacaagtgcaaagagtgcgggaaagtgttttcaagatccagctgccttactcaacacaggaagattcatactggggaaaatctgtacaaatgcaaggtctgtgccaagcccttcacctgtttttccaacctcatagtccatgagcgcattcacacaggagagaagccctacaagtgcaaagaatgcgggaaggccttcccctattcaagccacctgatccgtcatcataggatccataccggagagaagccgtacaaatgcaaagcttgctctaagtccttctccgactcctccggtcttactgtccaccgaaggacccacacaggcgaaaagccttacacctgcaaggagtgtggcaaagcattttcctacagctctgatgtcattcagcaccgcagaattcacaccggccagagaccatataagtgcgaggagtgcggcaaggctttcaattacaggagctacctaaccactcatcagcgctcccatacaggagaaagaccatataagtgcgaggagtgtggcaaagctttcaactctcggagctacctcacaacgcatcggagacggcataccggcgaaagaccctacaagtgtgacgaatgtggtaaggcattcagctataggagttatctgacaactcatcgacgtagccattctggggagcggccatacaagtgcgaagaatgcgggaaggcttttaattctaggagctatcttatagcccaccagcgctcccacactagagagaagttatag

SEQ ID NO: 247483 - DNA, 840 bp, synthetic construct
  misc_feature 1..840: note = Description of Artificial Sequence: Synthetic coding sequence
  source 1..840: mol_type = other DNA
atgggccttctgacctttcgggacgtggccgtagaattttcactggaagaatgggaacacctggagcccgctcagaaaaacctgtaccaagatgtgatgttagagaattaccgaaatcttgtgagcttggggctggtcgtctcaaagcccgatctccttactgagcattgtactgaggcctccttccagaaagtgatttctcgcagacacggctcctgtgatttagagaacttacacctccggaaaaggtggaaacgggaagagtgcgaggggcacaacggttgttacgacgaaaaaacttttaagtatgaccaattcgatgagtcgagtgtggagtctctttttcatcagcagattctctcaagctgcgccaagtcttataatttcgatcagtatcggaaagtgttcacccattcaagcttgttaaaccaacaggaagagattgacatctggggcaagcatcacatatatgataagacaagtgtcctgtttcgacaggtgtcaaccttaaatagctaccgcaacgtctttatcggcgagaaaaactaccattgtaacaattctgaaaaaactctgaatcagagctcatcaccgaagaaccatcaggaaaactacttcctggaaaaacaatacaagtgcaaagaattcgaggaggtttttttgcagagcatgcacgggcaggagaagcaagagcaatcttacaagtgtaacaaatgtgtggaggtatgtactcagtccctcaagcacatccagcaccagactatccacattcgggagaattcctatagttacaataagtacgataaagacctgtctcagagctccaatctcagaaagtag

SEQ ID NO: 247484 - DNA, 2892 bp, synthetic construct
  misc_feature 1..2892: note = Description of Artificial Sequence: Synthetic coding sequence
  source 1..2892: mol_type = other DNA
atggcaaccgcagccgaaaccagtgcaagtgaaccagaagcagagagtaaagccggtccaaaggctgatggagaggaggatgaggtcaaggccgctcgtacccggagaaaggtgctgtctcgggctgtggcggcagccacttataagaccatggggccagcctgggaccagcaggaagaaggggtatctgaaagtgacggtgacgagtacgctatggcctctagcgcagagtcttctcccggtgaatacgaatgggagtacgacgaagaagaagaaaagaaccagttggagatcgaacgtctcgaagagcaactgagcataaatgtgtacgactacaactgccatgtcgacctgatccggttactacgtctggaaggggagttgactaaagttcgcatggcacggcaaaaaatgtccgaaatatttcctctcactgaagagttgtggctcgaatggctgcatgacgaaatctctatggcccaggacggactggatcgggagcacgtgtatgatctgtttgagaaagcggtgaaggactacatatgtccgaacatctggcttgaatatggccagtattcggtggggggtataggccagaaaggcggtctcgagaaggtacgcagtgtattcgagcgagcgttgagctccgtaggcttgcacatgactaaaggattagcactatgggaagcatatcgagagttcgagagtgcgattgtcgaggcggctaggcttgagaaggttcattctctttttcgtcgccagctcgcaatcccgctgtacgacatggaggccacgtttgccgagtacgaggaatggtccgaagatcccatccccgagagtgtgatccagaactacaataaagctctgcaacagttagagaaatataaaccgtacgaggaggccctgctgcaagcagaagcccctaggctcgcggagtatcaggcctacattgatttcgagatgaagatcggcgatcctgcacggattcagctgatattcgagcgagcgcttgttgagaattgccttgtacccgacctttggatccgttactcgcagtacttagacaggcagctgaaagtgaaggatttggtcctgtctgtacataacagagcaattcgaaactgcccgtggacagtcgcgctgtggtcaaggtaccttctggccatggaaagacacggggtagatcaccaggttattagcgttacttttgagaaagccctgaacgcaggcttcatacaggcaactgattacgtggaaatttggcaagcttacctggattacctcagaagacgagtcgactttaagcaagattcgtcaaaggagctggaagagctgcgtgccgcattcacgcgtgccctcgagtacctgaaacaagaggtagaagaacgtttcaacgaaagtggcgatccatcctgcgtgatcatgcagaattgggcgaggattgaggccaggctgtgcaacaacatgcagaaggcaagagaactgtgggattctattatgacaaggggcaacgctaaatacgccaatatgtggctggagtactacaaccttgagcgcgctcacggcgatactcagcattgtagaaaggcattacatagagccgtccagtgcacctcagattacccagagcatgtatgcgaggtcctccttacaatggagcgcacggagggttccctggaggactgggacattgcggtgcagaaaaccgaaacgagacttgccagggtcaacgaacagagaatgaaagcagccgagaaagaagctgcactggtccagcaggaggaggaaaaggctgaacagcgtaaacgtgccagagcagagaaaaaagcactcaagaaaaagaagaaaatccggggacctgagaaaagaggtgcagacgaggacgatgaaaaggagtggggcgatgacgaagaggaacagccgagcaaaagacggagagtcgagaactccattccagccgctggcgagactcaaaacgtcgaggttgcagcaggcccagctggaaagtgtgccgcagtggatgtcgaacccccatctaagcaaaaagaaaaggccgcttccctgaaaagggacatgcctaaggttctgcatgactccagtaaggactccattactgtctttgtgagtaaccttccctatagcatgcaagaacccgatactaaactacgccctttattcgaggcatgcggtgaggttgtccagatcagacccattttcagcaacaggggggacttccgtggatactgttacgtagaatttaaagaagagaagtcagcactgcaggccctggaaatggaccgaaaatcggtggaggggaggccgatgttcgtgtctccctgtgtggataagtcaaaaaatcctgattttaaggtcttccgctactccacatcactggagaaacacaagctcttcatcagcgggctgccattttcatgcaccaaagaggagctggaagaaatttgtaaggctcatggaactgtaaaggatctcaggctcgttaccaatagggctgggaagcccaaaggccttgcatacgtcgagtacgaaaatgagagtcaagcttcccaggctgtgatgaaaatggacggaatgactattaaggagaatatcatcaaggtggcaatctccaaccccccacagcgcaaagtgcctgagaagcccgaaacacggaaagccccaggaggccctatgctcttaccccagacatatggcgcacgtggaaaaggtcggacccagctgtcactcctcccgcgagccctgcagcgacccagcgcagcagccccacaggctgagaacggccctgctgccgctcctgccgtggcagcgccagctgccaccgaggctcctaagatgagtaatgctgactttgctaagctgtttctgcgcaagtag

SEQ ID NO: 247485 - DNA, 1077 bp, synthetic construct
  misc_feature 1..1077: note = Description of Artificial Sequence: Synthetic coding sequence
  source 1..1077: mol_type = other DNA
atggacgccaagtcactgacagcctggagccggactctggttaccttcaaagatgtattcgtagacttcacaagggaggagtggaaactccttgacaccgctcagcagattgtgtataggaacgtgatgttggagaactacaagaacctcgtgagccttggttatcagctgactaagccagatgtcatcctgcggctcgaaaaaggagaggagccatggcttgtggagcgggaaattcaccaggaaactcatcccgactcagagaccgcattcgaaatcaaatcatctgtttctagcaggagcatctttaaggacaagcagagctgcgatattaagatggaaggaatggcaaggaatgatctgtggtacctgtcactggaggaagtctggaaatgtcgggaccaactggacaagtatcaggagaatcccgagcgacacttgtccattccgcgagttctatctctgccagccagacacacaaaacttaccgtggggatggccacaagagtacgtactgcctccatttgggttccaccactgcaggaaagaaatagcagttgggaccgcataaggaaactgcaggggcaggaatcaattctaggacagggaacgccagggctgcaaccactgccaggtacgccaaggcagaaacagaaatctaggcggattgaaaaagtcttggaatggctgttcatcagccaggagcagcccaagatcactaaatcatggggaccgctgtctttcatggacgtgttcgtggacttcacctgggaagaatggcagctgcttgaccctgctcaaaagtgcctgtaccgatctgttatgcttgagaactactcaaacctggttagcctcggttaccaacatactaaacccgatatcatttttaagcttgagcaaggggaagaactgtgcatggtacaggcacaggtccccaatcagacgtgcccaatactaaaggctggaaaatccaaggcaaaggtactggctggactcgtctccggtgaggggctactttgcgcatctaagatgactccttgttgctgcattctctggcggcattctcttgaaaattag

SEQ ID NO: 247486 - DNA, 504 bp, synthetic construct
  misc_feature 1..504: note = Description of Artificial Sequence: Synthetic coding sequence
  source 1..504: mol_type = other DNA
atggcaacacgcgtacggacggcctcaatttgggtgcccccactccaggaacgcaattccagttgggacagaattaggaaactgcagggacaagagagcattctcggacagggcacgccaggtcttcagccattacctggtaccccaaggcaaaaacagaaatcaagacgaattgaaaaggttctggagtggttgtttattagccaggagcaacccaagataacaaagtcctggggcaccaatacccctaacttaatctcttcctcaagctggaataaggaaaagtcttgtgtgtggtgccggcctaaattccagatcaggcctgtgcaaacacagagcgggaaattaatgattctctggattggcattaggaagattaagacctcctgggaggttcgacagaaagccctgaacgccctgcatctggagaactatgtgttcctggtacagtctatttttcaggataagaacctcatcaatgtggccagaatggagagggtgtag

SEQ ID NO: 247487 - DNA, 2361 bp, synthetic construct
  misc_feature 1..2361: note = Description of Artificial Sequence: Synthetic coding sequence
  source 1..2361: mol_type = other DNA
atggattggcatcaggagaataaggataaacttggctccacggctaagtcgttcgaatgcacaacgttcggcaagctgtgcctgctgtccaccaagtacctgagccgtcagaagccacataagtgcggcacccatggcaagtccctaaagtatattgactttacctcagattacgccagaaataacccaaacggctttcaagtgcatggtaagtctttttttcactccaagcatgaacagacagttatcgggatcaagtactgtgaaagcatcgagagtggcaagactgtgaacaaaaagagccagctcatgtgccagcaaatgtacatgggcgagaagccatttgggtgctcatgctgcgaaaaggctttctcctcaaagtcctacctactcgtccatcagcagacacacgccgaggagaagccctacgggtgcaatgaatgtggtaaagacttttccagcaagtcatacttaattgtgcatcagcgaattcacacaggggagaagctgcacgagtgttctgagtgcagaaaaaccttctctttccactctcagctcgttattcatcaacgcatccacacaggagagaacccctacgagtgttgtgaatgcggaaaggtcttcagccgcaaagatcagcttgtgagccaccagaagactcatagcggtcagaaaccttatgtgtgtaacgagtgtgggaaggcgtttgggctcaaatcccagctgattatccatgagcgaattcacacaggcgaaaaaccgtacgaatgcaatgagtgtcaaaaggccttcaacaccaaatctaatttaatggtgcaccaacggacccacacaggggagaagccttatgtgtgttctgactgtggcaaggccttcactttcaagtcccagctgattgtccatcagggcatccacacaggcgtgaagccatacgggtgtattcagtgcggcaagggtttcagtttaaagtcccagctcattgtccatcagagatcccataccgggatgaaaccctacgtgtgcaacgaatgtgggaaagcctttagatcgaagtcctatcttatcatccacacacgaacccacacaggcgagaagctacacgaatgcaataattgcggtaaagcgtttagcttcaagtcgcagcttatcatacaccagaggattcataccggtgagaacccatacgaatgtcatgagtgtggcaaagcatttagccggaagtaccagctgataagtcaccagcgcacccatgctggagaaaaaccatatgaatgcaccgactgtgggaaagcctttggcttaaaatctcagctgattatccaccagagaactcatacgggggaaaagccatttgagtgcagcgaatgccaaaaagccttcaatactaaaagcaatctgatcgttcatcagagaacccacaccggcgaaaaaccatactcatgcaatgaatgcggaaaggcatttacgtttaagtcacaactgatcgtgcataagggggtccacaccggcgtcaagccctatggatgttcacaatgcgctaagacattttcgctcaaatctcagctcattgtgcaccagagaagccacaccggagttaagccctatggatgtagtgagtgcggcaaggctttccgaagcaagtcctatctgattatacacatgcgtacccacacaggagagaaaccacacgagtgccgggaatgcggaaaaagcttctcatttaactcccagttaatcgtacaccagcgaatccacaccggagaaaacccctatgaatgctccgagtgtggaaaagcttttaaccgcaaagaccaactgattagccatcagcgaacccacgctggagagaaaccttacggctgctcagaatgtgggaaggctttctcaagtaagagttacttgatcatacatatgcgaacacatagcggcgagaaaccctacgagtgtaacgaatgcggaaaagctttcatctggaagtctctgctgatcgtccacgaaagaacccatgccggagtgaacccgtacaaatgctcacagtgtgagaaatcctttagtggcaagctaaggctgctggtccaccagaggatgcacacccgcgaaaagccatatgagtgcagtgagtgcgggaaggcatttattcgcaattcccagctgatagtacatcaaaggacacactccggggagaagccgtatggatgtaatgaatgcggcaagactttttcacagaagtctatcctgtcagcccatcaaagaacgcataccggagaaaaaccctgcaagtgtaccgaatgcggaaaagccttctgctggaagtctcagcttattatgcatcaacggacccatgtcgatgataagcactag

SEQ ID NO: 247488 - DNA, 2844 bp, synthetic construct
  misc_feature 1..2844: note = Description of Artificial Sequence: Synthetic coding sequence
  source 1..2844: mol_type = other DNA
atggctacccgagtacgcaccgcatccatatgggtgcctccgctgcaagaacgaaacagtagctgggatagaattcgcaaattacagggacaagaaagcattctggggcaagggacccccggactgcaacctcttccgggtaccccacgtcagaagcagaaatcacgcagaatcgagaaagtcctcgagtggctattcatttctcaggagcagcccaaaattaccaaatcttggggcccattaagctttatggacgtgttcgttgacttcacctgggaagaatggcaactcctggaccccgcacagaaatgcctgtacaggtcggtcatgctggaaaactactcaaatctagtttccctcgggtaccagcacaccaaaccggatataatttttaaacttgagcaaggtgaggaactgtgcatggtacaagctcaagtgccaaatcaaacatgtcccaacaccgtctggaaaattgatgatctgatggattggcaccaagagaacaaagataagctgggttccacagctaaatcgttcgagtgcactaccttcggcaagttgtgcctgctgtctaccaaatacctctcgcgccagaagccacataagtgcggtacccacggtaagtccctgaaatacatcgactttactagtgattacgcgaggaataaccccaatgggtttcaggtgcacggcaagtcgttctttcattccaagcatgaacaaactgttatcggtattaaatactgcgagtctatcgaatccggaaaaaccgtgaacaaaaaatcacagttaatgtgccagcagatgtacatgggtgaaaagccatttgggtgtagctgctgtgagaaggccttttcatctaagagttatttgctggtgcatcaacaaacccacgctgaggagaagccttatggctgcaatgaatgtgggaaagattttagttccaaatcctacctaattgtgcatcagcgaattcataccggggaaaagcttcacgagtgcagcgaatgccgcaaaactttttcattccattcacagctggtcattcaccaacgaatccacaccggtgagaatccttacgagtgttgtgaatgtggtaaggtgtttagtcgtaaagaccagttagtgagccaccagaagacccacagcggacagaagccgtatgtttgcaacgaatgcggcaaggcgttcgggctgaaatcccagctgataattcacgaacgaatccataccggagagaagccttatgaatgcaatgagtgccagaaggcatttaacactaagtctaacctcatggtacatcagcggactcacaccggggaaaaaccctacgtgtgtagtgactgtggtaaggcatttacctttaagtcccagcttatcgtccaccaagggattcacacaggggtcaagccctatggatgtatacaatgtggcaagggtttcagcctcaaaagtcagctaatcgtccaccagcggtcccacaccggaatgaaaccctacgtgtgcaacgaatgcggaaaggcttttaggtccaagagctatctgattatccacaccaggacccatacaggcgagaaactccatgaatgtaacaattgcgggaaggccttcagttttaaatcccagctgattatccaccagcgcatccacaccggagagaacccctacgagtgtcacgagtgtggaaaggcattctctagaaaatatcagctaatcagccatcagcgtactcacgccggagagaagccctacgagtgcaccgattgcggaaaggcgttcggactgaaatcgcagctgatcattcaccagagaacacatactggagaaaaaccctttgagtgcagtgagtgccagaaggcatttaatacaaagtctaatctcatcgtgcatcagcgaactcatactggagagaagccctactcttgtaacgaatgcgggaaagcgttcacatttaagtcgcagctcattgtgcacaagggagtccatactggggtcaagccatatggatgcagccagtgcgccaagacttttagtctgaaatcacagctgatcgtgcaccaacgaagtcacaccggcgtgaagccttatgggtgcagcgaatgcggcaaagcttttcggagtaaatcttatctgatcattcatatgcggacacatacaggagagaaaccgcacgaatgtcgggagtgcgggaaatccttcagtttcaacagccagctcatcgtgcaccagagaattcataccggcgagaatccctacgagtgttctgaatgcggtaaggcgttcaacaggaaagatcagctgatcagccatcagcgcacacacgccggagagaagccatatgggtgcagcgaatgtggcaaggctttcagttccaagagttaccttattatacacatgagaacccacagcggggaaaagccatacgaatgcaacgagtgtgggaaagccttcatttggaaaagcttactaatcgtacacgagagaacccatgccggtgtgaacccgtacaaatgttctcagtgtgagaaatccttttccggtaaattgcgcctcctggttcaccaacggatgcatactcgtgagaaaccctacgagtgttccgaatgcggcaaggcctttatccgtaatagtcagttgattgttcaccagcggacccattcaggcgagaaaccctatgggtgtaacgaatgcggtaaaactttttctcagaaaagcattcttagtgcccaccagaggacacacaccggagaaaagccttgcaagtgcacagagtgcgggaaggccttctgttggaagtcccagctgatcatgcaccagcgcacccacgttgacgataagcattag

SEQ ID NO: 247489 - DNA, 2193 bp, synthetic construct
  misc_feature 1..2193: note = Description of Artificial Sequence: Synthetic coding sequence
  source 1..2193: mol_type = other DNA
atggattggcatcaggaaaataaggacaagctcggctctactgctaagagcttcgagtgtaccacctttgggaagctgtgtcttctttccaccaagtatctcagtcgccaaaagccacacaaatgtggcacccacggaaagagccttaaatatatcgattttacaagtgactacgccaggaacaaccctaacggtttccaggtgcacggcaagagcttctttcattccaaacacgagcagacagtaatcggaattaaatattgcgagagtattgagtctggaaagacagtcaataaaaagtcccagctcatgtgccagcagatgtacatgggggagaaacccttcggatgttcatgttgtgagaaggcattctcctcaaagagctatcttttggtgcaccagcaaacccatgcggaagaaaaaccctatgggtgtaacgagtgtggcaaagatttcagctccaagtcataccttatcgttcaccagcggatccacacaggagaaaaactgcatgagtgcagcgaatgtcgcaagacattctcattccattcacagctggtcattcaccagaggattcatacaggagaaaacccatatgagtgttgcgaatgtgggaaggtgttttcgcgcaaggaccagttggtcagccaccagaagacccactccggtcaaaagccttacgtatgcaacgagtgtggcaaagcattcggcctgaagtcccagttaataatccatgaacgcattcacaccggtgagaagccatacgagtgcaacgagtgccaaaaggcattcaatacaaagtctaacctgatggtgcaccagcggacacatacgggtgaaaagccatacgtttgttctgattgtgggaaggctttcactttcaaaagccagctgattgtccaccaaggtatccatacaggagtcaaaccgtatggctgcatccagtgcggcaaggggttcagtttgaaatcccagttgatcgtccatcaacgctcacacacaggcatgaagccctacgtgtgcaacgagtgcggtaaagccttcagatccaaaagttatctcattattcacactaggactcatacaggagaaaaactgcacgaatgtaacaactgtgggaaggcattcagtttcaaatcccagctcatcatccatcagagaatccacacaggtgaaaatccatatgaatgccatgagtgcggtaaggccttctcacggaaataccaactgatttctcaccaacgaacccatgctggggagaagccttacgagtgtacggactgcgggaaggctttcggactgaaatcccaactcattattcatcaaaggacacacaccggtgaaaaaccctttgagtgtagcgaatgccagaaagcattcaacactaagtccaatctgatcgttcatcagagaacacatacaggcgagaagccttattcttgtaacgagtgtggaaaggcattcacctttaaatctcagctcattgtccacaaaggagtacacaccggagtgaagccatatggatgctctcagtgcgccaaaacatttagccttaaaagccagcttatcgtccatcaaaggtcccacacaggggtgaaaccgtatggctgctctgaatgcggaaaggcatttaggtctaaatcatatttgattatccatatgagaactcacacgggagagaagcctcacgaatgccgtgaatgcggaaagtcatttagttttaattcccagcttattgtacatcagagaatccatacgggggaaaatccttatgaatgctcagagtgtggtaaggcttttaaccgtaaggatcagttaatctcccatcagcgaactcacgccggagagaagccctatggctgctccgaatgcggcaaagccttctcctccaaatcatacctcattattcatatgcgtactcactctggagagaaaccttacgagtgcaatgagtgtggaaaggcttttatttggaaaagcttgctgatagtgcacgagcgaacacacgcaggggtgaacccttacaaatgctctcagtgcgaaaagagtttttctgggaagctgcgcctgttggtgcatcagagaatgcatacaagggagaaaccttatgagtgtacagagtgtgggaaggctttctgctggaagtcacagctgattatgcatcagcgcacccacgtggacgataaacattag

SEQ ID NO: 247490 - DNA, 303 bp, synthetic construct
  misc_feature 1..303: note = Description of Artificial Sequence: Synthetic coding sequence
  source 1..303: mol_type = other DNA
atggccacacgggtgagaaccgccagcatttggggaaccaatacccctaacttgatatcgtcctccagttggaacaaggagaaatcctgtgtctggtgtcggccaaaatttcaaatccggccagtacaaacccagagtggtaaactaatgatcctgtggattggaatccgcaaaattaaaactagttgggaagtccggcagaaagccttgaacgccctgcatttagagaattacgtattcctggtgcaaagcatattccaggataaaaacctgataaatgttgctagaatggaacgtgtgtag

SEQ ID NO: 247491 - DNA, 381 bp, synthetic construct
  misc_feature 1..381: note = Description of Artificial Sequence: Synthetic coding sequence
  source 1..381: mol_type = other DNA
atggccactagagttcggaccgccagcatctggggtcctctgtcatttatggatgtgttcgtggatttcacttgggaagagtggcagctgttagaccccgctcaaaagtgtctgtatcgaagcgttatgctcgagaattacagcaacttggtgtcgctggggtaccaacataccaagcctgacatcattttcaaactggagcagggtgaggagctatgtatggtgcaggcccaggttcccaatcagacttgcccaatacttaaagccggaaagagcaaggcgaaggtcctagcaggcttggtctccggcgaaggcttactctgcgcatccaaaatgaccccctgctgttgtatcctctggcggcattccttagagaattag

SEQ ID NO: 247492 - DNA, 207 bp, synthetic construct
  misc_feature 1..207: note = Description of Artificial Sequence: Synthetic coding sequence
  source 1..207: mol_type = other DNA
atggccacgagagttcgcaccgctagtatctggactcaatcaggtaagttaatgatcctctggattggcatcagaaaaattaagacatcctgggaagtcaggcaaaaggccctcaacgccctccacttggagaactatgtgttcctcgttcagtcaattttccaagataagaacctgatcaatgtcgcaaggatggaaagagtatag

SEQ ID NO: 247493 - DNA, 504 bp, synthetic construct
  misc_feature 1..504: note = Description of Artificial Sequence: Synthetic coding sequence
  source 1..504: mol_type = other DNA
atggctaccagagtgcgaacagccagtatttgggtaccacctctgcaggaaagaaacagcagctgggacaggattcggaaactgcagggccaggagagcatactgggtcaggggacaccaggtctgcagcccttgccgggaacccctaggcagaagcagaaatcacgtaggattgagaaggtcctggagtggttattcatcagccaagagcagcctaaaataacaaaatcttggggtactaacaccccaaacctgatcagttcaagcagctggaataaagagaagtcctgtgtgtggtgcagacccaaatttcagattcggcctgtgcagacccagagtggaaaactaatgatcctatggatcggtatcaggaaaatcaagacatcttgggaggttcgacaaaaagcgctgaacgctttgcacctggaaaactatgtcttcttggttcagtccatttttcaggacaaaaatctgataaacgtcgctcgcatggaacgagtctag

SEQ ID NO: 247494 - DNA, 381 bp, synthetic construct
  misc_feature 1..381: note = Description of Artificial Sequence: Synthetic coding sequence
  source 1..381: mol_type = other DNA
atggccacaagagtgaggactgccagtatttggggcccactcagcttcatggatgtttttgtcgattttacgtgggaggaatggcagctgctggatcctgcgcagaagtgtctttacaggtccgttatgttagaaaattacagcaatctggtgtccctcggatatcagcataccaaacccgacatcatttttaaactcgaacagggtgaggagttatgcatggtgcaggcacaggtcccaaaccagacttgccccatccttaaggccggaaaatctaaggctaaagtgctcgctggcctcgtttcaggggaggggctcctgtgcgcttctaaaatgacaccatgctgttgcatactgtggcggcacagtctggaaaactag

SEQ ID NO: 247495 - DNA, 1959 bp, synthetic construct
  misc_feature 1..1959: note = Description of Artificial Sequence: Synthetic coding sequence
  source 1..1959: mol_type = other DNA
atggcctcgcgtctccctacagcttggtcgtgcgagcccgtgacatttgaggacgtgaccctgggctttacaccagaagagtggggcctgctcgacctcaagcagaagtcgttatatcgcgaggtgatgctcgagaactacaggaatctggtatccgtggagcaccagctctcaaaacccgacgtggtgagccaactggaggaggccgaagacttctggcctgtcgagcggggaatcccccaggacacaatcccagagtaccctgagttgcagctggaccccaaactcgaccctcttcccgctgaaagcccactgatgaacatcgaggtcgtcgaggtgctaactctcaaccaggaagtcgctggaccccgtaatgctcagattcaggccttgtacgccgaagacggatcccttagcgccgacgccccttcagaacaggtccagcaacaaggaaagcatcccggagatcctgaagctgctcgccagcggtttcgacaattcaggtacaaagacatgacggggccaagggagcttgatcagctgagagagctgtgtcaccagtggctgcagccaaaagccagaagtaaagaacaaatactagagctgttggtcctggagcaatttttgggcgcattgcccgtaaaactcagaacgtgggttgaatctcagcacccggagaactgccaggaagtcgtcgctctggtcgagggggtaacgtggatgtccgaggaggaggttttgccagctggacagccagctgaggggacaacatgctgcttagaggtcaccgcccaacaggaggagaagcaggaggacgccgcaatttgccctgtgacagtgcttcccgaagaacctgtgacttttcaggatgttgccgtggacttcagccgtgaggagtggggtctgctcggccctacgcagcgtacagagtaccgggatgtaatgctggagacgtttggtcatctcgtctccgtcggctgggaaacgacactggagaacaaggagctggcacccaatagcgacattcccgaagaagagcctgcccctagcctgaaggtgcaggagtctagtcgagattgtgctttaagtagtaccctggaggacactctgcagggcggagtacaggaagtgcaggacactgtcttgaaacaaatggagagcgcccaagaaaaagatctacctcagaagaagcactttgataatcgcgaaagccaagctaacagtggggcactggacacaaatcaggtgtcactccagaagattgacaaccctgaatcccaggccaattctggtgcattagacaccaatcaggtgctcctgcacaagattcctcctaggaagaggcttagaaagcgagactctcaggttaagagcatgaagcacaattccagagtgaagattcatcagaaatcttgcgagcgccagaaggcgaaggaaggaaatggctgtagaaaaactttttccaggagcactaagcaaattactttcatcagaatccacaagggctcacaagtctgtagatgcagcgaatgcggcaagatttttagaaacccccgatacttttcagtacacaagaagattcacaccggggagcggccttacgtgtgccaggattgcggcaaggggtttgtgcagagctcatctcttacccagcaccagcgtgtccactccggggagcgcccatttgagtgtcaagaatgcggcagaacctttaatgacagaagcgccatttcccaacacttgcgtacccataccggcgcaaagccgtacaagtgccaggactgtggcaaggcctttagacagagtagccatttgatccggcaccagcggacccacacaggagaaaggccttacgcatgtaacaaatgtggtaaggcttttacccagtcctcacatctaattggacaccagcgaactcataaccgcactaaacgaaagaagaaacaaccgacaagctag

SEQ ID NO: 247496 - DNA, 1863 bp, synthetic construct
  misc_feature 1..1863: note = Description of Artificial Sequence: Synthetic coding sequence
  source 1..1863: mol_type = other DNA
atggcctccagactgccgactgcttggtcctgcgaacctgtgacttttgaggacgtgacactcggcttcacacccgaggagtggggtcttctggacttaaaacaaaagtcactatacagagaagtgatgttagagaattacaggaacctggtgagcgttgagtaccccgagctgcagctcgaccctaaactggaccccctcccagccgaatccccactgatgaatattgaggtagtggaagtactcacgctgaatcaggaagttgcaggtccaagaaatgcccagattcaagccctgtatgctgaggatggctccctgtcagctgacgcccctagcgaacaagtacagcaacaaggtaagcaccctggcgaccccgaggctgccagacagcgcttcaggcagtttcggtacaaagacatgacaggaccgcgagagctggatcagttgagggaactgtgccaccaatggctccaacctaaagcccgtagcaaggagcagattttggaacttctggtgttggagcagtttctgggcgctctgccagtgaaactgcggacttgggtcgaatctcaacatcccgaaaactgccaggaggtggttgccctcgtggaaggcgtgacatggatgtctgaggaggaggtgctgcctgccggtcaaccagcggaagggaccacatgttgcctggaggtgacagcccagcaggaagagaaacaagaggacgctgccatctgtcccgtgaccgttctgcccgaagaacccgttacattccaggatgtcgcagtcgacttcagccgagaagagtgggggctactcggcccaacccagagaactgagtacagagacgttatgctggagactttcggacacttagtgtcagtgggatgggaaactactctcgagaacaaagagctggcccctaatagcgacataccggaagaagagcccgcaccctctcttaaggtccaagagtctagtagggattgcgcactttcgtcgactctcgaggatacactccaggggggtgttcaggaggtgcaagacacggtcttgaagcagatggagtctgcccaggagaaagatctcccccagaaaaaacacttcgacaacagagagtctcaggccaactctggagcactggacactaaccaggtgtccctgcaaaaaattgataacccggaatctcaagccaactccggtgccctggacaccaaccaggtgcttcttcataagattcctcctcgcaaacggctacggaagcgcgacagtcaggtgaagtctatgaagcataacagtagggtgaagattcaccaaaaatcatgcgagagacagaaagccaaagagggtaacggctgcaggaaaacatttagtaggtcaacaaagcagatcactttcatccggattcataagggctcacaagtatgtcggtgtagcgagtgcgggaagattttccgcaacccgaggtatttcagcgtccacaaaaagatacatacaggcgaacgcccttacgtttgtcaggactgtgggaagggctttgtccagagcagtagccttactcagcaccagcgggttcactctggagaacgccctttcgaatgtcaggagtgtggacgtaccttcaacgacagatcggctatttcccagcatctgaggacacatacaggggctaagccatacaagtgtcaggactgcggcaaggctttcaggcagagctcacatctcattcgacatcagcgaacccatactggagaacggccatacgcctgcaacaagtgtgggaaggcctttacccagagcagtcacttgattggacaccagcgtacacacaatcggacaaaacgcaagaaaaaacaacctacttcttag

SEQ ID NO: 247497 - DNA, 1644 bp, synthetic construct
  misc_feature 1..1644: note = Description of Artificial Sequence: Synthetic coding sequence
  source 1..1644: mol_type = other DNA
atgaacatcgaggttgtagaagttttaaccctcaatcaggaggtcgctggcccacgcaacgcccaaatccaggcactgtacgctgaggatggcagtctctcagctgacgccccatctgaacaggtacagcagcagggcaagcatcccggtgatccagaagccgctcgccagagatttcgccagtttcggtacaaagatatgactgggccacgggagctcgatcaacttcgagagctgtgtcatcaatggctccagccaaaagcacggtccaaagagcaaatactggagttgctggtcctcgagcaatttctcggggctctgcccgtgaagctgaggacctgggtggagagccagcaccccgaaaactgtcaagaagtggtcgccttggtcgagggagtgacatggatgagcgaagaagaagttctgccagcgggtcagcctgccgaaggcactacctgctgcctggaggtgaccgcccaacaggaagagaagcaagaggacgctgccatctgtcccgttaccgttttgccagaggagcccgtgaccttccaggatgtagccgtcgactttagtcgcgaagaatggggtctgctgggcccaacccagagaaccgaatatcgggatgtgatgctggaaacttttggacacttggtgagcgtgggatgggaaaccactctggaaaataaggagctggctccgaatagcgacattcctgaagaggagccagctcctagcctgaaagtccaggaaagcagccgtgattgcgccctgagctcaacattggaggacacactgcagggcggagtccaggaggtgcaggacacggtcctcaaacaaatggagagcgcacaggagaaggatttgccacaaaagaaacactttgataaccgcgagtctcaggctaactctggtgctctggacaccaaccaggtgtcactacagaagattgacaaccccgagtcccaggccaattctggggcacttgatactaatcaagtgctgctccataaaattcctcctaggaaacgcctccgtaaaagggacagccaggtgaagagtatgaagcataacagtcgggtgaaaatccaccaaaaatcctgcgaaaggcagaaggccaaggaaggcaatggctgtcggaaaacattctccagaagcaccaaacaaattacattcatccgtattcacaaagggtcacaggtgtgtcgctgtagcgagtgcggaaagatattccgaaaccctcggtacttctctgtgcataaaaagattcacactggcgagcgcccttatgtgtgtcaggactgtggaaaaggcttcgttcagagctccagcctcacacagcatcaacgagtgcattccggcgagagacccttcgagtgtcaggagtgtggtcgcacctttaatgaccggtctgccattagccaacaccttagaactcataccggggcaaagccgtacaaatgccaggactgcggtaaggccttccgtcagtcatcccacctcattcgccaccagagaactcacacaggcgaaagaccttatgcttgtaacaagtgcggaaaggcgttcacccagagtagccatctgatcggtcaccaacgcacgcacaaccgcacgaaacgtaaaaagaagcagccaactagctag

SEQ ID NO: 247498 - DNA, 1353 bp, synthetic construct
  misc_feature 1..1353: note = Description of Artificial Sequence: Synthetic coding sequence
  source 1..1353: mol_type = other DNA
atggccgcaagcaagacgcaaggtgctgttgcgagaatgcaggaggacagagacggcagttgtagcactgtcgggggagttggttacggcgatagcaaagattgtattctggaacctctctcactgccagaatcacctgggggtaccaccacacttgaaggctcaccttccgtcccgtgcatcttttgtgaagagcacttccccgtggcggagcaagacaaactactcaagcatatgatcatagaacataagattgtcattgctgacgtgaagctcgtggctgatttccagaggtatattctgtactggcgcaagcggttcacagaacagccaattacagacttttgctccgtaatccgaattaattcgacagccccattcgaggaacaggagaattattttttgctctgtgacgtgctgccagaggataggatcttgagagaggaattgcaaaaacaacggcttagggagatacttgaacagcaacagcaagagcgtaatgacacgaatttccatggcgtctgcatgttctgcaatgaggaattccttgggaatcggtctgtaattctgaaccatatggcccgtgaacacgctttcaatattggtcttccagacaacatcgtgaattgcaacgagttcctgtgtacacttcagaaaaaactggacaacctccaatgtctttactgtgagaaaaccttcagagataagaataccctcaaagaccacatgagaaagaagcagcatcgaaaaataaaccccaagaaccgcgagtatgaccgcttttacgtaattaactacttggagctgggcaagtcttgggaggaagtgcagctcgaggacgatcgggagcttctggaccaccaagaagacgattggtcagattgggaagagcacccagctagcgcagtctgtctgttttgtgagaaacaggccgagacaatcgagaagctgtatgttcatatggaagacgctcacgagtttgacctcttgaagataaaatcggaattggggttgaacttttatcaacaagtaaaactagttaatttcatacggcgtcaagtgcaccaatgtcggtgttacggctgtcacgtaaagtttaagtcgaaggcagacctgaggacgcatatggaagagaccaagcatacaagcctcctccccgaccggaagacttgggatcagctagagtactattttccaacctacgagaacgacaccttgctatgtactttaagtgattccgagtcagacttaactgctcaggaacagaatgagaatgtcccaataatatctgaagacacgtccaagttgtacgcccttaaacaaagctcgatcctgaaccagctcctattgtag

SEQ ID NO: 247499 - DNA, 873 bp, synthetic construct
  misc_feature 1..873: note = Description of Artificial Sequence: Synthetic coding sequence
  source 1..873: mol_type = other DNA
atggccgcttccaagacacagggggctgtggcacgaatgcaggaggacagggatggcagctgcagcacagtggggggagtgggctacggcgattctaaggactgtattctggagccgctgagcttacccgaatctccaggtggaaccactaccctggaagggtccccgagtgtgccttgcattttctgtgaggagcactttcctgtcgcagagcaggacaagctgttaaagcatatgattatagagcacaaaatcgtgatagctgacgttaaacttgttgccgactttcagcgttatattctgtactggcgcaaaagatttacggagcagccaattaccgacttctgcagcgttatcagaatcaactccaccgctcctttcgaggagcaagaaaactattttctcctatgtgacgtgctgcccgaggaccggattttgagagaggagctacagaaacaaagacttcgagaaatcctggagcagcagcagcaggagcgcaacgatacaaactttcatggcgtctgcatgttttgcaatgaggaattcttaggaaaccgtagcgttatactgaaccacatggcaagggaacatgccttcaacataggactgccggacaatatcgtgaattgtaacgagttcctctgcacccttcagaaaaaactagataatctgcagtgcctgtactgcgaaaagacctttagggacaagaataccttgaaagatcacatgaggaagaagcagcatcgcaagattaacccgaagaatagagaatatgatcgattctatgttatcaactacttagttagactgtcttttcacaatcttaaatttgactgctccacagccaacaaaatctttctccgtacaaactag

SEQ ID NO: 247500 - DNA, 1428 bp, synthetic construct
  misc_feature 1..1428: note = Description of Artificial Sequence: Synthetic coding sequence
  source 1..1428: mol_type = other DNA
atgtcaaggagaaaagcagggtcggcccctcggagggtggaaccagcacccgctgcaaaccctgacgacgaaatggaaatgcaagatctggttattgagctgaaacctgagcccgacgcacagccgcagcaggccccacggctgggcccatttagtccaaaagaagtgtccagtgcagggagatttgggggtgaacctcatcatagccctggacccatgcccgctggcgcagccctgctcgccctaggcccaaggaatccgtggacactgtggacacctcttacccccaactaccctgatcgacagccctggacagataagcatcccgatctgcttacatgcggaaggtgtctgcaaacgtttccattggaggctatcacggccttcatggatcacaaaaaacttggatgtcagttatttagaggcccttcacggggacagggctctgaacgggaggaactcaaggccctttcttgtttacgctgtggaaagcagtttaccgttgcgtggaagctgctcagacacgcacagtgggatcacggcttgagcatatatcagaccgagagcgaagctccagaggcccctctgttagggctcgcggaggttgctgcggctgtatctgcagtagtgggcccagccgcagaggccaagtccccgagggcatcgggatctggcttaaccagaaggtcgccaacatgtccagtgtgtaaaaagactctgagctcattcagcaacctgaaggtgcacatgagatctcacacgggagagcggccatacgcctgcgaccagtgtccatatgcctgcgcgcagagctccaagctgaaccgccataagaaaacccaccggcaggtgccccctcaatccccacttatggccgatacttcccaggagcaagcaagcgccgctcctccagagcctgcagtgcacgccgcagcccctacttcgacgttaccatgctcagggggtgagggcgcaggggctgctgctactgcaggtgtccaggagcccggtgccccaggatcaggagcccaagctggccctgggggagatacctggggtgccatcacaacagaacagagaactgacccagctaattcgcaaaaggcatcccctaaaaaaatgccaaaatcagggggaaagtctcgcggacccggtggcagctgcgagttttgcggaaaacacttcacgaacagctctaaccttacagttcatcgccgttctcacaccggcgaacgcccttacacctgtgagttctgtaattacgcttgtgcccagagttctaagctgaatagacatcgcaggatgcacggcatgaccccagggtctacacggtttgagtgcccccactgccacgttccattcggacttcgggctactctggataagcaccttagacagaaacaccccgaagcagccggagaggcatag

SEQ ID NO: 247501 - DNA, 1356 bp, synthetic construct
  misc_feature 1..1356: note = Description of Artificial Sequence: Synthetic coding sequence
  source 1..1356: mol_type = other DNA
atggaaatgcaggatttagtgattgaactgaaaccagagccagatgcccaacctcagcaggcgcctcggctgggccctttctccccaaaggaggtgtcctcagctggcagattcgggggtgagcctcaccactcacccggacctatgccagcgggagctgctctcctggcgctcgggcctagaaatccatggacattgtggacgcccctcactccgaattaccccgacagacagccctggaccgacaagcaccctgacctgctcacctgcggacgatgcctccagacctttccgttggaagctattacagccttcatggatcacaaaaagctgggatgccagttatttagaggcccaagcagaggccaaggttctgagagggaggaactgaaagctctcagctgtctacgctgtggaaaacaattcacggtagcatggaaactgctgcggcatgcccagtgggatcatggactatcaatttaccagacggaatcagaagccccagaagcacccctgttggggctcgccgaggtcgccgctgccgtctccgcggtggtgggacctgccgcagaggcaaagtctccacgggcttcagggtcgggcttgaccagacggtctccgacatgtcccgtgtgtaagaaaaccctttccagtttttcaaacctcaaggtccacatgagaagtcacaccggggaaaggccatatgcatgcgaccagtgtccatatgcatgcgcgcagagctccaaacttaaccgacacaaaaaaacccatagacaggtgccacctcagtctcctctgatggccgacacatctcaagaacaggcctctgcagctccaccagaacccgctgttcacgccgcagccccaacttccactctgccatgttcaggcggagagggggcaggggcagccgcaaccgctggagtgcaagaacccggagcccctggatctggtgcacaagcaggacccggaggggatacttggggagcgataacaaccgagcaacggaccgatcccgcaaactctcagaaagcaagccctaaaaaaatgcccaaatcaggtggcaagtctagaggcccagggggttcctgcgagttttgtggcaaacacttcaccaacagcagcaatctaactgttcacagaagatcacacaccggcgagaggccctacacctgcgagttctgtaactacgcgtgcgcgcaatcaagcaagttaaacagacaccgcaggatgcatggtatgacccccggaagcactcggttcgagtgtccgcattgtcacgtcccatttggattgcgagctacccttgacaagcacctgcgccagaagcacccggaggcagctggcgaagcctag

SEQ ID NO: 247502 - DNA, 1341 bp, synthetic construct
  misc_feature 1..1341: note = Description of Artificial Sequence: Synthetic coding sequence
  source 1..1341: mol_type = other DNA
atggaaacccaagctgacctagttagtcaggagccccaggcactgctggacagcgctctaccctcaaaggtcccagctttttccgacaaggactctctcggtgatgagatgttggccgcagctcttcttaaagctaagagtcaggagctagtcacgttcgaggatgtagcagtttacttcattaggaaagaatggaagcggttggaacctgcccaaagagatttgtacagagacgtgatgctagaaaattacggaaatgtcttttctctggatagagagacccgtaccgagaacgaccaagagatttccgaggatacccgctctcatggcgttctcctgggcaggttccaaaaggacattagccagggcctaaaatttaaggaggcctacgaaagggaggtgagcctcaaaaggccactggggaattcacccggagaaagactcaaccggaagatgccagattttggccaggtcaccgtcgaggagaagttgactcctaggggtgagagaagcgagaagtacaacgatttcggcaatagcttcaccgtgaattctaatttaatatctcatcaaaggctgcctgtgggggaccggcctcataaatgtgatgagtgtagcaaatctttcaataggacctcggacctgatccaacatcagcgcattcatacaggcgaaaagccatatgagtgtaacgagtgcggtaaggcattttcccagtcgtctcatctcattcagcaccaaaggattcacaccggggagaagccttacgagtgctctgattgtgggaaaaccttctcctgttcctctgccctgatcttgcatagaaggattcacacaggggaaaagccgtatgaatgtaatgagtgtgggaagaccttctcatggagttctacgcttacacaccatcagaggattcataccggagagaaaccatacgcctgtaacgagtgcggtaaggccttctcaagatcatctactttgatccaccatcagaggattcataccggagaaaaaccatatgaatgcaacgagtgcggcaaagcattttctcagtcctcccacctctaccaacaccagagaatacacaccggcgagaagccctatgagtgtatggagtgcggcggaaagtttacctactctagcgggctgattcagcaccagaggatccataccggtgagaatccctatgagtgctccgaatgtggcaaagcctttcgctactcaagcgccctcgtgaggcatcagcggattcacacgggtgagaaacccctgaacgggatcggcatgtcaaagtcatcactgcgagttacaaccgagctgaatattagggagtcgacatag

SEQ ID NO: 247503 - DNA, 1341 bp, synthetic construct
  misc_feature 1..1341: note = Description of Artificial Sequence: Synthetic coding sequence
  source 1..1341: mol_type = other DNA
atggaaacgcaggctgacttggtgtcacaggaaccacaggccctcctcgattcagcgcttccttctaaagtccccgctttttcagacaaggactccctgggcgatgagatgctggctgcagccctcctgaaggcaaaatctcaggaactggtaacctttgaggacgttgccgtttacttcatcagaaaggaatggaagagactggaaccagcccagagagatctgtacagggacgtgatgctggagaattacggaaatgtgttcagcctcgaccgtgagacaaggaccgagaatgatcaggagatctccgaggacacacggtcccatggggtgctgctggggaggtttcagaaggacatttcccaaggattgaagttcaaggaggcctacgagcgcgaagtcagcctgaagcgaccccttgggaacagtccaggggagcgcctgaatcgaaagatgccagacttcgggcaggtcaccgtggaagagaagctgactccaaggggggagagatctgaaaaatataatgacttcggaaacagcttcactgtaaattcaaaccttatatcccatcaacgcctccctgtaggggatcgcccacataagtgcgacgagtgttctaagtcatttaaccgcactagtgatctaatccagcaccagaggatccacaccggtgagaagccatatgagtgcaacgaatgtgggaaggcctttagccagtccagtcacctgattcaacatcagcggatccatacaggtgagaagccctacgaatgcagcgactgtggtaagacttttagctgctcctctgctctcattttacatcggagaattcacactggtgagaagccctacgaatgcaatgagtgtggcaagactttttcctggagttctacattgacccaccaccagcgaatccatactggcgaaaagccttacgcttgcaatgaatgtgggaaggctttcagccggtctagcaccctgatccaccaccagagaattcacaccggagaaaagccatacgaatgcaatgaatgtggaaaggcttttagccagagtagccacctttatcaacaccagcgcatccatactggggagaagccttatgagtgtatggaatgtggcggaaaattcacttactcctccgggctaatacagcatcagagaatccacactggtgagaacccctacgagtgctctgaatgtggcaaagctttccgctactcttctgccctggttaggcatcaacgaattcatactggcgagaagccactgaacgggatcggaatgtccaaatcaagcctgagagtcactacagagttgaacatccgtgagagcacatag

SEQ ID NO: 247504 - DNA, 396 bp, synthetic construct
  misc_feature 1..396: note = Description of Artificial Sequence: Synthetic coding sequence
  source 1..396: mol_type = other DNA
atggagacacaggccgatttagtctctcaggagccacaggcactgctggactctgccctgcccagcaaagtgcccgcatttagcgacaaagattcgttaggtgatgagatgctggctgctgccctcctgaaggccaagtcgcaggagctggtgactttcgaggacgtcgccgtttactttatccgcaaagaatggaagaggctcgaaccagcccagagggacctttaccgcgatgttatgctggaaaattacggcaatgtgttttccctcgattggattcacgtttgcctgacgacgcaaaaagtgatgctggcgtggctcacaggaacactctccgttgccaaaggattgtgctcctcagagctcgcttccgtggaaccgcctgacactttttag

SEQ ID NO: 247505 - DNA, 315 bp, synthetic construct
  misc_feature 1..315: note = Description of Artificial Sequence: Synthetic coding sequence
  source 1..315: mol_type = other DNA
atggaaacacaagccgacctggtgagccaagagccacaggccctactggacagcgccctgccatcaaaagttcctgcattcagtgacaaggacagtctcggcgatgagatgctcgccgcagcgttgctaaaggcaaagtcccaagagctcgtcacttttgaggatgtggcagtatactttatacgaaaagagtggaagagactcgagcccgctcagagggatctgtatcgtgatgtgatgttggaaaattacggcaacgttttcagcctagaccgggagacccgcactgagaacgaccaagaaatttcagagtag

SEQ ID NO: 247506 - DNA, 1341 bp, synthetic construct
  misc_feature 1..1341: note = Description of Artificial Sequence: Synthetic coding sequence
  source 1..1341: mol_type = other DNA
atggagacccaggcggaccttgtttcccaagaaccacaggctcttctggacagtgctctgccttccaaggtccctgccttctctgataaggattcccttggtgacgagatgctggcagccgcactgctgaaagccaaaagccaagagctggtcacattcgaagatgtcgccgtgtatttcatacggaaagagtggaaaagactcgaacccgctcagagagacctgtatcgcgacgtgatgctcgaaaactacggaaatgtgtttagcctggaccgggagacccggacagagaatgaccaggagatctctgaagacaccagaagtcacggcgtcctgttaggacggtttcaaaaagacatcagccagggcctcaaattcaaagaggcctacgagcgcgaagtgagcctaaagcgacctctgggcaactcaccaggcgaacggttgaacaggaaaatgccggatttcggccaggtcacagtcgaggagaagctaacacctcgcggagagcgatctgagaagtacaacgatttcgggaacagtttcacggtgaattctaatctgattagtcaccaacggcttcctgtcggggataggccccacaagtgcgacgagtgttctaagtctttcaataggacaagtgacctgatccaacaccagcgcatccacaccggcgaaaaaccgtatgagtgcaatgaatgcgggaaagccttctctcagtctagccatctgatccagcaccagcggattcatactggcgagaagccctacgagtgttctgactgcgggaaaactttctcttgctctagtgctctgatactccaccgcaggatccataccggcgaaaagccatacgagtgcaacgagtgcgggaaaacattttcctggtcctccacgctgactcatcatcaacgaatccatacaggcgagaaaccatacgcttgtaatgagtgtgggaaggctttttctaggtcctccaccctaatccaccatcaacggatccatacgggcgaaaagccgtatgaatgcaatgaatgtggcaaagcgttcagccagtcttcacacctgtaccaacaccaacggattcacactggtgagaagccatatgagtgcatggagtgcggcggtaagttcacctattcttctggtttaatccaacaccagcgaatccacacgggtgaaaatccatacgagtgctccgaatgtggcaaggcctttaggtattcaagtgccttagtacggcaccagcgtatccacacaggagagaagcccctgaatgggatcggtatgagtaagagtagcctaagagtgacgacagaattgaatatcagagagagcacatag

SEQ ID NO: 247507 - DNA, 558 bp, synthetic construct
  misc_feature 1..558: note = Description of Artificial Sequence: Synthetic coding sequence
  source 1..558: mol_type = other DNA
atggagacgcaggctgacctggtttctcaggagccccaggctctgctcgactcggccctgccaagtaaggtgccagccttctcggataaagactcccttggagatgagatgctggcggcagctttacttaaggcgaagagtcaggagttagttactttcgaggacgtggctgtttacttcattaggaaggaatggaaacggctcgagcctgcacagagggatctgtaccgggatgtgatgctggagaactacggcaacgtgttctctctcgatcgagagacgaggacagaaaacgaccaggaaattagcgaggacacgcggagccacggcgtgcttctgggacgttttcagaaagacatttcccagggattaaaatttaaagaggcatatgaaagagaggtgtcacttaaaaggccgctgggcaatagccccggagagcggctgaatcggaaaatgccggattttggccaggtaactgtggaagaaaagcttaccccaagaggggagcggtcagagaagtataacgatttcggaaattccttcacagtgaacagttag

SEQ ID NO: 247508 - DNA, 558 bp, synthetic construct
  misc_feature 1..558: note = Description of Artificial Sequence: Synthetic coding sequence
  source 1..558: mol_type = other DNA
atggaaacacaggctgacctagtgagtcaagaaccccaggctcttctggactccgccctgcctagtaaagtccccgctttttccgacaaagacagcctgggtgacgaaatgttagccgctgccttgctgaaggctaagtcgcaggagctggtgacttttgaagatgtggctgtttatttcatcaggaaggagtggaaacggctggaacccgctcaacgggacctgtacagggacgtgatgctggagaactacgggaacgttttttccctcgacagagagacgcgcaccgagaatgaccaggagatatcagaggatacaaggtcacacggcgtgctgctcggacgcttccagaaagacatctcccagggcctaaagtttaaggaggcttatgagagagaggtaagcttgaagaggccattgggaaattcccctggcgaacgcttgaaccgcaaaatgccagatttcgggcaggtgactgtggaggagaagctcacacccaggggcgagcgctcagagaagtacaatgatttcggcaattcgttcacggttaattcatag

SEQ ID NO: 247509 - DNA, 1509 bp, synthetic construct
  misc_feature 1..1509: note = Description of Artificial Sequence: Synthetic coding sequence
  source 1..1509: mol_type = other DNA
atgggcaccgagaataaggaagtgattccaaaagaagaaatcagcgaggaatctgaaccacatgggtccttgctggagaagttcccaaaggtggtatatcagggacacgaattcggcgctggttgcgaagaagacatgctggaagggcactctcgtgagtccatggaagaggttattgagcagatgagtccccaggaacgggactttccgtccggactgatgatcttcaagaaaagcccgtcatcagagaaggaccgcgagaacaatgaaagtgagagggggtgttccccctctcccaatctggtgacccaccagggcgacacaacagagggtgtgagtgcatttgcgacatccggccaaaactttttggagattttggaatccaataaaactcaaaggtcatccgtcggggagaaacctcacacctgtaaggaatgtggtaaggccttcaaccaaaatagccacttgattcaacatatgcgggtccattccggggagaaaccctttgagtgtaaagagtgtgggaagacctttggaacaaactcgagcctgcgacggcacctccgcattcacgcaggagagaagcccttcgcatgcaatgaatgtggcaaggccttcatccagtcatcccatcttatccatcaccatcgtatccacaccggtgaacgcccttacaaatgcgaggaatgtggaaaagctttcagccagaatagcgctctgatactccatcagcgcatccatactggagagaagccatatgaatgcaacgagtgcggaaagaccttcagagtcagtagccagttgatccagcaccaaagaattcacactgaggaaaggtatcacgagtgcaacgaatgcggaaaagccttcaaacactcaagcggccttatacggcaccagaaaatccacacaggagagaagccgtacctctgcaacgagtgcggtaaaggctttggacagagctccgagctgatccggcatcaacgtattcacaccggtgataaaccctatgaatgtaacgaatgtggtaagacatttggccagaattcagaaataatcaggcacatccggatacacactggggagaaaccttacgtctgcaaggaatgcggcaaggccttccggggaaactccgagctattacgccacgagagaattcacaccggcgagaagccatatgagtgttttgagtgtgggaaggcctttcgccgaacaagccacttgatagttcatcagcgcatccacacgggcgagaaaccccaccaatgcaatgagtgtgctcggacattctgggataatagtgagctgttgctacatcagaagattcatattggggagaagccttatgaatgctccgaatgcgaaaagacattttcacagcactcacagttgatcatccaccagcggatccacacaggcgaaaagccctacgaatgccaggaatgtcagaaaacgttctctaggtcgtcacacttgctgcggcatcagtctgtccactgtatggagtag

SEQ ID NO: 247510 - DNA, 1815 bp, synthetic construct
  misc_feature 1..1815: note = Description of Artificial Sequence: Synthetic coding sequence
  source 1..1815: mol_type = other DNA
atgatgaaaagtcaaggtctggtctcattcaaggatgttgcagtggatttcacacaagaggagtggcagcagctcgacccatcacaacgcacactttaccgcgatgtcatgctggaaaactactctcatttggtttctatggggtatcccgtgtctaaaccggacgtcatcagcaaattggagcagggagaagagccttggatcatcaaaggtgacatctccaactggatatacccagacgagtatcaagcagacggcagacaagatcggaagagcaatctgcacaattcccagagttgtatattaggaacagtctctttccaccacaagattctgaaaggagtcaccagggatgggtcactgtgctccatcttgaaggtctgtcagggggatggccagctgcagcgttttctcgagaatcaggataaactattccgccaggtcactttcgtaaatagcaagactgtgaccgaagcgagcggacacaagtacaatccccttggaaagattttccaggaatgcattgagacagatatcagcatccagcggttccacaagtatgatgcctttaaaaagaacctgaaaccaaacattgacctgccatcctgctataagagcaactctaggaaaaagccagaccagtcttttggcggaggaaaatcttccagccagtcagaacccaatagtaaccttgaaaaaatacacaacggcgtgatcccgtttgatgataatcaatgtggtaacgtgtttaggaacacccagtccctgattcaatatcagaatgtagagaccaaggaaaaatcctgtgtgtgcgttacttgcggtaaagctttcgcgaaaaagtctcagcttatagtccaccagcgcatccacactggcaagaagccatatgattgcggtgcctgcggaaaggctttcagcgaaaaatttcaccttgtggtccaccagcggacccataccggcgagaaaccatatgattgttccgaatgcggaaaggcattttctcagaagagctcacttatcatccaccagcgtgtgcataccggggagaagccatacgaatgctccgaatgtggcaaggctttttcacagaaaagtccattaattatccaccagcggatccacacaggagagaagccgtatgagtgccgggagtgcggaaaagccttttctcaaaaatcccaacttatcatccaccatagagcacacactggggaaaagccctacgaatgcacggaatgcggcaaggcgttctgtgagaagtctcatctgattatccataaacgcatccataccggtgaaaagccttataagtgcgcccagtgtgaggaggcgttcagccggaagaccgaactcatcacccaccagctggtgcacaccggagaaaagccttacgagtgtaccgagtgtgggaagactttcagccgcaagagtcagctcataattcaccagcgcacacacaccggggagaaaccatacaaatgtagcgaatgcggtaaagcattttgtcagaagtcacatctgatcggccaccagagaatccatacgggagagaagccctacatctgcacagagtgcggtaaagcgttttcacagaaatctcacctccccggacatcaaagaatacacacaggcgaaaaaccatatatctgcgccgaatgtgggaaagcatttagccagaagtccgacttagttctgcatcaacgtattcatacaggtgaacgcccatatcagtgcgccatctgcggaaaagcctttatccagaagtcacagctaactgtccaccagaggatccacaccgtggtgaaaagctag

SEQ ID NO: 247511 - DNA, 1815 bp, synthetic construct
  misc_feature 1..1815: note = Description of Artificial Sequence: Synthetic coding sequence
  source 1..1815: mol_type = other DNA
atgatgaaatcacaggggcttgtatcatttaaggatgtggcagtggacttcacccaggaagaatggcaacaactcgatccgtcgcagcgaaccctctatcgggatgtaatgctcgagaactactctcacctagtcagtatggggtaccctgtgtctaagcccgatgtcatcagcaaactggaacagggcgaggagccatggatcattaaaggggacatcagcaattggatatacccagatgaataccaggccgacggaagacaaggcaaaaagtctaacttacacaacagtcaatcatgcatactggggacagtgtcttttcatcacaagattctaaaaggcgtgactcgggacgggtctctgtgttcaatcctcaaggtgtgtcagggggacggacagcttcagcgcttcctggagaatcaagataaactgttccggcaagtgacatttgttaactctaaaacagtgactgaggcatctggccacaaatacaatccccttggaaaaatttttcaggaatgcattgagactgatatctctattcaacgctttcacaaatatgatgcattcaagaagaatctaaagccaaatatcgacctcccatcctgctataagagcaactcccgaaagaaaccagaccaaagtttcgggggtggaaagtcaagcagccaatctgagcctaactccaatctcgagaaaattcacaacggggtgataccctttgatgacaaccagtgtggcaatgtcttccgcaacacccagagtttgatccagtaccaaaacgttgagaccaaagagaaatcctgtgtgtgtgttacttgtggaaaggcctttgctaaaaaatcacagcttatcgtgcaccagaggatacacacgggtaagaagccctacgactgtggggcatgcggcaaggcttttagcgaaaaatttcaccttgtggttcaccagcggacgcatacgggagagaagccgtatgactgcagcgagtgtggcaaggccttcagccagaaatcatccctcattattcatcagcgtgtccacaccggagagaagccctacgagtgcagtgagtgcggaaaagccttttcgcagaagtcaccgttgatcattcatcaacgtatccataccggcgaaaagccttatgaatgcagggaatgcggcaaagcgttcagccagaaaagtcagctgataattcaccatcgcgctcatactggggaaaaaccatacgaatgtacggagtgtgggaaagcattctgcgagaaatcgcatcttattatccataagagaatccatacgggagagaaaccatataaatgtgcccagtgcgaggaagccttttccagaaaaacagagcttatcactcatcaactggttcacactggtgagaaaccctatgagtgtaccgagtgcggaaagacattcagccgaaagtcccaactgatcatacaccagcgtacccacaccggcgagaaaccatacaaatgctctgagtgtgggaaagcattctgccagaaaagtcacttgattggccatcagagaatccatactggcgagaagccttacatctgtacagagtgcggtaaggccttcagccagaagtctcatctacctggccatcaaaggattcatacaggtgaaaagccttatatttgtgccgaatgtggaaaagcatttagccagaaaagtgatctcgttctccatcagcgtatccacacaggggaacggccataccaatgtgctatttgtgggaaggcattcatccaaaagagtcagctgacggtccatcaacgcatccatacagtggtcaagtcgtag

SEQ ID NO: 247512 - DNA, 1707 bp, synthetic construct
  misc_feature 1..1707: note = Description of Artificial Sequence: Synthetic coding sequence
  source 1..1707: mol_type = other DNA
atgttagaaaactacagccacttggtaagcatgggctaccctgtttcaaagccggacgtcattagcaaactggagcaaggagaagaaccctggataatcaagggtgacatctccaactggatctaccctgatgagtaccaggctgacggcaggcaagaccggaaatctaacctgcacaacagccagagctgcatacttggaaccgtgagcttccaccacaagattctcaaaggcgtcaccagagacggctctctgtgctcaatactgaaagtctgccaaggagacggccagttgcagcggttccttgagaaccaagataaactgttcaggcaggtcacttttgtgaattccaaaacggtgacagaagcctctggccataaatataacccattgggcaaaatatttcaagagtgcatcgagaccgacatatccattcagcggttccataaatatgacgcctttaagaaaaaccttaaacccaatatcgatctcccttcatgttacaagagcaatagccgaaagaagcctgatcagtcctttggcggaggcaaatcatcaagccagagtgaaccaaacagcaacctggagaagattcacaacggagtcataccttttgacgataaccaatgtgggaacgttttccgcaatacacagagcttaatccagtatcaaaacgtcgagacaaaggaaaagagctgcgtctgcgttacttgtggcaaggcttttgccaaaaagtcccaactgattgtccatcagcggatccacaccggaaaaaaaccatatgactgcggggcatgcggaaaagcgtttagcgagaaattccatctggttgtccatcagaggactcacacaggtgagaagccatatgattgttctgagtgtgggaaggcattctctcaaaagagttctctgattatacatcagagggtgcacaccggcgaaaagccttacgaatgctccgaatgtggtaaagcgttttctcaaaagagccccctgatcattcaccagcgaatccacactggagagaagccctatgaatgcagggaatgtggaaaggctttttcgcagaaatctcagttgataatccaccatagggcgcatactggcgagaaaccctacgagtgcaccgaatgcggaaaagcgttctgcgaaaaatcacacctgataatccataagcggatccataccggagaaaagccatataaatgcgctcaatgcgaggaagccttctcaaggaaaacagagctcatcactcatcagctggtgcacactggcgagaagccatatgaatgtaccgaatgcgggaagaccttttcacgcaagagccagttgattatacaccagcgaacacatactggcgaaaagccttacaagtgtagtgaatgtggcaaggccttttgtcagaaaagccatctgatcggtcaccaacggatccatacgggcgaaaaaccctatatttgcacagagtgcgggaaggcttttagccaaaaaagccacctgcccggacaccagcggatacataccggggaaaagccttacatctgtgccgagtgtggtaaggccttcagccagaagtcagacttagtcctacatcagaggattcataccggcgagcgcccttaccaatgtgccatttgcggaaaagccttcatccagaagagtcagctcacagtgcaccaacgaatccacaccgtcgtgaaatcatag

SEQ ID NO: 247513 - DNA, 1863 bp, synthetic construct
  misc_feature 1..1863: note = Description of Artificial Sequence: Synthetic coding sequence
  source 1..1863: mol_type = other DNA
atggttcccgcagaaacctcatcatccggcttgctggaggaacagaaaatgatgaagtcccagggattagtcagcttcaaagacgttgccgtcgactttacccaggaggaatggcagcagctggatccctcccaaagaaccctatatagagacgtaatgctggagaattactctcacttggtatctatgggatatcccgtgtcgaagcccgatgttatctcaaaattagagcagggagaagaaccctggattattaagggggacatttccaattggatttaccccgacgagtaccaggctgatggccgacaggaccggaaatctaacctgcacaattcccaaagctgtattctggggaccgtttctttccatcacaagattctgaagggcgtgaccagggatggcagtctctgctcaatcctgaaggtctgtcagggggatggccaactacagcggttcctggaaaaccaggacaagctcttccgacaggtaacgttcgtcaactccaagacagtgacagaagcaagtggacacaagtacaatcccctaggaaagatattccaggagtgtatcgagacagacatcagcatacaaaggttccacaagtatgatgctttcaaaaaaaacctaaagccaaatattgaccttccctcctgttataagtccaacagtcgcaagaagccggaccagtccttcggaggcggaaagagctcaagtcagtcagagccgaatagcaacctggagaagatccataatggcgtcattccgttcgatgataatcaatgcgggaacgtgtttcgtaatacccagagcttgattcagtaccagaatgtcgaaacgaaggaaaaatcctgtgtgtgtgtaacctgcggtaaggccttcgctaagaaatctcagctgatcgtgcatcaaaggatacacacaggaaagaaaccatatgattgcggagcatgcggcaaggccttttccgaaaaatttcacctcgttgtgcatcagcggacacacactggtgagaagccctatgactgctctgaatgtgggaaagccttctctcagaaaagctcgcttatcatacatcagagggtccataccggggagaaaccctatgaatgtagcgagtgtggaaaggccttcagtcagaaaagtcctctgattattcatcagcgcattcatacaggggaaaagccctatgaatgccgcgagtgcgggaaagctttttctcagaaatctcagctgatcattcaccaccgagcccatacgggggaaaaaccatacgagtgcactgagtgcggaaaagctttctgtgaaaagtctcacttgattatccacaaacgcatccacacaggcgagaagccatacaaatgtgcacaatgtgaggaggcattctcgagaaaaaccgagctaataacgcatcagttagtgcacacgggtgagaaaccttatgagtgcacagaatgtggcaagaccttcagccgcaagtctcagttaatcattcaccaacgaacacatacaggtgaaaaaccttacaagtgctctgagtgcggtaaagccttttgccagaaatctcacctgattggtcaccaacgaattcacaccggcgagaaaccctatatctgcaccgaatgtggaaaggccttttcacaaaagagtcatctgccaggccaccagcgaattcacactggcgaaaaaccctacatctgcgctgagtgtggaaaagcgttctctcagaagtctgacctagtgctccaccagaggatccataccggtgaaaggccataccaatgcgccatatgcggtaaagcctttatccagaaatcacaactcacagtgcaccagaggattcatacggtggtcaaatcgtag

SEQ ID NO: 247514 - DNA, 1980 bp, synthetic construct
  misc_feature 1..1980: note = Description of Artificial Sequence: Synthetic coding sequence
  source 1..1980: mol_type = other DNA
atggccgctgccgtcctgatggatcgagtgcagagttgtgtgacttttgaggatgtcttcgtatatttttcaagagaggaatgggagctgttagaagaagctcagagattcctgtatcgcgatgttatgctggaaaattttgcgctggtggccacattgggtttctggtgtgaggcagaacacgaggcgccaagcgaacagagcgtgtccgtggagggcgtgtcacaggtaagaacggcggagagtggcttgttccagaaagctcacccttgtgaaatgtgtgatccccttctcaaggacatattgcacctcgcggaacaccaaggttcccacttaacccaaaagctatgtactaggggcctttgccgcaggaggttcagtttttccgcaaacttctaccagcatcagaagcagcacaacggagaaaactgctttagaggggatgacggcggtgcttcatttgtgaaaagctgcaccgtccatatgctgggacggtcatttacatgtagggaagagggaatggacctgcccgacagctcaggtttattccagcaccagacaacctataatcgggtgtccccgtgtaggagaacagagtgcatggaatcttttccccatagctcttcgctaagacaacatcagggcgactatgacggtcagatgttgttttcctgcggagatgaaggtaaagcattcctggacacttttacgctgctggattcccagatgacacacgccgaggtaaggcctttcaggtgtcttccctgcggcaacgtcttcaaggaaaagtcagccctcattaaccaccgcaagatacactctggcgaaatatcccacgtctgcaaggaatgcgggaaagcctttatccacttacaccacttgaagatgcatcagaaatttcatacaggcaaacgccactacacatgctctgagtgcgggaaagcattctctcggaaggacacactcgttcagcatcagagggtgcacaccggtgaacgtagctatgattgctctgagtgcgggaaggcttactctagatcttcccatcttgtccagcatcagcggatccacaccggagaacggccatacaagtgtaacaagtgcgggaaggctttttcacgaaaggacactttagtgcagcaccaacgctttcacacaggggaaagaccctatgagtgtagcgagtgcgggaaatttttttctcagtccagccatctaatagaacattggcggattcacacaggagctcgaccatacgagtgcattgaatgtggtaaattcttcagccataattcaagtcttatcaaacaccgcagggttcacactggcgctcgctcatacgtgtgttcaaaatgtgggaaagcatttggatgtaaggataccctagtgcaacatcagattatccataccggcgctaggccttacgaatgtagcgagtgtggcaaagcgtttagtcggaaggatactctggtgcagcatcagaaaatccataccggagagcggccttacgagtgcggggaatgtgggaaatttttcagccacagcagtaatttgattgttcaccagaggatacacactggagctaaaccgtacgagtgcaacgagtgcggcaagtgcttttcgcataactcaagcttaatactgcaccagcgcgttcacacaggagccaggccatacgtgtgtagtgaatgcgggaaggcatacatttcctctagccatctggttcagcacaaaaaggttcacacgggcgctcgcccttatgagtgtagtgaatgcggcaaattctttagcaggaatagtgggttaatcctgcaccaacgggtgcatactggagagaagccatacgtttgctctgagtgcgggaaagcgtactctcgctcaagccacctcgtgaggcaccagaaagcccacacaggggagcgcgctcatgaatgtaatagctttgggggacccctggcagcgtccctcaaactcgtttag

SEQ ID NO: 247515 - DNA, 1980 bp, synthetic construct
  misc_feature 1..1980: note = Description of Artificial Sequence: Synthetic coding sequence
  source 1..1980: mol_type = other DNA
atggccgctgccgtcttaatggatcgagttcaatcatgtgtgacattcgaagatgtgtttgtctatttttcccgggaggaatgggaattactggaagaggcccagagattcttatatcgcgacgttatgctcgaaaacttcgcccttgtggccacgttgggtttttggtgcgaagctgagcacgaggcccctagcgagcagagcgtcagcgtggagggagtaagtcaggtcaggactgccgaatctgggctcttccagaaagcccacccatgcgagatgtgcgatccactgctgaaggatatactccacctggccgaacatcagggtagtcaccttactcaaaagctttgtacccggggactctgtaggagaagattttccttctctgcaaacttctatcaacaccaaaaacaacataatggagagaattgtttccgcggtgacgacggcggtgcaagctttgtgaagtcatgcacggtccacatgctcggcagatcgtttacttgtcgagaagaggggatggatctgcctgattcaagtggcctgttccagcaccagaccacatacaaccgcgtttctccgtgtcgacggacggagtgtatggagagtttccctcactcctccagcctcagacagcaccagggcgactacgatgggcagatgctgttttcctgcggggacgaaggcaaggcattcctggacactttcaccctgctggatagtcagatgacacacgccgaggtgagaccttttcgctgcctcccatgtggcaatgtctttaaggagaagtcagctttaattaatcataggaagatacactccggagagatttcacacgtgtgcaaagaatgcggaaaagccttcatacacctgcaccacctgaaaatgcaccagaagtttcacacggggaagcgacattatacgtgctcagagtgcggcaaggcattctcacgcaaggataccctggttcagcatcagcgcgtgcacacaggcgagcgctcctacgactgtagtgaatgtggaaaagcttactccagaagcagtcacctggtacagcaccaacgaattcacaccggggaacgcccatataagtgcaacaaatgcggcaaggcgttcagtcgcaaggacacactcgtgcaacaccagcgattccatactggagaaagaccgtacgagtgcagtgagtgtggaaaattctttagccagagtagccatttaatagagcactggaggattcacacaggggctaggccgtatgagtgcatagaatgtggaaaatttttctcccacaattcaagtctcatcaaacacaggcgtgtgcatacgggggctcgaagctacgtgtgttcaaaatgcggaaaagcatttggctgtaaagatactctcgtgcaacaccaaattattcatacaggagccaggccatatgagtgtagtgagtgcgggaaggccttttcccggaaggacactctggtgcagcaccagaagatccacaccggcgaacgcccatacgagtgtggagagtgtgggaagttcttctcacactcctcgaatctgattgtgcatcagagaattcatactggtgccaaaccctatgagtgcaacgaatgtgggaaatgcttttcccataacagcagcctcattctgcatcagagagttcacaccggcgctaggccatatgtctgtagcgaatgcggcaaggcgtacatctcaagctctcacctggtgcagcacaaaaaggttcatacaggcgcaagaccttatgagtgttcagaatgcggtaagttttttagtcgcaattcaggcctgatcctgcaccaaagggttcacactggggaaaagccttatgtgtgcagcgagtgcgggaaagcatactcacgtagttcacatctggtccgacaccagaaagcccacactggcgagcgagcccacgagtgcaacagctttggtgggccattggcagcatctctaaaacttgtttag

SEQ ID NO: 247516 - DNA, 2121 bp, synthetic construct
  misc_feature 1..2121: note = Description of Artificial Sequence: Synthetic coding sequence
  source 1..2121: mol_type = other DNA
atggctgctgcggtgctcatggacagggtgcaaagctgtgtgaccttcgaggatgtgttcgtatacttctcacgagaggagtgggaattgctggaagaggcccagaggtttctgtaccgcgacgtgatgttggagaatttcgccttagtcgcaacgctcgcattcatcttccctgttccatgtagttgtgcagtaggtggcggaaggaagccctgggtcccagatcgcgctgacataacagctgcaaccgtgaaagagacttaccggggacacgggcctgccgagtgggagctggaggaggggttttggtgtgaggcagaacatgaagctcccagcgaacagtctgttagtgtggaaggcgtgagccaggtgaggactgctgagtcaggccttttccagaaagcacacccatgcgagatgtgtgaccccctgctaaaggatattctacatcttgctgagcatcagggctctcatttgacgcagaagctgtgtacccgaggcttgtgcagaagacggttcagcttttctgctaatttctaccagcaccaaaagcaacacaacggtgagaattgtttccgcggtgatgatggcggagcgtccttcgttaagtcctgtaccgttcacatgctgggccgaagcttcacctgcagagaagaaggcatggatttaccagattccagtgggctgtttcaacaccaaactacatacaatcgagtgtccccctgtagacgcactgagtgtatggaaagctttccacactcctcgtcactccgacagcaccagggcgactacgatggacagatgctcttttcatgcggcgacgagggtaaagcctttcttgatacattcacacttctcgacagtcagatgacccatgccgaggtgcggccattccggtgcctgccatgcgggaacgtctttaaagagaagagtgcactcatcaatcatagaaaaattcattctggcgagatatctcatgtatgcaaagagtgcggcaaggcctttattcatctgcaccacctgaagatgcatcaaaagttccacaccggcaaacggcactacacatgctctgaatgtggtaaagcatttagtcgtaaggacaccctggttcagcatcagcgcgtgcataccggcgagaggagctatgattgttctgaatgtggcaaggcttattcaaggagctcccatctggtgcaacaccaaaggattcacacgggcgagcggccttacaagtgcaataaatgcggtaaagctttctctagaaaagataccctggttcagcatcaacggtttcacaccggagaaagaccctacgaatgttcagagtgtggcaagttttttagtcagagttcacacctcattgaacattggagaattcacaccggggcaagaccttatgagtgtatcgagtgcggtaagttcttttcgcacaatagtagcctgatcaagcacagaagagtccacacgggagctcgcagctacgtgtgttctaagtgcggaaaggccttcgggtgtaaagacacactggttcagcatcaaattatacatactggggctcgtccttacgagtgttccgaatgcggcaaggcattctctcgcaaagacacactggtccagcatcagaaaatccatactggcgagcggccatacgagtgcggcgagtgtgggaagtttttctcgcatagctccaatcttatcgtgcaccaacgcattcacaccggagcgaagccatacgaatgtaatgagtgtggaaagtgctttagccacaattcgagcctaatcctccatcaacgcgtgcatacaggcgcaagaccgtatgtgtgttcggagtgcgggaaagcttacatttcctcctcacatttagtgcaacacaagaaggtgcacacaggagcaaggccctacgagtgctccgagtgtggcaaatttttcagcagaaattctggcctgatcttgcaccagcgcgtgcacaccggcgagaaaccctacgtatgtagcgagtgcggaaaggcttatagccgcagctcacacttagtacgccatcaaaaagcacacaccggcgaaagagcccatgaatgtaactcttttggaggacctctggccgctagcttgaagttggtgtag

SEQ ID NO: 247517 - DNA, 1788 bp, synthetic construct
  misc_feature 1..1788: note = Description of Artificial Sequence: Synthetic coding sequence
  source 1..1788: mol_type = other DNA
atggccgctctgagcccgacttttgcaactagcactcaggacagcacctgcctccaggactccgaattcccagtctctagcaaggaccattcttgtcctcaaaatctggacttattcgtctgttcgggactggagcctcacacccccagcgtgggatcacaggagagcgtgactttccaggacgtggctgttgacttcaccgaaaaggaatggccattgttggactcgtcacagagaaagctgtataaggatgtgatgctggagaattattccaatctgacctcactgggctaccaggtggggaaaccaagcctcatctcgcacctggaacaggaagaagagcctcgcactgaagaacgaggcgctcaccaaggggcttgcgctgattgggaaacgccctccaaaacaaagtggagcctgttgatggaggacatcttcggtaaggagactccctcaggtgtaaccatggagagagccggactgggagagaaaagtacagaatatgcccatctcttcgaggtctttgggatggatccccacctcacccagcccatgggtcgacatgccggtaaacggccttaccacagacgcgactacggagtcgcatttaagggcagaccacacctgactcagcatatgtcaatgtacgatggcagaaaaatgcacgaatgccaccagtgtcagaaagcctttactacatccgcctccctgacaaggcaccgccgaattcacacaggtgaaaaaccgtatgagtgttctgactgtgggaaggctttcaatgacccatccgccctgcggtcccatgctaggactcacttaaaagaaaagcctttcgattgttctcagtgcggaaacgcttttcgcacactctcagcactgaaaatccacatgagggtgcatactggggagcgaccatataaatgtgaccagtgtggtaaagcctatggccgatcctgccatctgattgctcataagcgaactcatactggggagcgcccttatgaatgccacgactgcgggaaggcctttcagcacccctcacacctgaaggagcacgttcgcaatcatactggagaaaagccatatgcatgtacacagtgtggtaaggcttttaggtggaagagcaactttaatctgcacaagaagaaccatatggtcgagaaaacatatgaatgtaaggagtgtggaaagtccttcggagacctcgtgtcgaggaggaagcacatgcgaatacatatagtgaagaaaccggtggaatgtcgccagtgcgggaagactttcagaaatcagtcaatccttaaaacacatatgaattcccacacgggggaaaaaccttatgggtgtgacctgtgcggcaaggccttctcggcctcctctaacctgacagctcaccggaaaatccatacgcaagaacgacggtatgagtgtgctgcatgcgggaaggtatttggagactacttgtcaagaaggcgccacatgtcagtgcacctggtgaaaaaacgtgtggagtgtagacagtgcggcaaagctttccgaaaccagagcacgcttaagactcacatgaggagccatactggtgaaaagccttacgagtgcgaccactgcggcaaagctttttctatcggatccaaccttaatgtgcacaggcgaatccataccggtgagaaaccttacgaatgtctggtgtgcgggaaagcttttagcgatcattccagtctgagatcccacgtgaaaacccacagaggggagaagctcttcgtgagctccgtctggaagagattacagtag

SEQ ID NO: 247518 - DNA, 1692 bp, synthetic construct
  misc_feature 1..1692: note = Description of Artificial Sequence: Synthetic coding sequence
  source 1..1692: mol_type = other DNA
atggccgcactttcgcccacctttgcaaccagtacccaggactcgacctgtctgcaggatagcgaattcccagtgtccagcaaagaccacagctgtcctcagaacctcgacctgtttgtgtgtagtggactggaaccccatactccgtctgtgggcagccaggagagtgtcacattccaggacgtggcagtggattttacggagaaagagtggccactgctggactcctcacaaaggaaactatacaaagacgtgatgctggaaaattactctaacctaacaagtctggactgggagaccccctcaaagaccaagtggtcattactgatggaggacatttttggaaaggagacaccctccggcgtgaccatggagagggccggactcggggaaaagtcgaccgagtacgctcatctcttcgaggtgtttgggatggatccgcatttgacacagcccatgggacggcatgccggaaagcggccttaccatagacgcgattacggcgtcgcgtttaaaggacgtcctcacctgacgcagcacatgtctatgtacgacggtcgtaaaatgcatgagtgtcaccagtgtcagaaggctttcactacatccgcctctctgacccgccaccggcgaatccacaccggagaaaaaccttacgagtgtagcgattgcggaaaggccttcaacgatccatccgccctacgctctcatgcccgtacgcacttaaaggagaagccctttgactgttcccagtgcggcaatgcctttcgaacgctgtctgcactcaaaatacatatgcgggtgcacacaggggagaggccttataaatgcgaccaatgtgggaaggcatacggcaggtcatgtcatttaatcgcccacaagcggacccacaccggagagcgcccttacgaatgtcatgattgcggcaaagcttttcagcatccctctcatctcaaagaacacgtgaggaatcacaccggcgagaagccatacgcttgcactcagtgcggcaaagctttcaggtggaagagtaattttaacctgcataaaaagaaccatatggtggaaaagacttacgaatgcaaggaatgtggtaaaagcttcggcgatcttgtgagccgcagaaagcatatgaggattcacattgtaaaaaagcctgtcgagtgcagacaatgcggcaaaactttccggaatcaaagcatactgaaaactcatatgaattcgcatactggcgagaagccgtacggatgcgacttatgcggtaaggccttcagcgcatcctccaatctgactgctcacagaaagatccatacccaggaaagaaggtatgagtgtgcggcatgcggaaaggtgttcggggactacctgtcaagaagacgccatatgagcgtgcaccttgtcaaaaagcgggtcgaatgtcgccaatgcggaaaagcctttcgaaatcagagtactctgaagacccatatgcgctctcacacaggcgagaagccttacgagtgtgaccattgcggaaaagctttcagcatcggttcgaaccttaacgttcatcgaaggatccacactggagaaaagccatatgagtgtctagtctgtggcaaagctttcagcgatcattcatcactgcgaagccatgtaaagacacataggggcgaaaaactcttcgtgtcgagcgtctggaaaaggttgcagtag

SEQ ID NO: 247519 - DNA, 369 bp, synthetic construct
  misc_feature 1..369: note = Description of Artificial Sequence: Synthetic coding sequence
  source 1..369: mol_type = other DNA
atgaacttcagtagccaccggagacggctcccttcaccaccactccccagatcgtactcgcagagttctactagcacccaggacagtacatgcttacaggacagtgaatttcccgtgagttccaaagatcactcttgccctcagaacctcgacttgttcgtctgctcaggactggaacctcacacccctagcgttgggagtcaggagtctgtcaccttccaggacgtcgccgtcgatttcaccgagaaagaatggccactgctggactccagccagcggaaactgtacaaggatgtcatgcttgaaaactacagtaacctcacatctctgggtaaggccagcgctatttctccactgattcatccctag

SEQ ID NO: 247520 - DNA, 822 bp, synthetic construct
  misc_feature 1..822: note = Description of Artificial Sequence: Synthetic coding sequence
  source 1..822: mol_type = other DNA
atgtttggatttcctacagctaccttgctagattgccacgggagatacgcccagaatgttgccttctttaatgtgatgaccgaggctcatcacaagtatgaccatagtgaggcaactggttcaagttcttgggacatccagaatagcttccgacgagaaaagctggaacagaagagtccggatagcaaaacactccaagaggactctcccggagtgcgccaacgtgtgtacgagtgtcaggagtgtgggaaatccttccgtcagaaaggatcattaacccttcacgaacgcatccacacaggtcaaaagcccttcgagtgtacacactgtggtaaaagtttccgggctaaaggcaatttggtcacacaccaaagaatacacactggggagaaaccctatcagtgcaaggagtgcggcaagagctttagccaacgtgggtctctggctgttcacgagcgtttacatacagggcagaagccttatgagtgtgctatatgtcagaggtccttccgcaaccagagtaacctcgctgtccaccggagggttcacagtggcgagaagccataccggtgcgaccagtgtgggaaagcgttctctcaaaagggatcccttatcgttcatatccgcgtgcacaccggactgaagccttacgcttgcacgcagtgccgcaagtcattccacacacgcggtaactgtattctgcatgggaagatacacacaggggagaccccctacttatgtggtcagtgtggcaagtccttcactcagcggggatcgcttgcggtgcatcagaggtcctgcagtcaacggctgacgctgtag

SEQ ID NO: 247521 - DNA, 822 bp, synthetic construct
  misc_feature 1..822: note = Description of Artificial Sequence: Synthetic coding sequence
  source 1..822: mol_type = other DNA
atgttcggcttcccaacagcaaccctactcgactgtcacggtcggtatgcccaaaacgtcgcattcttcaatgtgatgactgaggcgcaccataagtacgaccactccgaagccactggctcctccagttgggacatacaaaattccttccggagagagaagctggaacagaagtcccctgactcaaaaacactgcaggaagattcacccggagtcaggcagagggtgtacgaatgtcaagaatgcgggaagtctttcagacaaaaggggagcctgaccttacacgaacggatccacacaggccagaagccgtttgaatgcacacattgcggaaagtcattccgtgccaaggggaaccttgtgacacaccaaagaattcatacaggtgaaaagccttaccagtgcaaggagtgtggtaagtcattctctcagcggggttcactggccgtgcacgagcgcctccatactgggcagaagccctacgaatgcgccatttgccagcggtctttcaggaaccaaagtaatctcgctgtccatcggagggtccattcaggagaaaaaccctacagatgcgaccagtgtggaaaagccttctcccagaaaggatctctgatcgtacacatcagagtgcacacaggtttgaagccatatgcatgtactcagtgtcgaaaatctttccacacacgcggtaactgcatactgcacggaaaaattcacacaggagaaactccgtacctctgtgggcagtgtggaaagtcgttcacacagcgaggctctttggccgtgcaccagcgttcctgctctcagagactgactctctag

SEQ ID NO: 247522 - DNA, 1530 bp, synthetic construct
  misc_feature 1..1530: note = Description of Artificial Sequence: Synthetic coding sequence
  source 1..1530: mol_type = other DNA
atggcgcttagtcaaggattactgacgtttagggatgtcgccatcgaatttagccaggaagagtggaagtgcctggatcccgctcaaagaaccctctatcgagacgtcatgcttgaaaattaccggaaccttgtaagcttggacatttcctcaaagtgcatgatgaacactctgagctcaactggacagggaaacacagaggtcatccacactgggacactgcagcgccaggcgagctaccacatcggggcattctgtagtcaggagattgagaaggacatccacgattttgtgttccagtggcaggaggacgagactaatgatcacgaggcccctatgacggagataaagaaactcaccagctcaacggacaggtatgatcaacgccacgcagggaacaagcctattaaaggacagttagagagcagattccatctgcacctgaggagacatagaaggattcacactggggaaaagccctacaagtgcgaggaatgtgagaaggtgttttcctgcaagtctcatttggaaatacaccggatcattcacacaggtgagaagccgtacaagtgcaaggtctgcgacaaggcgtttaaacacgacagccacctggcaaaacatacacggatccaccggggtgataagcactatacctgtaacgaatgtggcaaggtctttgatcagaaagcaacattggcctgtcatcaccgctcacacacgggagagaagccatacaagtgcaatgaatgtggaaagacattcagccaaacaagccacctggtgtaccatcaccggcttcatacaggtgagaaaccctataagtgcaacgagtgtgggaagacctttgcccgaaacagcgttctagtgattcacaaggcagtgcatacagcagaaaaaccctacaaatgtaacgagtgtgggaaggtgttcaaacagagagcaaccctggccggacatcgccgtgtgcacaccggggagaagccctataggtgcgaagagtgcgataaagtatttagtcgtaagtcgcaccttgagcgccatcggaggattcacaccggagaaaagccttataagtgcaaagtctgcgacaaggccttcaggagtgattctcgactggctgagcatcagagggtccacacaggcgagcgtccctacacctgcaacgaatgcggaaaggtcttcagcacaaaggcgtacctcgcgtgtcaccagaagctccacactggagagaaattgtatgaatgtgaggaatgcgacaaagtttacatccggaagagccatctggaacgtcatagaaggatacatacgggagaaaagccacataaatgtggcgattgcggaaaggccttcaatagcccgtctcatcttatccgtcaccaacgtatacatacaggacagaaatcttacaagtgccatcaatgcggaaaggttttcagtttgaggtccctcttggcagaacatcagaagatcccattcggcgacaactgttttaagtgcaacgaatattcaaagccatccagcattaactag

SEQ ID NO: 247523 - DNA, 1530 bp, synthetic construct
  misc_feature 1..1530: note = Description of Artificial Sequence: Synthetic coding sequence
  source 1..1530: mol_type = other DNA
atggccctgtcccagggtctgctcacctttcgcgacgtagcgatcgagtttagccaggaggaatggaagtgtttagacccagctcagcgcactctatatcgagacgtgatgctcgagaactacagaaacctcgtctccctcgacatttcatcgaagtgcatgatgaacaccctttctagtacaggtcaaggcaacactgaggtgattcacacagggactctgcagcggcaagcctcctaccatatcggtgcattctgttcccaagagattgaaaaggatattcacgacttcgtgtttcagtggcaagaggatgaaacaaatgatcacgaagccccaatgactgagatcaagaaactcacatctagcaccgaccgctatgaccagcgacacgccggtaacaagccaattaagggtcagctcgagagtaggtttcatttgcacctgaggcgacacaggagaatccacaccggagagaaaccctacaaatgtgaggaatgcgaaaaggtcttttcgtgtaagtcacatctcgaaatccaccgaattatccataccggcgaaaagccatataagtgcaaagtgtgcgataaggcattcaaacacgatagtcaccttgccaagcacacacgcatccatcggggtgacaagcattatacgtgcaacgagtgtggaaaggtgtttgatcagaaggctactctggcttgccatcatagatcacatactggagagaagccctacaaatgtaacgaatgcgggaagaccttttctcaaacatctcacttggtataccatcacagactgcataccggtgaaaaaccatacaagtgtaatgagtgtggaaagaccttcgctaggaatagtgtgctcgtgatccacaaagcagtgcatacagccgaaaaaccctacaagtgcaatgagtgcggcaaggtgttcaagcagcgggctactctagcaggtcacagacgtgtgcatacaggcgagaaaccctatcgctgtgaggagtgtgacaaggtattctctcgcaagtctcatctcgaaaggcataggcgcatccatacgggcgagaaaccatataaatgcaaagtctgtgacaaagcgttccgatctgactcaaggttggccgagcaccagagagtccatacaggagagaggccctacacatgtaacgagtgtgggaaagtgttctccacgaaagcttatctggcatgccaccagaagttacacaccggggagaagttatacgagtgtgaggaatgtgacaaggtgtacattaggaagtcccatcttgaacgccatagaagaatacacactggagaaaaacctcataaatgcggcgattgcggcaaagcctttaactctccctcgcacttgatccggcaccaaagaatccatacaggtcagaaatcgtacaagtgtcaccagtgtggaaaggtcttctcccttcgcagtctgttggctgaacaccaaaaaataccattcggggacaactgtttcaaatgtaacgagtattcaaaaccaagttcgattaactag

SEQ ID NO: 247524 - DNA, 1209 bp, synthetic construct
  misc_feature 1..1209: note = Description of Artificial Sequence: Synthetic coding sequence
  source 1..1209: mol_type = other DNA
atgtacacgagcgaggaaaaatgtaaccagcggacacagaagaggaaaatctataatgtgtgtccacggaagggtaagaagatatttatccatatgcatgagataatccagatagatggtcacatctatcagtgcctagaatgcaaacaaaacttttgtgaaaatctggctctgattatgtgcgaaagaacgcatacaggagaaaaaccatacaaatgcgacatgtgtgagaagacctttgtgcaatcgagcgatcttactagtcaccagaggattcacaactacgaaaaaccttacaagtgcagtaagtgcgaaaaatccttctggcatcacttggcgcttagtggtcaccagaggacacacgcaggcaagaaattctatacctgtgacatctgcgggaaaaattttggtcagagttccgacttattggttcaccaacgatctcacacgggcgagaaaccctatctctgtagcgaatgcgataagtgcttctcaagatcaaccaatctgattagacatcggagaactcatactggtgagaaacctttcaagtgtctggaatgcgaaaaagccttcagcggcaaaagtgatcttatcagtcaccaacggacacacaccggcgaaaggccctacaaatgtaacaagtgcgagaagagctacaggcataggagcgcctttatcgtccacaagagagtccacacgggcgaaaagccatacaagtgcggcgcatgcgagaaatgttttggccagaagagcgatctgatagttcaccaaagggtgcacacaggggaaaagccctacaaatgcctcgagtgcatgaggtcgtttacacggtcagctaacttgatcaggcaccaggctactcacactcacacctttaagtgcctggaatatgaaaaatctttcaattgtagctctgatttgattgtccatcagagaattcatatggaagagaagccccaccagtggtctgcttgcgaaagcggattcttgttaggtatggacttcgtggctcagcagaagatgaggactcagaccgaagaactgcactataagtacacagtctgtgataagtcattccaccaatctagcgcactgttgcaacaccagacagtgcatatcggagaaaaaccatttgtgtgtaacgtttctgagaaggggctggagctctcccctccacatgcctcagaggcgagccaaatgagctag

SEQ ID NO: 247525 - DNA, 1209 bp, synthetic construct
  misc_feature 1..1209: note = Description of Artificial Sequence: Synthetic coding sequence
  source 1..1209: mol_type = other DNA
atgtacacaagtgaagaaaagtgcaaccagaggacacagaagcgaaagatctataacgtgtgcccaagaaagggaaagaagatcttcatacatatgcacgaaatcatacagattgatggacatatctaccagtgcctggagtgcaaacagaacttttgcgaaaatttagccctgataatgtgcgaacgcactcacaccggcgaaaaaccctataagtgcgatatgtgtgaaaagaccttcgtgcagtcatcagacctgacgtctcatcaacgaatccacaactatgagaagccttacaaatgtagcaagtgtgaaaagtccttctggcaccacctagcactgagcggccaccagaggacacatgccggtaagaagttttatacatgcgatatttgcggcaagaactttgggcaaagcagcgatctgctcgtacatcagagatctcacactggggaaaaaccatatctgtgctctgagtgcgataaatgcttttcaagaagtaccaacctcatccggcataggcggacacatactggcgagaagccatttaagtgtcttgaatgtgagaaagcattctctgggaagtcggatctgattagtcatcagagaacacacaccggcgaaagaccctataagtgcaacaagtgtgagaagtcctatcggcatcgttctgcttttatcgtacacaaacgcgtgcataccggtgagaagccttataagtgcggggcatgtgaaaagtgttttggacagaagtcagatttaatcgtgcatcagagagtgcacacaggcgaaaaaccatataagtgccttgagtgcatgaggagtttcactagaagcgccaaccttattcgccatcaggctactcatacacacacctttaagtgcttggaatacgaaaaatccttcaattgctccagcgatttgatcgtccaccaaagaattcacatggaggaaaaaccccaccagtggtccgcctgtgaatctgggttcctccttggcatggacttcgtcgcccaacagaagatgagaacgcagaccgaagaactccactacaagtacacagtctgcgataagagcttccaccagagcagcgcactgctgcaacatcagacagtgcatataggggagaaaccttttgtgtgtaacgtgtcagagaaaggtctggaattgtcccctcctcatgctagtgaggcttcacagatgtcttag

SEQ ID NO: 247526 - DNA, 81 bp, synthetic construct
  misc_feature 1..81: note = Description of Artificial Sequence: Synthetic coding sequence
  source 1..81: mol_type = other DNA
atgtatacatccgaagaaaagtgcaaccagagaacacagaagcgtaagatctataatgtttgtccaagaaaggggaagtag

SEQ ID NO: 247527 - DNA, 1221 bp, synthetic construct
  misc_feature 1..1221: note = Description of Artificial Sequence: Synthetic coding sequence
  source 1..1221: mol_type = other DNA
atggcttcaaccgaggagcaatatgatttaaaaattgtgaaagttgaggaggatcccatctgggaccaggaaacacatctgagaggaaataacttttcaggacaggaagccagtagacagctttttcggcaattctgttatcaagagacccccggtcccagggaagctctttccaggttaagggagttatgccaccagtggctccggccagagattcacacaaaagagcagattttggagttgctcgtgctcgagcaatttctgaccatcctccccgaggaactgcaggcatgggtgagggagcaccatcctgagagcggggaggaggcagtggctgtggtggaggatttagaacaggagcttagcgaaccaggaaaccaggccccagatcacgagcacggccactccgaagtgctcctggaggatgttgaacatctgaaggtcaaacaggagccgacagatatccagctccagcctatggtcacccagcttaggtatgagagtttctgtttacaccagttccaggaacaggatggtgagtcgatccccgagaaccaggaactggccagcaagcaggaaatcctgaaggagatggaacatctgggtgatagcaagctgcagcgggatgtgtcgttggacagtaaatatcgagagacatgcaaacgggacagcaaggctgagaagcagcaagcccattcaactggcgagcgccgtcatcggtgcaatgagtgtggcaagagctttaccaagtcctccgtactgatcgaacatcagcggatccacacaggcgagaagccctatgagtgcgaagagtgcgggaaagcattttcccggagatcgtctctcaacgagcatcgaaggtcacacaccggagagaagccttatcagtgtaaggagtgcggaaaagcctttagcgccagtaatggtctgacccggcaccgcaggatacacaccggtgaaaaaccgtatgaatgcaaagtttgtgggaaagccttcctcctatcatcttgcctcgttcagcaccagcgcatccacactggcgagaaacgctatcagtgccgggaatgcgggaaggccttcattcaaaacgcagggctgttccagcacttgcgcgtccacactggggagaaaccctatcagtgttcacagtgctccaagctgttcagcaagcggaccttgctcaagaagcatcagaagatccacaccggtgaacggccatag

SEQ ID NO: 247528 - DNA, 1221 bp, synthetic construct
  misc_feature 1..1221: note = Description of Artificial Sequence: Synthetic coding sequence
  source 1..1221: mol_type = other DNA
atggcttccactgaagagcagtacgacctcaaaatagtcaaagtagaagaagaccccatctgggaccaggaaacacatctgagaggcaataactttagtggacaggaagcctctcggcaactgtttaggcagttctgttaccaggaaacacccggacccagggaggccctgtctcggcttagagagctctgccaccagtggctgaggcccgagatacacactaaggaacagatattagaactgttggtgctggaacaatttttaaccatcctccctgaggaacttcaggcgtgggtgcgggagcatcaccctgaatcaggtgaggaagctgtggctgtggtggaagatttggaacaggagctgagcgaacctgggaaccaagcacccgaccacgagcacggccactctgaagtgctcctcgaagatgtcgaacatctcaaggtgaagcaggaaccgactgatattcagctgcagccaatggtgactcagctcagatacgaatctttctgtctgcaccaattccaagaacaggatggagaaagtatcccagaaaatcaggagcttgcgtcaaagcaggaaattctgaaagaaatggagcatttgggtgacagtaagctgcagcgggacgtgtcgttagacagcaagtaccgcgagacctgcaagcgggatagtaaagctgagaagcagcaagctcactccacaggtgagcgcagacatcgttgcaatgaatgcggcaaatcctttaccaagagcagtgtactcatcgagcatcaaagaatccacaccggcgagaagccctacgagtgtgaagaatgcggcaaagcattctcccggagatcaagcctgaatgaacatcggagaagtcatactggcgaaaagccctatcagtgtaaggagtgtggaaaagccttctccgccagcaacggactgaccaggcatagacggatccatacaggcgagaagccatacgaatgtaaggtgtgtggtaaagcattccttctctcttcctgcctggtccagcaccagcgcatccatacgggcgaaaaacgctaccagtgtagagagtgcggcaaggcatttatccagaacgccggactgtttcagcatctgagggtgcatactggtgagaaaccttaccagtgttctcagtgttcaaagctattctctaaaagaactcttctcaaaaaacaccagaagattcacactggcgaacggccatag

SEQ ID NO: 247529 - DNA, 1221 bp, synthetic construct
  misc_feature 1..1221: note = Description of Artificial Sequence: Synthetic coding sequence
  source 1..1221: mol_type = other DNA
atggccagcactgaggagcagtacgatcttaagattgtcaaggttgaggaagaccccatttgggaccaggaaacacatctgagagggaacaacttttccggccaagaagcatcaagacagctttttagacagttctgctatcaggaaactccgggaccaagggaggccctgtccagattgcgggaactatgtcaccaatggctccggccagagatccacacaaaggagcagatccttgagctgctcgttctggagcaatttcttactatcctgccagaggagctccaggcatgggttagagagcaccatcccgagtctggcgaggaggctgtggcagtggtcgaggacctggaacaggagctgtccgagccaggaaaccaggctcctgatcacgagcacggacactccgaggtcctcctcgaagacgtcgagcaccttaaagtgaagcaggagcccaccgacatccaattgcagccaatggtgacccagcttcgctatgagtctttctgcctgcatcaatttcaggagcaggacggggagtccatcccggagaaccaggagctggcctcaaaacaagaaatcctgaaagagatggagcatctgggggacagtaaactgcagagggatgtttctcttgatagtaagtatagggaaacttgtaagcgagactccaaggccgaaaagcagcaggcccactccacaggtgagagacgtcacaggtgcaacgagtgtgggaagtccttcacaaagtcaagcgttctgatcgagcaccagaggattcacacgggcgaaaagccttacgagtgcgaggagtgtggtaaggcctttagtcggaggagttctctcaacgagcacaggcgaagtcataccggagagaagccctatcagtgcaaagagtgtggtaaggcttttagcgcctcaaatggacttacgaggcaccggagaatccatactggagagaagccctacgagtgcaaggtatgcgggaaagcattcctgctgtcctcttgtctggtccagcatcagcggatacacaccggagagaagcgctatcagtgtagggagtgtggcaaggcattcatccagaacgctggcttgttccagcacctaagggtgcacactggcgagaaaccgtaccagtgcagtcagtgctctaagctgttttcaaaacgcacgttattaaaaaagcaccaaaaaattcataccggtgaacgcccatag

SEQ ID NO: 247530 - DNA, 324 bp, synthetic construct
  misc_feature 1..324: note = Description of Artificial Sequence: Synthetic coding sequence
  source 1..324: mol_type = other DNA
atggcttcaacagaggagcaatatgacttgaaaatagttaaggtggaggaagatcctatttgggatcaagaaactcatttaagaggaaataacttcagtggccaggaggcctctaggcagttattccgccaattctgttaccaagaaactcccggacccagagaagcccttagccggctgcgtgagctctgccaccagtggttaaggccggaaatacataccaaagagcagatccttgagcttttggtattagaacagtttcttacaatcctgccagaggagctacaggcctgggtgcgggaacaccaccccgaatcaggatag

SEQ ID NO: 247531 - DNA, 237 bp, synthetic construct
  misc_feature 1..237: note = Description of Artificial Sequence: Synthetic coding sequence
  source 1..237: mol_type = other DNA
atggcttccacggaagaacagtatgacctgaaaattgtgaaagtggaagaggaccccatctgggaccaggaaacacacttgcggggtaacaactttagcggccaggaggcaagtaggcagctgtttagacagttctgttatcaagagacccctggtccacgtgaagccctgtctcggctccgcgaattatgtcatcagtggctgaggcccgagattcacactaaggagcagatctag

SEQ ID NO: 247532 - DNA, 1221 bp, synthetic construct
  misc_feature 1..1221: note = Description of Artificial Sequence: Synthetic coding sequence
  source 1..1221: mol_type = other DNA
atggcctccactgaggaacagtatgatctgaagattgtgaaagttgaagaagaccccatttgggaccaggagacccacctcaggggtaacaatttctctggccaggaggcttcacgccagttgttccgacagttttgctaccaagaaactccagggccacgcgaggcactgagccggttaagagagttgtgccaccagtggctccggccagaaattcacacaaaagaacagatcctggaacttttggtgttagaacagttcttgaccatattgccagaggagctgcaggcatgggtgcgtgaacatcatcccgaatccggagaagaggctgtggcggtggtggaggatttagagcaggagctaagcgagccgggaaaccaagctcctgatcatgaacacggacacagcgaagttctgctggaggatgtggaacaccttaaagttaagcaggaacctactgacattcagctccagcctatggttacccaactgagatacgagagtttttgcttgcaccagtttcaggagcaggacggcgagtcaatccctgagaaccaggaactggcatcaaagcaggagattctcaaggagatggagcatctgggcgattcaaaactgcagagagatgtcagccttgattctaagtatcgcgagacatgtaagcgtgacagcaaggctgaaaaacagcaagctcacagtacaggggagagaagacatcgatgcaatgagtgtggcaagtctttcaccaagtctagcgtgctcatagaacaccagagaatacatacgggcgaaaagccttatgagtgcgaagaatgcgggaaagctttcagtcggcgatcctcactcaacgaacacaggcggagccacaccggtgagaagccctatcaatgtaaggagtgcggcaaggcattttctgccagcaacgggctgacacggcaccgtcgcatccatactggcgagaagccctacgaatgcaaagtgtgtgggaaagcctttctgctcagtagttgtctagttcagcaccagagaatacatacaggcgaaaagcggtaccagtgtagagagtgcggcaaagccttcatccagaatgcaggattattccaacatctgagggtgcatacgggggaaaagccgtatcagtgtagtcagtgctccaagctgttctccaaaagaaccctgcttaagaagcatcagaaaatccacacaggagagcgaccctag

SEQ ID NO: 247533 - DNA, 54 bp, synthetic construct
  misc_feature 1..54: note = Description of Artificial Sequence: Synthetic coding sequence
  source 1..54: mol_type = other DNA
atggcctctactgaggagcaatatgacctgaaaatagtaaaggtggaagaatag

SEQ ID NO: 247534 - DNA, 468 bp, synthetic construct
  misc_feature 1..468: note = Description of Artificial Sequence: Synthetic coding sequence
  source 1..468: mol_type = other DNA
atggcatcaaccgaagaacagtatgacctcaaaatagttaaggtggaagaagatccgatctgggatcaagagactcatctcagaggcaacaacttctctggtcaggaggcctcacggcagctgtttcggcaattttgctaccaggaaacacctggcccacgcgaggccctcagcaggctgcgggaactttgtcaccaatggctcagacctgagattcacacaaaggaacagattctcgagctcctggtcctagaacagttccttacaattcttcctgaagaactgcaggcatgggtaagggaacatcaccctgagtcaggtgaagaggctgtggctgtcgttgaagatttagagcaagagctgtcagaacccggaaatcaagccccagaccatgaacatgggcattctgaagtcctcctcgaggacgttgaacatctcaaagtaaagcaagagcctaccgacatatag

SEQ ID NO: 247535 - DNA, 75 bp, synthetic construct
  misc_feature 1..75: note = Description of Artificial Sequence: Synthetic coding sequence
  source 1..75: mol_type = other DNA
atggcctccactgaagaacaatatgatcttaaaatcgtgaaagtcgaagaggaccctatctgggaccaggagtag

SEQ ID NO: 247536 - DNA, 312 bp, synthetic construct
  misc_feature 1..312: note = Description of Artificial Sequence: Synthetic coding sequence
  source 1..312: mol_type = other DNA
atggccagtaccgaagaacagtatgacttaaagatcgtcaaagtcgaagaggatcccatttgggaccaagagactcatctgagaggcaataacttcagcggccaggaagcctcacgtcagttgttccggcagttttgttatcaagagacgccgggtccccgtgaagcgcttagcaggttaagagagctgtgtcatcagtggctcaggcccgagatccacaccaaagaacagatcctggagctattagtcttggagcagttcttgactatcctccccgaggagctgcaggcatgggtccgtgagcatcactag

SEQ ID NO: 247537 - DNA, 447 bp, synthetic construct
  misc_feature 1..447: note = Description of Artificial Sequence: Synthetic coding sequence
  source 1..447: mol_type = other DNA
atggctagtaccgaggaacagtatgatctgaaaatcgtgaaagtggaagaagacccaatctgggaccaggagactcaccttcggggaaataatttcagcggtcaggaggcttctcggcagctgtttagacagttttgttatcaggagacccccggaccacgcgaagccctgtcccgtttacgagaattatgccatcagtggctgaggccagagattcacaccaaagaacagatcctggagctgttagtgcttgaacaatttttaacaatcctgcctgaggaactgcaggcatgggttcgtgaacatcaccccgagtctggggaagaagcagttgctgtagtggaggacctggagcaggagttgtccgaacctggcaaccaggcccctgatcatgagcatggtcactctgaggtgttgctagaggacgtggaacatctgaaagtgtag

SEQ ID NO: 247538 - DNA, 654 bp, synthetic construct
  misc_feature 1..654: note = Description of Artificial Sequence: Synthetic coding sequence
  source 1..654: mol_type = other DNA
atggcctccaccgaggagcagtatgacctgaagattgtgaaggtggaagaggatcccatctgggatcaagaaacacatcttcggggtaacaacttctccggacaggaggcgtctcggcaactttttagacaattttgttaccaggagacacctggtcctcgagaggcactctcgcgtctcagagaactgtgccatcagtggttaaggcctgagatccataccaaagaacagattctggagctgctggtactggagcagttcctgaccatacttcccgaggagctccaggcctgggtaagggagcatcaccccgagagcggagaggaggctgtcgccgtagtagaggaccttgagcaagagctttctgagcccggaaaccaggccccagaccacgagcacggccactcagaagtactgctggaagacgtggaacacctgaaggttaaacaggagcctacagatatccagcttcagcccatggtcacccagctcaggtatgagagcttctgcctgcaccagtttcaggaacaggatggagagtccattccggaaaaccaggaactggcttccaagcaggagatcttaaaagagatggagcacctcggggactcgaaactgcagagggatgtttcactggattccaagtaccggtag

SEQ ID NO: 247539 - DNA, 963 bp, synthetic construct
  misc_feature 1..963: note = Description of Artificial Sequence: Synthetic coding sequence
  source 1..963: mol_type = other DNA
atgcctaagaagaaaactggcgctcggaaaaaagctgaaaataggagagaaagggaaaagcaactcagagcctcacggtccacaattgacctagccaaacacccgtgcaacgcttccatggagtgtgacaaatgccaacgcagacagaaaaatcgcgctttttgctacttttgcaatagtgttcaaaagctgcctatttgtgcgcagtgtggaaaaactaagtgcatgatgaaatcatctgactgtgtgattaagcacgccggagtttatagcaccggattggctatggtcggcgcaatatgtgatttctgcgaggcctgggtctgccacggtcggaagtgcttatcaactcatgcatgcgcgtgtcccctgactgatgcagagtgtgttgagtgcgaacgtggagtctgggaccacggaggcaggatttttagttgctcattctgccacaactttctgtgcgaggacgaccagttcgagcaccaggctagctgccaggtgctggaggctgaaacttttaagtgcgtatcgtgtaataggctgggacaacattcctgtctgaggtgcaaggcctgtttttgcgatgaccatacgcgttcgaaggtgtttaagcaggagaaaggtaagcaacccccttgtcctaaatgtggccacgagactcaggagactaaagatctgagcatgagcacgcgttcgctgaagttcggtagacagaccggcggagaggagggcgatggcgcttcaggatatgatgcgtactggaagaatctctcctccgataaatacggcgatacatcctatcatgatgaggaggaggacgaatacgaggccgaggacgacgaagaagaggaggatgaaggcagaaaggattccgatacggaaagctccgacctgttcacaaacctgaacctgggacgcacttacgctagcggttatgcccattatgaggagcaagagaactag

SEQ ID NO: 247540 - DNA, 783 bp, synthetic construct
  misc_feature 1..783: note = Description of Artificial Sequence: Synthetic coding sequence
  source 1..783: mol_type = other DNA
atgccccagtggaacgtgacaagcgtcagggggaaaaccaaatgtatgatgaagtcaagtgattgcgtcatcaagcatgctggcgtgtatagcaccggattagccatggtgggggcaatatgtgacttctgtgaagcctgggtttgtcacggcaggaaatgcctcagcacccacgcctgtgcgtgcccccttacagacgcagagtgtgtggaatgcgagcgaggcgtctgggatcatggtggccgtattttcagctgcagcttttgccacaattttctttgcgaagacgaccaatttgagcaccaggcaagctgtcaggtgctcgaggccgaaacgttcaaatgcgtgtcttgcaataggttgggccagcactcttgtctgcggtgcaaagcatgcttctgtgacgatcacacacggagtaaagtcttcaaacaagaaaaaggaaaacagcccccttgccccaagtgtggccatgagacccaagaaacaaaagacctgtccatgagtacgcggagcctgaagtttgggagacagaccgggggtgaggaaggggatggagcatccggctatgacgcttactggaaaaatttgtccagcgataagtatggtgatactagctatcacgatgaggaggaggacgaatatgaggcagaggatgacgaagaggaggaggacgaggggaggaaagattctgacactgaatcaagcgacttattcacaaatttgaatctgggacgaacgtacgctagcggatatgcccactacgaggaacaggaaaattag

SEQ ID NO: 247541 - DNA, 423 bp, synthetic construct
  misc_feature 1..423: note = Description of Artificial Sequence: Synthetic coding sequence
  source 1..423: mol_type = other DNA
atgcctaaaaagaagaccggagctcgcaagaaggcggagaatcgcagggaacgcgaaaaacagctgcgcgcatcgcggagcactattgatctggcgaagcacccctgcaatgcatccatggaatgcgataagtgtcagcgccgacagaagaatagagcattttgctacttctgtaattccgtgcagaaacttcccatctgcgcccagtgtggcaagaccaaatgtatgatgaagtcttccgattgcgtcatcaagcacgcaggcgtttactctaccggcttggcaatggtgggagccatttgcgacttttgtgaggcctgggtctgtcatggaagaaaatgcctcagcactcacgcctgtgcatgcccccttacagacgccgagtgcgttgagtgcgagcgcggtgtgtgggatcatggatag

SEQ ID NO: 247542 - DNA, 462 bp, synthetic construct
  misc_feature 1..462: note = Description of Artificial Sequence: Synthetic coding sequence
  source 1..462: mol_type = other DNA
atgccaaaaaagaaaaccggagccaggaagaaagcagaaaatagaagggagcgcgagaagcagctgagagctagcagaagtacaatagacttggccaagcacccgtgtaatgcttccatggagtgtgataagtgccaaagaaggcagaaaaatcgcgcattctgctatttttgtaattctgttcagaagctgccgatttgcgctcaatgtggtaaaacaaagtgcatgatgaagagcagcgactgcgtcatcaagcacgctggcgtgtacagcactggcctggccatggtcggcgcaatctgcgacttttgcgaggcatgggtttgtcatggaagaaagtgtctgagcacccatgcttgcgcatgccctctgaccgatgctgaatgcgtggagtgtgaaagaggggtatgggaccacggcggaagaatcttcagttgctccttctgtcacaattttttgtag

SEQ ID NO: 247543 - DNA, 690 bp, synthetic construct
  misc_feature 1..690: note = Description of Artificial Sequence: Synthetic coding sequence
  source 1..690: mol_type = other DNA
atgccaaagaagaaaaccggagccagaaaaaaggccgagaacaggcgcgagcgggaaaagcagttaagggctagtaggagcacaattgaccttgctaagcatccttgcaatgcttcaatggagtgcgacaagtgccagaggcgccagaagaaccgcgcattctgctatttttgcaacagcgttcagaagttacccatatgcgcccagtgcggtaaaactaagtgcatgatgaaaagctcggactgcgtgatcaaacacgcaggggtgtactctaccgggcttgccatggtgggagccatttgtgatttttgtgaggcatgggtgtgtcacggacggaagtgtcttagtacccacgcgtgcgcatgtcccttaaccgacgcagagtgtgtcgagtgtgaacggggtgtgtgggatcatggtggaagaatcttcagctgctccttttgccataacttcttgtgcgaagatgatcagttcgaacatcaggccagttgccaagtcttggaggccgaaaccttcaagtgcgtgagctgcaatcgccttggccagcattcatgtctgcgttgtaaggcatgcttctgcgacgaccacacacgatctaaggtgttcaaacaggaaaagggtaagcagccaccttgtcccaagtgcggccacgaaacacaagagactaaggatctcagcatgagctag

SEQ ID NO: 247544 - DNA, 1392 bp, synthetic construct
  misc_feature 1..1392: note = Description of Artificial Sequence: Synthetic coding sequence
  source 1..1392: mol_type = other DNA
atggcccagggcctcgttactttcgccgacgtcgccatcgacttctcgcaggaggaatgggcctgtctgaactcagcgcaaagagacctatattgggacgtcatgctggaaaactactccaatctcgttagtttggatctggagtcagcatacgagaacaaatcactgccgaccgagaagaacatccacgaaattcgcgcttctaagcggaattccgaccggcgttccaagtccttggggcgtaattggatatgtgaaggtaccctggagagacctcagagatcccggggtcgatacgtgaaccagatgatcattaattacgtgaaaagacccgcaacccgggaaggaacaccaccaaggactcaccaacggcaccacaaggaaaactcattcgaatgcaaggattgcggtaaagcattttcgagaggctaccagctttcccaacatcaaaagatccacaccggagagaaaccttatgagtgtaaagagtgcaagaaagcctttcgttggggcaaccagctgacccaacaccagaagattcacacaggggagaaaccttacgaatgtaaggattgcggcaaagcttttagatggggtagcagtctggttatccacaagcggatccatacaggagagaagccgtacgagtgcaaggattgcggcaaagcttttcgcagaggtgatgagttgacccagcaccagaggtttcacaccggagagaaggactatgagtgcaaggattgcgggaagacattctctagagtctataagctgatacagcacaaaagaatccactcaggcgagaagccatatgagtgcaaagattgtggcaaggcttttatctgtgggtcatctctcatacagcataagcgcatccacactggggaaaaaccatacgaatgccaggagtgcggcaaggcttttacaagggtgaattacctgacccaacaccagaagatacataccggcgaaaaaccccacgagtgcaaagagtgtggtaaggcattcagatggggctcttcactggtgaaacatgagagaatccacactggcgaaaaaccctataaatgcactgagtgtggaaaggcatttaattgcggctatcacctcacgcaacacgagagaattcatacaggcgagacgccatacaaatgtaaagaatgcggcaaggcgttcatctacggttcgtcactggttaagcacgagaggattcataccggtgtcaagccttatggctgcaccgaatgtgggaaaagttttagccatggccaccagctgacacagcaccaaaagacccatagcggagcaaaatcctacgaatgtaaggagtgcggcaaagcatgtaatcatttgaatcacctgcgcgagcaccagagaattcacaacagctag

SEQ ID NO: 247545 - DNA, 1392 bp, synthetic construct
  misc_feature 1..1392: note = Description of Artificial Sequence: Synthetic coding sequence
  source 1..1392: mol_type = other DNA
atggcacagggtctcgtcactttcgcagacgtcgctatcgactttagccaggaggagtgggcctgtcttaatagcgcacagcgcgacctctattgggatgtgatgttggaaaactattcgaacctagtgagtctggacctggaatccgcctatgagaacaaatctctgcctacagaaaaaaatatccatgagattagagcaagtaaaaggaacagtgaccgacggagcaagagcttgggcaggaattggatctgcgagggaaccctcgaaagacctcagcgctcccgcggaagatatgtgaaccagatgataattaattacgtaaagcgccctgcaacacgcgagggtacacctcccagaacccaccaacggcaccataaggagaactctttcgagtgtaaggattgtggcaaggcgtttagtagaggatatcagttatctcaacaccaaaagatccatacaggcgagaagccttacgaatgcaaggagtgcaaaaaagccttcaggtgggggaaccagctgacccagcaccagaaaatccatactggagaaaaaccctacgagtgcaaggactgtggcaaggcctttaggtggggtagttctttggtgattcacaagcgcatccacaccggtgaaaaaccatacgagtgcaaggactgcggcaaagccttccgcaggggggatgagctcactcaacaccagcgattccataccggagaaaaggattatgaatgcaaggattgcgggaaaactttctctagagtgtataagctgattcagcataaacggatccacagcggcgaaaaaccatacgagtgcaaagattgtggaaaggctttcatatgtggatccagcctgattcagcataaacgcattcacaccggtgaaaagccttatgagtgccaagagtgtggaaaggcattcacacgtgtgaattatctgacccagcatcagaagattcataccggggagaaacctcacgagtgcaaagagtgcggtaaggccttccgctggggctcctctctggtcaaacacgagaggatccacacaggtgagaagccctataaatgtacagagtgcggcaaggcctttaactgtggctatcacttgacgcaacatgagagaatccacactggcgaaaccccatacaaatgtaaggagtgcgggaaagctttcatttatggctcctctctggtcaaacacgaaagaatccataccggggtcaaaccgtatggctgcactgagtgcgggaagagcttttctcacggccaccaacttacccagcatcagaagacccacagtggcgcaaaatcatacgaatgcaaagagtgcggcaaagcttgtaaccaccttaaccacctgagggagcaccagaggatccacaacagctag

SEQ ID NO: 247546 - DNA, 1392 bp, synthetic construct
  misc_feature 1..1392: note = Description of Artificial Sequence: Synthetic coding sequence
  source 1..1392: mol_type = other DNA
atggctcaggggctggtcactttcgctgacgtggctattgacttctcccaagaggaatgggcctgcctgaacagtgcgcagcgggacctgtattgggacgttatgcttgaaaattactccaacctggtgtcactggacttggagagcgcctatgagaataaaagcttgcctactgagaagaacatccatgaaatacgggcttctaaacgtaatagtgaccggagatcaaagagcttggggaggaattggatttgtgagggcaccttggagcggccacagcgctctcggggtaggtatgtgaaccagatgatcattaattacgtgaagagacccgctactagagaggggacaccccctcgcacccaccagcggcatcacaaggagaacagctttgaatgcaaggactgcggcaaggccttcagccgtggataccagctgtcacagcaccagaaaatccacactggcgaaaagccgtatgagtgtaaggagtgcaagaaggccttccggtgggggaaccaattgacccagcatcagaagatccacacaggtgaaaagccttatgagtgcaaagattgtgggaaagcctttcggtggggatcctccctggtgatacataaacgtatacatactggtgaaaaaccttacgagtgcaaggactgtgggaaggctttccgcaggggcgacgaactgacacagcaccagcgcttccacacaggcgaaaaagattacgagtgtaaagattgtggaaaaacattttctcgtgtatataagctcatacagcacaaaaggatccacagcggggagaagccatatgagtgtaaagactgtgggaaggcttttatttgcggtagcagcttaatccagcacaagaggatccacacaggagaaaaaccttatgagtgtcaggagtgcggaaaagctttcacccgcgtcaattacctcacacagcaccagaaaatccacacaggggagaaaccacatgagtgtaaggagtgcggcaaggcattccgctggggcagctcccttgtcaaacatgaacgaattcatacgggcgagaaaccatataagtgcacagagtgtgggaaagcctttaattgtggctatcatcttacccaacacgaaagaattcacactggagagacaccgtacaagtgcaaagaatgcggaaaggcattcatctacgggagttcactggttaagcacgagcgcattcacacgggcgtcaaaccctacgggtgtacagagtgtggaaaatctttctcacacggccaccagctgactcagcatcagaaaacccacagtggcgctaaatcatatgagtgcaaggaatgtggtaaggcctgcaaccacctaaatcaccttagagagcatcaaagaatccataactcgtag

SEQ ID NO: 247547 - DNA, 192 bp, synthetic construct
  misc_feature 1..192: note = Description of Artificial Sequence: Synthetic coding sequence
  source 1..192: mol_type = other DNA
atggcccagggactggttacattcgcagacgttgcaattgacttttcccaggaagaatgggcatgtcttaattccgctcagcgcgatttatactgggacgtcatgctggaaaactactccaatctggttagcctcgacctcgagtctgcttacgagaacaaatccctaccgactgagaagaacattcactag

SEQ ID NO: 247548 - DNA, 258 bp, synthetic construct
  misc_feature 1..258: note = Description of Artificial Sequence: Synthetic coding sequence
  source 1..258: mol_type = other DNA
atggcacagggactggtgacctttgccgacgtggccattgacttctctcaggaggagtgggcttgtctcaactccgcacaacgggatctgtactgggacgtgatgctcgaaaactacagcaatcttgtgagtctggacctggagtccgcgtacgagaacaaatccttgcctaccgaaaaaaacatccacgagatcagagcttctaaaaggaattccgaccgcaggagtaaatcgctgggccgaaactggatttgctag

SEQ ID NO: 247549 - DNA, 201 bp, synthetic construct
  misc_feature 1..201: note = Description of Artificial Sequence: Synthetic coding sequence
  source 1..201: mol_type = other DNA
atggcacaaggacttgttacgtttgccgacgtggctattgatttttcgcaagaggagtgggcctgcttgaactctgcacagcgcgacctgtattgggatgtgatgctggaaaattatagcaacttggtatccttggacctggagtcggcttatgaaaacaagagtctgcccacagagaagaatattcacgaaatcaggtag

SEQ ID NO: 247550 - DNA, 195 bp, synthetic construct
  misc_feature 1..195: note = Description of Artificial Sequence: Synthetic coding sequence
  source 1..195: mol_type = other DNA
atggcccaaggattggtgacgtttgcagatgtagctatcgatttttcgcaggaggagtgggcctgccttaatagcgctcagagagacctttactgggatgtaatgttagaaaattatagcaatctggtgtcgctcgatctggaaagtgcatatgaaaacaagtccttaccaaccgagaaaaacatccatgagtag

SEQ ID NO: 247551 - DNA, 534 bp, synthetic construct
  misc_feature 1..534: note = Description of Artificial Sequence: Synthetic coding sequence
  source 1..534: mol_type = other DNA
atggcacagggtttggtcacattcgccgacgttgctattgatttctcccaagaggaatgggcatgcctgaactccgcccagagagacctgtattgggatgttatgctcgaaaattattctaacttggtaagcctggacctggagtccgcctacgagaacaagtctttgcctactgaaaagaacatccatgaaattcgagcaagcaagaggaattctgacaggcggtcgaagagcctaggacggaactggatctgtgagggtacacttgagcgccctcagcgcagccgcggtcgttacgtcaatcagatgatcataaactatgtgaaacgcccagctacgcgagaaggcaccccacctagaacccatcaaagacaccataaagagaacagctttgagtgtaaagactgcggtaaagcatttagccgcggataccagctttcccagcaccagaaaatccacacaggcgagaaaccatacgaatgcaaggaatgtaagaaggccttcagatggggcaatcagctgacacaacattag

SEQ ID NO: 247552 - DNA, 264 bp, synthetic construct
  misc_feature 1..264: note = Description of Artificial Sequence: Synthetic coding sequence
  source 1..264: mol_type = other DNA
atggcccaaggccttgttacgtttgcagatgtggctatcgactttagccaagaggagtgggcctgcctgaactcggctcagcgcgatctttattgggatgtgatgttggagaattactctaaccttgttagtttggatttggaatccgcctatgagaacaagagtctgcctaccgagaagaacattcatgagattcgcgcttccaaacgaaattctgaccgccgaagtaagtcccttggccgtaactggatttgcgaaggatag

SEQ ID NO: 247553 - DNA, 144 bp, synthetic construct
  misc_feature 1..144: note = Description of Artificial Sequence: Synthetic coding sequence
  source 1..144: mol_type = other DNA
atggcacaggggcttgtgacattcgcagacgttgctatcgactttagccaggaggaatgggcctgtttaaactctgctcagcgggacctttattgggatgtaatgttagagaactactccaatcttgtatcgcttgatttatag

SEQ ID NO: 247554 - DNA, 1392 bp, synthetic construct
  misc_feature 1..1392: note = Description of Artificial Sequence: Synthetic coding sequence
  source 1..1392: mol_type = other DNA
atggcacagggacttgtaacttttgccgacgtggctatcgacttctcacaagaagaatgggcctgtctcaacagcgcccaacgcgacctgtactgggatgtgatgttagagaattactctaacctggtgtccctggacctggagagtgcctatgagaacaaaagtttgccaacagagaaaaacatacacgaaattcgggctagtaagcggaactcagatcgcaggagtaagagtcttgggaggaattggatctgcgaagggaccctcgaacggcctcaaagatcccgaggacggtacgtcaaccaaatgatcattaactatgtgaaacggccagcaactagagagggcacacctcccaggactcaccaacgccatcataaagagaattccttcgagtgcaaagattgtggcaaggccttcagtagggggtaccagctatctcagcatcaaaaaattcacactggggagaagccctacgagtgtaaagagtgtaagaaggctttcagatgggggaaccagctgacccagcaccaaaagatccatactggcgagaaaccatatgaatgcaaagactgcggaaaggccttcaggtggggatcatccttggtgatacataaaagaatccacacgggagagaaaccctacgagtgcaaagactgtgggaaggcatttagacgcggagatgagctgacccagcatcaaaggttccacaccggggagaaggattacgagtgcaaagactgcgggaagaccttctccagggtttataagctcattcagcacaaaaggatccatagcggcgaaaagccctacgagtgtaaggattgtggcaaagcgtttatttgtggctcctccctaattcaacacaaacgtatacataccggggagaagccctacgaatgccaggagtgtggcaaggcctttacccgagttaattatctaacacaacatcagaagattcacacaggggaaaaaccacatgagtgtaaggaatgcggaaaagccttccgttgggggtccagtctggttaagcacgagcggatccatacaggcgagaagccatacaagtgtacagaatgtggaaaggcattcaactgcggttaccatctcacgcagcatgagcggatccacactggcgaaaccccctataaatgcaaggagtgcggcaaagcttttatttacggaagctcactggttaaacatgagcgaatccatacgggggtaaaaccctacggctgcacagagtgtggtaagagtttttcccacggccatcagctcacacagcatcaaaagacacactccggagccaagagttatgagtgtaaagagtgtggtaaagcctgtaatcatttgaatcatctgcgcgagcatcagcgcattcacaatagctag

SEQ ID NO: 247555 - DNA, 318 bp, synthetic construct
  misc_feature 1..318: note = Description of Artificial Sequence: Synthetic coding sequence
  source 1..318: mol_type = other DNA
atggcccaggggctagtgacgtttgccgacgttgctattgatttctcacaagaggaatgggcctgcctgaatagcgcacagagggatctttactgggatgttatgttggaaaactactcaaatctggtgtccctcgatctggagtctgcatacgaaaacaagagtctcccaacagaaaaaaatattcacgagatacgcgcatcgaagagaaacagcgatagaagaagcaagtccctgggaaggaactggatctgcgaggggacactcgagaggccacaacggagtcgaggcaggtacgtgaaccagatgatcatttag

SEQ ID NO: 247556 - DNA, 1392 bp, synthetic construct
  misc_feature 1..1392: note = Description of Artificial Sequence: Synthetic coding sequence
  source 1..1392: mol_type = other DNA
atggcccaagggttagttacctttgccgatgtggccatcgacttcagccaagaagagtgggcatgcctgaatagcgctcagagagacctgtactgggacgtaatgctggaaaactattctaacctggtcagcctcgatcttgaaagcgcctacgaaaataagagcctgccaacagagaagaacatccatgaaattcgagcaagcaagaggaacagcgataggcgatctaagtcattgggcagaaactggatttgtgaagggacactggagcgccctcagcgctcgcggggacgctatgtgaaccaaatgattattaactacgttaagcgccctgccacacgggaagggacccctccaaggacccatcagcgacatcataaagagaacagttttgagtgcaaggactgtggcaaggcgttttctagaggttatcagctcagccaacaccaaaaaatccatacaggagaaaaaccctatgagtgcaaagagtgtaagaaggcatttaggtgggggaatcagttaacacagcatcaaaaaatccatacaggtgagaaaccctacgagtgtaaggactgtggaaaagcctttagatgggggtcaagtttggtgatacataagcggattcacacaggagagaagccctacgaatgcaaggattgtgggaaggcatttcggagaggcgatgaactaactcagcaccagcgttttcacacaggtgaaaaggactatgaatgcaaagactgtgggaaaaccttcagtcgagtgtacaaattaatccagcacaaacgcatccactccggcgagaaaccctacgaatgtaaagactgcggaaaagcctttatatgtggcagttccctgatccagcacaaacggattcatacgggcgagaagccttatgagtgccaagagtgcggaaaggcttttacaagggtcaactacctgactcaacaccagaaaatccataccggggaaaagccacacgagtgcaaggagtgcggaaaggctttccgatggggatccagcctggtcaagcacgaacgaatccacacaggggagaaaccatataagtgtactgagtgtggaaaagcgttcaattgcggttaccaccttacccagcatgaacgcattcacacaggggagacgccctacaagtgcaaagagtgcggaaaggcattcatatacggcagcagtctcgtcaagcatgagagaatccataccggggtcaagccttatggctgcaccgagtgcggtaagagtttcagccacgggcatcagctgacgcagcatcagaagacacattcaggggctaagagttacgagtgtaaagagtgcggcaaagcctgcaaccacctgaaccacctgagggagcaccaaagaatacacaactcatag

SEQ ID NO: 247557 - DNA, 1392 bp, synthetic construct
  misc_feature 1..1392: note = Description of Artificial Sequence: Synthetic coding sequence
  source 1..1392: mol_type = other DNA
atggctcagggccttgtgacattcgcagacgtagcgatcgatttctcacaggaagaatgggcatgccttaattctgcccagagggacctgtactgggatgtgatgttagaaaactatagcaatctggtgagcctcgacctggaatcagcctatgaaaacaagagcctccctacagaaaaaaacattcacgaaattcgagcttccaaacgcaattctgaccggaggagtaaaagcctgggcaggaattggatctgtgagggaacgttagaacggcctcagaggtctaggggacggtacgtcaaccagatgattataaactatgtaaagcgacccgcaacaagagagggcactcccccacggacacaccagagacaccacaaagagaatagcttcgagtgcaaagactgtggtaaagctttctccagaggctaccagcttagtcagcatcaaaagatacacaccggtgagaagccatatgaatgcaaggagtgcaaaaaggcttttcgctggggtaaccagctcacacaacaccaaaagatccacaccggagagaagccatacgaatgtaaggactgcggaaaagcgttccgctggggaagctctctggtcatccataaacgcattcacacaggtgagaaaccatatgagtgtaaggactgtggcaaggccttccggagaggcgatgaacttactcagcaccagagattccacacgggtgagaaggactacgaatgcaaggactgtggcaagaccttctctcgcgtctacaagctgatacagcacaagcgtatacattcaggagagaaaccctacgagtgtaaagattgtggcaaggcattcatttgcggatccagtttgattcagcacaagcgtatacatacaggtgagaaaccgtacgaatgccaagaatgtggcaaagcttttaccagggttaattacctgacacaacaccagaaaatccatacaggggaaaaaccccatgagtgcaaagaatgcggcaaagcgttccgctggggctccagtcttgttaagcacgaaaggattcataccggtgagaagccgtataagtgtactgagtgtggtaaagccttcaactgtgggtatcaccttacccagcatgagagaatccacacaggtgagacaccatacaaatgcaaggagtgcggaaaagcgtttatctacggctccagccttgttaagcatgaacgcatccacacgggggtgaaaccgtatggctgcacagagtgcgggaagtcgttttcccatggccatcagttgacccagcaccagaaaactcacagtggcgctaaatcctatgaatgcaaggagtgtggaaaggcttgcaatcatctgaaccatctccgggagcaccagagaatccataatagctag

SEQ ID NO: 247558 - DNA, 297 bp, synthetic construct
  misc_feature 1..297: note = Description of Artificial Sequence: Synthetic coding sequence
  source 1..297: mol_type = other DNA
atggcgcagggactggtaacatttgcagatgtcgccatcgacttttctcaggaagagtgggcttgcctgaacagcgctcagcgcgatctctattgggatgtgatgctggaaaactactctaatttagtttccctagatcttgagagtgcctacgagaataaaagcttgcctaccgagaaaaacatccacgagatacgtgcaagtaaaagaaacagcgatagaaggtccaaaagcctggggagaaactggatctgtgaaggtactcttgagagaccccagaggtcaagaggccgatag

SEQ ID NO: 247559 - DNA, 1392 bp, synthetic construct
  misc_feature 1..1392: note = Description of Artificial Sequence: Synthetic coding sequence
  source 1..1392: mol_type = other DNA
atggcacaaggtctagtgaccttcgctgatgtggctattgatttttcccaagaggagtgggcttgtctgaatagcgctcagagagatttatactgggacgttatgctggagaattactccaatctagtctcactcgacctggagtcagcgtacgagaataagagcctgcctaccgagaagaacatccacgagattcgagcctccaagcgtaactctgataggagaagcaagtctctgggccgtaattggatctgtgaggggaccttggagagacctcagaggtcacggggtcggtatgtcaatcagatgattatcaattacgttaagcgcccagccacaagagagggcacaccccctaggacccatcaacggcaccacaaagagaacagttttgagtgtaaggactgtggaaaggctttctcacggggatatcaactctcacaacatcagaagattcacactggtgaaaagccctatgaatgcaaggagtgcaagaaagcgtttcgatggggcaaccagctcacgcaacatcagaagattcacaccggagagaagccttacgaatgcaaggattgcggaaaggcttttaggtggggaagttcactggtgattcacaaaagaattcacacaggcgaaaaaccgtacgagtgcaaggattgcggaaaagccttcaggcgcggagacgaactgacacagcatcagcggttccacacgggagaaaaggattacgaatgtaaagattgtggtaaaaccttctcccgggtgtacaagcttattcagcataaacgcattcactctggggagaaaccctatgaatgtaaggactgcgggaaggccttcatatgcggctcctcgctgattcagcacaagagaatccacacaggggaaaaaccatacgaatgtcaggaatgcggaaaggccttcacccgtgtgaattacctgacacaacaccagaagatccacacgggcgaaaagcctcatgagtgcaaagaatgcggcaaagcgtttcgttggggcagttcccttgtgaaacacgaaagaatccacactggcgagaagccctataagtgtactgaatgcggtaaagccttcaactgcgggtaccaccttacccagcacgagagaatacataccggtgaaaccccctacaagtgcaaagagtgcggtaaggccttcatctacggctcgtcgctggttaagcacgagagaattcacactggtgtaaagccatacggatgtactgagtgcggaaaatcattctcccacgggcatcagctcacccaacatcagaagactcacagcggggctaaaagttatgagtgcaaggagtgtggaaaggcttgtaatcatctaaaccatctgcgcgagcatcagagaattcacaactcttag

SEQ ID NO: 247560 - DNA, 504 bp, synthetic construct
  misc_feature 1..504: note = Description of Artificial Sequence: Synthetic coding sequence
  source 1..504: mol_type = other DNA
atggcacaaggtctcgtgacctttgcggacgtggcaatagattttagtcaagaagaatgggcttgcctgaattctgcccagagggatctttactgggacgttatgctcgaaaattattcgaatcttgtttcacttgatctcgagtctgcctatgaaaacaaaagtttgcctactgagaaaaacattcatgagatccgcgcttccaaaagaaattcagatcgacggagcaagagcctgggaagaaattggatatgtgaagggaccctggaacgaccccagaggtcgagaggaaggtacgtcaaccagatgattattaactacgtcaaaaggccggctacaagagaagggactcccccacggacacatcagaggcaccataaggagaatagctttgagtgcaaggactgtggtaaagctttcagtcggggttaccaactctcccagcatcagaaaatccatactggcgaaaaaccgtatgaatgcaaagaatgtaagaaggcttag

SEQ ID NO: 247561 - DNA, 303 bp, synthetic construct
  misc_feature 1..303: note = Description of Artificial Sequence: Synthetic coding sequence
  source 1..303: mol_type = other DNA
atggctcagggtcttgtgaccttcgcggacgttgccatcgatttttcacaggaggaatgggcctgtcttaactcagcccagcgagatctttattgggacgtgatgctggagaattattctaacttggtgtctctcgacctggagtccgcttatgagaacaaaagcctgcccaccgaaaagaacatccacgagatccgcgctagtaagagaaactccgacagacggagtaagtctctagggagaaattggatctgtgagggcacactggagcggcctcaaaggagtaggggcagatacgtttag

SEQ ID NO: 247562 - DNA, 1998 bp, synthetic construct
  misc_feature 1..1998: note = Description of Artificial Sequence: Synthetic coding sequence
  source 1..1998: mol_type = other DNA
atggagagtgtgacgttcgaagatgtggcagttgaattcattcaagaatgggctctcctggacagcgcacgaagaagtttgtgtaagtaccggatgctggaccagtgtcggacacttgcctcacggggtactcccccttgtaaaccatcgtgcgtcagccaacttgggcagagagctgagccaaaggcaaccgagcgcggaattctgagggcgaccggtgtggcttgggagtcacagctcaaaccagaagaactaccttctatgcaggacttgctggaggaggcaagcagcagagacatgcagatggggcctggcctatttttgaggatgcagctcgttccttcaatcgaagagcgggagacacctctaacgcgggaggatcgaccagcactccaggagccgccttggtccctgggctgcacaggtcttaaggctgcgatgcagatccaacgcgtggtgatacctgtgccaacactaggacaccgaaacccatgggtggccagggatagcgcagtgcccgctcgcgatcctgcttggctgcaggaggacaaggtcgaggaagaggctatggcccctgggctccccacggcctgttcccaggagccagtaacctttgcagacgtcgcagtggtgtttaccccagaggagtgggtgttcttggactcgactcagagatctctttatcgagatgtcatgcttgagaactacagaaatttggcttctgtagctgaccagctctgtaaacccaacgctctgtcttaccttgaggagaggggtgaacagtggactacagaccgcggagtgctttcagatacctgtgcggagccacagtgccagccacaggaggctatccctagccaggacactttcactgagattctgagtattgatgtgaagggagagcagcctcagccaggtgaaaaactttataagtataatgagttagaaaaaccatttaattcaatagagcctcttttccaataccagagaatccacgccggagaggcttcctgcgagtgccaggagatcaggaacagcttcttccagagtgcacatctgatcgttccagagaagattagatccggcgacaagtcttatgcatgcaataagtgtgagaaatcctttagatacagttccgacctgattaggcatgagaaaacccacaccgccgagaagtgctttgactgtcaggagtgtggccaggcgttcaagtatagctctaacctgcggaggcatatgcgcacacacacaggcgaaaagccatttgagtgttcccagtgtgggaagacttttacgcggaacttcaatctcattttacaccaacgaaatcatactggggagaaaccctatgaatgtaaagactgtgggaaagctttcaaccagcctagctctctccgctctcatgtcaggacacacacaggcgagaagcctttcgagtgctcccagtgcggcaaggccttccgcgagcattcaagcttgaaaacccatcttagaacccacactcgagaaaagccgtatgagtgcaatcagtgtgggaaaccttttcgaacctctacacatctgaacgtacataaacgcattcacaccggcgaaaaactctatgaatgcgccacatgcggacaagtgttatcccggctatcaaccctaaaaagccacatgagaactcacaccggagaaaagccttacgtgtgccaagagtgcggacgggcttttagcgagccttcatccttgagaaaacacgctaggacccactccggaaagaaaccatacgcatgtcaggagtgcggtagggcctttgggcagagctctcatctgatcgtacatgtgagaacccattctgcaggtagaccgtaccagtgtaaccagtgcgaaaaagcctttagacactcaagcagcttaaccgtccataagaggacacatgtcggcagagagaccatcagaaacgggagcttgcccctgagcatgtctcatccgtactgtgggccactagctaattag

SEQ ID NO: 247563 - DNA, 549 bp, synthetic construct
  misc_feature 1..549: note = Description of Artificial Sequence: Synthetic coding sequence
  source 1..549: mol_type = other DNA
atggagagcgtcacttttgaggacgttgcggtggagttcatacaggaatgggccctgctagactctgcgcgacgcagcctgtgtaaatataggatgcttgaccaatgcaggaccctcgcctcacggggtacacccccttgtaaaccaagttgcgtgtcccaactgggacagcgcgcagaaccaaaggccaccgaacgtggtattttgagagccacaggtgtggcctgggaatcccaactgaaacctgaagagcttccctcaatgcaggacctgctagaggaagcatcatctcgtgatatgcagatgggacccggactgttcttaagaatgcagttagttccctccattgaggaacgagagaccccccttacgagagaggataggcctgcgctgcaagagccaccatggtctttaggttgcactcttccactgctttcgctcctgttgccgagttgtccagagcctcctctcgtgctgcttgactcttcctcagcacctgaccgacacttgggatctacactcgataccgaggcaagaggtattccatag

SEQ ID NO: 247564 - DNA, 1671 bp, synthetic construct
  misc_feature 1..1671: note = Description of Artificial Sequence: Synthetic coding sequence
  source 1..1671: mol_type = other DNA
atgcaactagtcccatctatcgaggagcgggagactccactgacgcgcgaggataggccagcgctgcaagagcccccatggtctttaggctgcaccgggttgaaggccgctatgcagatccagcgagtcgtgattcccgtgcctaccctggggcaccgtaatccctgggtggccagagactctgccgtgcccgctcgggatcctgcctggttacaggaagacaaagttgaggaggaggcaatggctcctggtctcccgaccgcttgttcccaggagccggtcacgttcgccgacgtggcggtggtttttacccccgaggaatgggtctttcttgatagcacccagcggtctctgtatagagatgtaatgctagagaattatcgtaatttagcaagcgtagcagatcaactgtgcaagcctaacgccctgagttacctggaggaacgcggtgagcaatggactacagaccgtggcgtcctttccgatacttgcgctgagccccagtgccagccacaggaggccattccatctcaagacacctttacagaaatactctctatcgacgtgaagggtgaacagcctcagccaggggagaagttgtataaatacaatgaacttgagaagccatttaattccatcgaaccactttttcagtatcagaggatccacgctggcgaagcaagttgtgaatgtcaggagattcggaattcattttttcagtcggcacaccttatcgtccccgagaagattcgctctggtgacaagtcgtatgcctgcaacaaatgtgagaagtcattcagatattcctccgatctcattagacatgaaaagactcataccgccgagaagtgttttgattgccaagagtgcggccaggcgtttaaatattcttcgaacctaagaagacacatgaggactcatacgggcgagaagccattcgagtgctcccagtgcggcaaaactttcactcgaaactttaatcttatcctccaccagagaaatcacacaggagaaaagccatatgagtgcaaggactgtggaaaggcctttaaccagcctagcagcctgcgaagtcacgtgaggacccacaccggcgaaaaaccctttgagtgtagccagtgcggcaaagcctttcgcgaacacagctcgctgaagactcacctaaggacacacactagagaaaaaccttacgagtgcaaccaatgtggcaaacccttccgtacatctactcacttgaatgtgcacaagcgaatacacacgggcgaaaaactgtacgagtgcgctacttgcggccaggtgctgagcagactaagtacccttaaatcccatatgagaacgcacacaggcgaaaagccctacgtttgccaggaatgcggtagagctttctctgagccatcttctttaaggaagcatgcacgcacacatagcgggaaaaaaccatatgcttgccaagagtgcgggagggccttcggacagtcatcccatcttatcgtacacgttcgcacccatagcgccggaaggccgtaccagtgcaatcagtgtgagaaagctttcaggcactcttccagtctgaccgtgcacaaaaggacccatgttggtcgggagactatccgaaacggctccctccctctctctatgagtcacccatattgtggacccctggcaaattag

SEQ ID NO: 247565 - DNA, 912 bp, synthetic construct
  misc_feature 1..912: note = Description of Artificial Sequence: Synthetic coding sequence
  source 1..912: mol_type = other DNA
atggagtccgtcactttcgaggatgtcgcggtggagttcattcaggaatgggcactgctggatagcgctcggaggtcactctgcaaataccgaatgctggaccagtgccgcacgctcgcaagccgtgggacacccccttgcaagcccagttgcgtaagccagcttgggcagagggcagagcctaaggccacggagcgaggcattctgcgagcaaccggagtggcttgggagtcccagctgaagccggaggaactgccaagcatgcaagatctactggaagaggcatcctcgcgcgacatgcagatggggccaggcctgtttcttcggatgcagctggtgcccagtatcgaggagcgcgaaaccccactcacgcgggaggaccgtcccgcactgcaggagcccccatggtcactgggctgtacgggcttgaaggccgctatgcaaatccagcgcgttgtcatccccgtcccaactctggggcatcgcaatccttgggtggctagagattctgccgtccctgccagagatccagcttggctgcaagaggacaaggtagaagaggaggcaatggcaccaggtctgcccaccgcatgtagccaggaacctgttacctttgccgatgtggcggttgtgttcacacctgaggaatgggtgttccttgacagcacccaacgctctctgtacagagacgttatgctcgagaactatcggaacctggcctcagtcgctgaccagctttgtaagcctaatgcgttgagttatcttgaggagcgaggggaacagtggaccacagaccggggtgtcctgagtgatacctgcgccgagccacaatgtcaaccacaggaggctatcccgtctcaggacactttcactgaaatcctttcaatagacgtcaaaggccctccaaattag

SEQ ID NO: 247566 - DNA, 3360 bp, synthetic construct
  misc_feature 1..3360: note = Description of Artificial Sequence: Synthetic coding sequence
  source 1..3360: mol_type = other DNA
gctgctgaggaacgcggatggcgacccaggcgctgtcggtcacagagaggtacatggctgagaaaacctcggagtgaagtaccgcgtccatacgcccctctgtccggaagtcccccaatcagatggcgcagaaccaggtggcgggctgcagcaactagaccattaggactggctggaccgaggagccccctgcgggctgcatgggtctgggcaccaagtagagtccggagacagcagcgccgaagaggccgacccggtgcagggagaggtatcgacgatctggaggaggattcagattataatcccgctgaggacgaaccgagaggtaggcagttacggctccaaaggccaacaccttctaccccacggccacgcaggaggccaggaaggccgagaaagctgcccagactagagatcagcgatctgcccgacggagtcgagggagagcccttggttagcagccagtcaggccagagcccccctgagccccaggacccagaggcaccatcgtcaagcggtcctggccacctggtggctatgggcaaggtttcccgcactccagtggaggccggagtgtcccagtccgacgccgagaacgccgcaccttcatgtccggacgagcatgacaccctgccaagacgaagaggcaggccaagccggagattcctgggtaaaaaataccggaagtattactacaagtctcctaagcccctgctacggccttttctctgcaggatctgtggttccagatttctatctcacgaagacttgagattccatgtgaactcacacgaggctggtgatccacaactgtttaagtgcctgcaatgctcctatcgctctcggagatggtctagcttaaaagagcatatgtttaaccatgtcggctctaagccatataagtgtgacgagtgttcctacaccagcgtgtatcgcaaggatgtcatccgacacgccgctgtgcattccagggaccggaagaagaggcccgatcccacacctaagttgtctagtttcccatgcccagtctgcggcagggtttatcctatgcaaaagcggttgacacagcatatgaagacccatagtacagagaaaccccacatgtgtgataagtgcggaaaatcattcaaaaaacgctatacattcaagatgcatctcctaacacatatccaggctgtggccaatcgtcgcttcaagtgcgaattctgtgagttcgtgtgtgaggacaagaaagcgctgctaaatcaccagctcagccacgttagcgataaacctttcaagtgttcattctgtccctacagaacttttcgcgaagatttccttctcagccatgtggcagtgaagcataccggcgcaaaacccttcgcgtgtgaatactgtcacttttcaactcgccataagaagaacctgaggctgcacgtgaggtgtagacacgcctcctcgtttgaagaatggggccgtcgacacccagaagagcccccatcaagacgtcgcccatttttcagtcttcagcagattgaagagctgaaacagcagcatagtgcagctcccggacctccacctagctctccaggtcctcctgaaatccctcctgaggcgaccacctttcagtcttcggaagctccgagcctcctctgctcggataccctcggaggtgccacgataatctaccagcagggggctgaagaatctacagccatggccactcagaccgctttggacttgctcctgaacatgtccgctcagcgcgagcttgggggtacggcgctgcaggttgccgtggtgaaaagcgaggatgttgaagccggtttagcttctccagggggtcaaccctctcccgaaggagccacccctcaagtggtcacactccatgtcgcagagccaggcggtggcgcagccgcagaatcccagctcggtccccctgacctgccccagatcaccctggctcccggaccatttggaggcaccggatactcggtgataacagccccaccgatggaggagggtacctcagccccagggacaccatactctgaggaacccgctggcgaagcggctcaggctgtcgtggtctccgacaccctgaaggaggcaggaacacactatattatggccaccgacggcacccagctccatcatatcgagttgactgccgatggcagcatcagtttccctagccctgatgcgctagccagcggagcaaagtggcccttactgcaatgcggagggctcccacgcgatggcccagaaccaccctctcccgctaagacccactgtgtaggagatagccagagcagcgccagctcacctccagccactagcaaggctctcgggttggcagtgccacctagccccccttcggctgccaccgctgcatcgaagaaattttcctgtaagatctgcgccgaggcctttccaggcagggccgagatggaatcacacaaacgagcacacgccggtcccggagcctttaaatgtccagattgcccattctccgccagacaatggccagaagtaagagctcatatggcccagcacagttctctgcgccctcatcagtgcagccagtgttcctttgccagtaaaaacaaaaaagacctgagacgccacatgctaactcataccaaggagaagccatttgcctgccacctgtgtgggcaaagatttaaccgcaacggacaccttaagtttcatattcaaaggttgcactcccccgatggccgtaagtcgggtacgcccacggctcgagcgcctactcaaactcccacccagaccatcatcctcaatagcgacgatgaaacgctggctaccttgcatacggctctgcaaagttcacatggtgtgttaggcccagagcgacttcagcaggctctatcccaagagcacatcattgtcgcccaggaacaaactgtgacgaatcaagaggaggcagcctatatccaggaaatcacaactgccgacggacagaccgtgcagcacttggtcacatccgataatcaagtgcagtacattatttcacaagacggggtgcagcacctcttaccccaggagtacgttgtagtgcccgaaggacatcacattcaggttcaggagggccagatcacccacattcaatacgagcagggggcacctttcctgcaggagagccaaatccaatacgtgcccgtctccccagggcaacagctagtgacacaggcccaactggaagccgcagcacattcagccgtcactgcggtggcagatgccgctatggctcaggcccaaggtctattcggcacagatgaaaccgttcccgagcacatccagcagctgcagcatcaaggtatcgaatacgacgtcatcaccttggcagatgactag

SEQ ID NO: 247567 - DNA, 4029 bp, synthetic construct
  misc_feature 1..4029: note = Description of Artificial Sequence: Synthetic coding sequence
  source 1..4029: mol_type = other DNA
atggaggaaaatgaagtggagagttcctccgatgcggctccgggacccggaagaccagaggaaccatccgagtccggtttgggagttggtacatctgaagccgtgtccgctgattcatccgatgctgcagctgccccaggacaggccgaagctgacgatagcggcgtcggccagtcctctgaccgtgggtcccggtcccaggaagaagtgtccgagagttcctctagcgctgatcctctgccgaacagttatcttccagactccagttcagtttcacacggccctgtcgcgggagtcacaggcggaccaccagctctggtccacagcagcgcgctgcccgatcccaacatgttggttagtgactgcaccgcctcctcctctgaccttggatcggctatcgacaaaatcattgagtcgacaattggcccagatttgatacagaattgcataactgtgacatctgctgaggatggaggggcagaaaccacacgttacctgattctccaggggcctgacgacggagctcccatgactagccccatgtctagttcaactctggcccacagcctggccgctattgaagcactggcagacggcccaacatcgaccagcacttgtcttgaagcccaaggtggtccaagttcccctgtgcagctccccccagccagcggagcagaggaaccagacctgcagtcacttgaagccatgatggaagtggtggtcgtccagcaattcaaatgcaagatgtgccagtacaggtccagcaccaaggccacactgctgcggcacatgcgcgaaagacatttccgcccagtggctgccgctgcagctgctgcaggcaagaagggtaggttgagaaagtggagcacatctacaaaaagtcaagaagaagagggccctgaggaggaagacgatgacgacattgtggatgccggtgccatcgatgaccttgaagaggacagcgactataaccccgcagaggacgagcccagaggtcgccagctccgtctccagcggcctaccccttccacaccaaggcctaggaggcgccctggccgacccaggaaactgcctcgtctcgaaatctccgatctgccagacggcgtggaaggagaacctctggtgtcctcgcagagtgggcagtcgccacccgagcctcaggaccccgaggccccatcctcttctggccctggccacctggtggctatgggcaaggtctctcgcacccctgtggaagctggggtctcccagtcagacgctgaaaacgctgcacccagctgtccagatgagcatgatacgctaccacggcgaaggggacggccatcaagacgattcttgggcaagaaatatcggaaatactattataagtcgccgaagcccttgctgcgacccttcctatgtcgaatctgtggcagtcgattcctcagtcacgaagatttgcgattccacgtcaatagtcacgaagcaggggatccgcagctcttcaagtgtctgcagtgctcttatcgctctaggcgctggtccagcttaaaggagcatatgtttaaccacgtcggcagcaaaccatataagtgcgatgaatgcagctataccagtgtctacaggaaggacgtgatacgtcacgccgcagtgcactccagagatcggaagaaacgaccagatcctactcccaaattgagctcctttccttgtcctgtctgcggcagggtgtacccaatgcaaaaacgtttaacccagcatatgaaaactcattctaccgaaaaaccacacatgtgcgacaagtgcggaaaaagttttaagaagcgatacacctttaagatgcatctcttaactcacattcaggccgttgccaaccgaaggttcaaatgtgagttctgtgagttcgtctgcgaagataagaaggcactgctgaatcaccagctgtcacacgtgagcgacaaaccttttaagtgttctttctgcccatacaggacctttagagaggacttcctattgtcccatgtagcagtgaagcatactggcgcaaagccatttgcttgtgagtattgccacttcagcaccaggcacaaaaagaacctcagattgcatgtgcgttgcagacatgcctcgtcctttgaagagtggggcaggcgacaccccgaagagccgccatccaggcgaagacccttttttagtttgcagcagattgaagaactgaaacagcagcacagcgcggcacctggccctcctcccagctcaccagggcctccagagattccaccagaggctactactttccagtcctcagaagccccaagtttgctctgcagcgacaccctggggggagccacgatcatttaccagcaaggagccgaagagtccactgccatggccacccagacggctctggatttgcttctgaacatgagcgctcaacgagaactgggaggaacagccctccaggtggctgtggtgaagtccgaggacgtggaagccggattagctagcccgggagggcaacccagtcccgaaggtgcgaccccccaggtagtcacgctacacgtggctgaaccaggtggaggggcagctgcagaaagccagctgggacccccagacctcccccaaattacgctggcgcctggtccatttggtggcaccggatactcagtgattactgctccacctatggaggaggggacctctgcaccaggaactccttattcagaggagccagcaggcgaggctgcccaggcggtggtggtctcagataccttgaaagaggccggtactcattacatcatggccaccgatggcactcagctgcatcatattgaactcactgccgacggcagcataagctttccgtcccccgacgcactcgcctcaggagccaagtggcccctgctgcagtgcggagggttaccacgtgatggtcccgaacccccttctcccgctaagactcattgcgttggtgactcgcagtctagcgctagctcacctcccgctaccagtaaagccttgggactggctgtgcctccaagcccgcctagcgcagccacagccgctagtaaaaagttcagttgcaagatttgtgccgaggccttcccgggaagagcagaaatggaatctcacaaacgggctcacgccggaccaggagccttcaagtgtccagattgcccttttagtgcacgacaatggcccgaggttagagcccacatggctcagcactcgtccctgcgcccacatcagtgctcacagtgtagtttcgccagcaagaacaagaaagacttgcggaggcatatgctgactcacacgaaggagaagccctttgcctgtcacctgtgcggtcagcgcttcaaccgtaatggccatctcaaatttcatatccagaggctgcactcccctgatggtcgcaaatccggaaccccaacagcccgagcccctacacagactccaacacagacaatcattctgaactcagacgatgagaccttggccacactgcacactgctcttcaaagctctcatggtgtacttggacccgaaagactgcagcaagctctgagccaagagcacatcattgtggctcaggagcaaacagtaactaaccaggaagaggcggcttacatccaggaaatcacaaccgccgatgggcaaaccgtccagcaccttgtaacaagcgataaccaggtgcagtacatcattagccaggatggtgtccagcatctcctcccccaggaatatgtggtcgtgcccgagggacaccatatacaggttcaggaaggtcagataacacacattcaatatgaacagggagccccttttctccaggagtcccagatacagtacgtacccgtaagtccaggtcagcagttagttacccaagcccaacttgaagcggcagcccatagcgcggtgactgccgtcgcagatgctgcaatggcacaggcacaaggcctatttggaaccgatgagactgtccctgagcacatccagcagctgcagcaccaaggaatagaatatgatgtgatcacccttgcggacgattag

SEQ ID NO: 247568 - DNA, 3564 bp, synthetic construct
  misc_feature 1..3564: note = Description of Artificial Sequence: Synthetic coding sequence
  source 1..3564: mol_type = other DNA
atggcaacgtcctctatgcccgaaagtgaacggaatgtggccactaaggcttccggagctccaatgacttctcccatgagttcatcaaccttagcccattcacttgctgccatcgaggccctagctgacggccctactagtacctccacatgcctggaagcccagggtggaccctcaagcccggttcagctccctccggcaagcggagccgaagagccagacctacagagtttggaggccatgatggaagtggtcgtcgttcagcaatttaagtgcaagatgtgccagtacagatcctccacaaaggcaaccctcttgcgccacatgagagaaaggcacttccgccctgtggctgccgcagccgcagcagccggaaagaaaggtcgactgcgaaagtggtccacaagcacgaaatcccaagaagaagaaggccctgaggaggaggacgacgacgatattgtcgatgctggggctatagatgacctcgaagaggatagtgattacaatcctgccgaagatgaaccaaggggtaggcagctgagactgcagaggcctacacctagcacaccacgacccagacgtcgacctgggcgaccaagaaagttgccaaggctcgagatatctgatctccccgacggggtggagggcgagccattagtgtcatcccagtcggggcagtctcccccagaaccccaagaccccgaggcccctagttcctctggaccagggcatctggtggccatgggaaaagttagccgcactccagtagaggctggtgtgagtcagtctgacgcagagaacgccgctccgtcttgccccgatgagcacgatacactgccacggagacgcggaaggcccagcagaagatttctcgggaaaaagtaccgaaaatattattataagagtccaaagcccctgctgagacctttcctctgtagaatatgcgggagtaggttcctgtctcacgaggatttgaggtttcacgtcaactctcacgaggctggggacccacaactgttcaagtgcctgcagtgctcttaccggtctcggagatggtcctcccttaaggaacatatgtttaaccacgtcggctcaaagccttacaaatgcgacgagtgctcatacacttccgtttacaggaaagacgtcatacgccacgcagcagtccactccagagaccggaagaaacgacctgacccgactccgaagctgtcctcttttccttgccccgtgtgtggcagggtgtatcctatgcagaaaaggctgacacagcacatgaagacccacagcaccgagaagccacacatgtgtgataagtgcggtaaaagcttcaaaaaacgctatacctttaagatgcatctgctgacccatattcaggccgtcgccaaccgcaggttcaagtgcgaattttgcgaattcgtgtgtgaagacaagaaagccctgctcaatcatcagttgagtcacgtatccgataaacctttcaaatgcagtttctgtccctaccggacattccgtgaggacttcctcctctctcacgttgcagtaaaacacacaggagctaaaccctttgcctgcgagtactgccacttttccacacggcacaagaaaaatcttagacttcacgtgaggtgtaggcacgcctcctccttcgaagaatggggaagaaggcacccagaggaaccaccctcacggagacgcccattcttttccctgcagcaaatcgaggagttgaagcaacaacattcagctgcaccaggccctccacctagcagcccgggtcctcccgaaattccccctgaggctacgaccttccagagttcagaagccccttccttgttgtgtagcgacacactcggcggagcaacaatcatttaccagcagggagccgaagagtccaccgctatggctactcagacagccctcgatcttctcctgaatatgtcagctcagcgggagctaggcggaacagcccttcaggtcgccgttgtcaagtccgaggacgttgaagcaggattagccagtcccggtggtcagccgtctcctgagggcgcaacgcctcaggtggtgacactgcatgttgcagaaccaggcggaggcgctgccgctgagtcgcagctcggcccacccgacctgcctcagatcaccttggctccaggcccttttggcggaacgggatactcagtaattactgccccaccaatggaagagggtacgtctgcccctggaaccccttatagcgaagaaccagccggtgaggcagcccaggccgtggtggtttccgatacactgaaagaggccggaacccactacattatggccacagacggcacacaactgcaccacatagagctgacagcagacgggagcatttcctttccttctcccgacgccctggcatctggggctaaatggccattgctccagtgcggcggactgcctagggacggtcccgagcccccaagtcccgcaaaaacccactgtgtgggcgactctcagagttcggcctccagcccccctgcaacttcaaaagctctggggctggctgtgcctccttcgcccccaagtgcggcaacagcagcatcaaagaaattctcctgtaaaatttgcgcagaagcattcccaggaagagctgagatggaatcccataagagagcccatgctggccctggcgctttcaagtgccctgattgccctttcagcgcaaggcaatggccggaggttcgggctcatatggcacagcactcgtccctccgcccacaccagtgtagccaatgttctttcgcctccaagaacaaaaaggaccttcgtagacacatgctgacccatactaaggagaagcccttcgcctgtcacctgtgtggccaacgttttaatagaaacggtcaccttaaattccacattcagcgtttacattcccccgatggcagaaagagcggaactcccactgccagagcacccacgcagacacccacccagaccataatccttaattccgatgatgaaacattagctacactgcatacagccctgcagtcttctcacggcgtcctcgggccagagcggctgcagcaagccctgagccaggagcacattatagttgcacaggagcagacagttacgaaccaggaggaggcagcatacatacaggagattacaactgccgatgggcagacggtgcagcacttggttacttccgataatcaggtgcaatacattatctcacaggatggggttcaacacttgctgccgcaggagtatgtggtagtcccggaggggcatcacatccaagtgcaagagggccagataactcatatccagtacgagcagggcgctcccttcctccaggaaagccaaatacagtatgtgccggtgtcacctggacaacagctggtaactcaggcccagctggaggccgcagcccatagcgctgtcaccgccgtggcagacgcagctatggcgcaggcacagggcctgttcggaaccgacgaaacggtcccagaacacatccagcaactgcagcaccagggaatcgagtatgacgtgatcacccttgccgatgactag

SEQ ID NO: 247569 - DNA, 330 bp, synthetic construct
  misc_feature 1..330: note = Description of Artificial Sequence: Synthetic coding sequence
  source 1..330: mol_type = other DNA
atgctggaaaactacagcaacctcgtgagtgtgggctactgtgtgcacaaaccagaggtaattttcagactccagcagggtgaagagccttggaaacaggaggaggagtttcccagccagagctttcccgaaatggggttccaccatgtcccagccggattgaagttgctttcaagctccgaccctcccgctctggcttcccagagcggcaggatcactggaatgagccacagcatcccccctgtcatgggcagcttcaagttcacaacctccatcttcacttgcgttggacttttcagattctttttcttttacctgagctggttctag

SEQ ID NO: 247570 - DNA, 417 bp, synthetic construct
  misc_feature 1..417: note = Description of Artificial Sequence: Synthetic coding sequence
  source 1..417: mol_type = other DNA
atgaataaagtcgagcagaagtctcaggagtcggtgagctttaaagatgtgacggtgggcttcactcaggaggaatggcaacacttagatccatcccagcgtgctctgtatcgggacgttatgctggaaaattattctaacctcgtctctgtcggatattgtgtgcataagccggaggtcattttccgactccagcaaggtgaggaaccatggaaacaggaggaggagttcccaagtcaatcattccccgaagtctggaccgccgatcatctgaaagagcgttcccaggagaatcagagcaagcacttgtgggaagtcgtgtttatcaataatgagatgctgactaaagagcagggagatgtgatcgggatcccgtttaatgtggatgcccctgagatgctgatgcccctggactag

SEQ ID NO: 247571 - DNA, 2433 bp, synthetic construct
  misc_feature 1..2433: note = Description of Artificial Sequence: Synthetic coding sequence
  source 1..2433: mol_type = other DNA
atgaacaaggtagagcaaaaaagtcaggaatccgttagttttaaagacgttacagtgggatttactcaggaggagtggcaacatctcgaccctagccagcgcgctttgtacagggatgttatgctcgagaactattcaaacttggtgtctgtcggctactgcgtgcataaaccagaggtcatcttcaggttacagcagggggaggagccctggaagcaagaggaggaattccctagccagagtttccctgtctggacggcagaccatctgaaggagcggagccaggagaatcagagcaagcacctgtgggaagtagtgttcattaataatgagatgcttaccaaggagcagggcgacgtgattggcatcccattcaacgtggatgtgtcatcctttccaagtaggaagatgttctgccagtgtgatagttgtggcatgtcgttcaataccgtgtctgagctggtgatctctaaaatcaactaccttggcaaaaagagcgacgaattcaatgcatgcgggaagctcctgctaaatatcaaacacgacgagactcacacccaggaaaagaacgaggttctaaagaacagaaacaccctcagccatcacgaagagacactgcagcacgaaaaaatacaaacccttgagcacaactttgaatactctatttgccaggagaccctgctcgagaaagctgtttttaatacacagaaaagggagaatgccgaggagaataactgcgactataacgaattcggacggacactatgcgattcatcaagcctattgttccaccagatcagtcctagtcgtgataaccattatgagttcagcgactgcgagaaattcctttgcgtgaagtctaccctgtccaagccacacggggtgagcatgaagcattatgactgcggcgaaagtggcaataatttccgcaggaaactttgtcttagtcatttgcagaagggggacaaaggtgagaaacacttcgagtgtaacgagtgtgggaaagccttttgggagaagtcccatctcacacggcaccagcgcgtccacaccggccagaagcctttccaatgtaatgagtgtgagaaagctttctgggacaagtctaatctaacgaagcaccagaggagccacacaggtgagaaacccttcgaatgtaatgagtgtggcaaggctttttcacacaagtccgctcttaccctccatcagcgaacccacaccggcgagaagccttaccagtgtaatgcatgtggaaaaaccttctgccaaaagtccgatttgactaaacatcagaggacccacaccggccttaagccatacgagtgttatgaatgtggaaaatcctttagagtaactagtcatcttaaagtgcaccagcggacacataccggcgaaaaaccgttcgaatgtctagagtgcggcaagagcttttccgaaaaaagcaacttgactcagcatcagaggatccacatcggcgataaatcgtacgaatgcaatgcttgtggtaaaacattttaccacaaaagcctcctgacacggcaccaaatcatacacacggggtggaagccctatgagtgttatgaatgcggcaaaacattctgcctgaaatccgatctaacggtccaccagagaactcacacaggccagaagccctttgcttgccccgaatgtgggaagttcttctcccacaagtcgacattgagtcagcattaccggactcacacaggagagaaaccttacgagtgccatgaatgtggaaagattttctacaacaagtcctacctgactaaacacaataggactcatactggagagaagccttacgagtgcaatgaatgcgggaaggctttctatcagaagagccaactgactcagcaccagcgaatccacattggcgagaagccttacaaatgcaacgagtgcggtaaggctttttgccacaaatcggcgctgatagtccaccagcgtactcacacacaggagaagccctacaagtgtaacgaatgtggtaaaagcttctgcgttaagagcgggctcatctttcacgaacgcaagcacactggcgagaaaccttatgagtgtaacgagtgcgggaagtttttcagacataagagttccttaacagtgcaccacagggcacatacaggcgagaagtcttgtcagtgtaatgagtgcggcaaaatcttttacagaaagtctgagcttgcacagcaccaacggagtcataccggcgagaagccttatgagtgcaacacgtgcagaaagacattcagtcagaaaagcaacctgatcgttcatcaaaggcgccacattggtgaaaatctcatgaatgagatggacattagaaattttcagcctcaggtgtctttgcacaatgcttccgagtacagtcattgcggcgagtcaccagacgacatcctgaacgtgcaatag

SEQ ID NO: 247572 - DNA, 2436 bp, synthetic construct
  misc_feature 1..2436: note = Description of Artificial Sequence: Synthetic coding sequence
  source 1..2436: mol_type = other DNA
atgaataaggtggaacaaaagtctcaggagtctgtctcttttaaagacgtgactgtgggcttcactcaggaggaatggcagcatttggaccccagccaacgcgctttatacagagacgtaatgctggagaactattctaatctcgtgtcggttggatactgcgtgcataagcctgaggtcatttttcgtctgcagcagggggaagaaccctggaagcaggaggaggagttccctagccaaagttttccagaggtatggacggctgatcacctgaaggaaaggtcccaagaaaatcaatccaaacacctgtgggaggtagtttttataaacaatgaaatgctaaccaaggaacagggcgacgttatcggcatccctttcaacgttgatgtgagttcctttccatcacgcaagatgttctgccagtgtgactcttgtggaatgagttttaacactgttagcgaattagtaatatcaaagattaactatctagggaagaaatctgacgaattcaatgcctgcgggaaattgctcctgaatattaaacacgacgaaacacatacccaagaaaagaacgaagtgcttaaaaatcggaacacactctcccaccatgaagaaactctacaacacgagaagatacagacccttgaacataacttcgagtattccatttgccaggagacattgctcgagaaagccgtattcaatactcaaaagcgggagaatgccgaggaaaataattgcgactacaacgaatttggacggaccttgtgtgattccagttcactcctctttcatcaaatctcaccaagtcgcgacaaccactatgagttctccgactgcgagaaattcctatgcgtcaagtccactctcagcaagccacacggtgtttctatgaaacactacgactgcggcgagtccgggaataattttcgcaggaaactttgtctatcacatctgcagaaaggagataagggagaaaaacattttgaatgcaatgagtgtgggaaggcgttttgggaaaagtcccatctaaccaggcatcagcgggttcacactggacaaaagcccttccagtgcaatgaatgcgaaaaggctttctgggacaagtccaacctgaccaagcatcagagatcccacaccggtgaaaagccatttgagtgcaacgagtgcgggaaggccttttcccataagtccgcactgacattgcaccagcgaacacacactggagagaaaccttaccaatgcaatgcgtgtggcaagaccttctgccagaagagtgacttaactaagcaccaacggactcataccggccttaagccttatgaatgctatgagtgcggaaagtcctttagggtgactagccacctaaaggtacaccagcggacccacacgggcgagaagccatttgaatgtctcgagtgcggcaaatctttctctgaaaagagcaaccttacccagcatcagcggatccatattggcgataagagttatgagtgcaacgcatgcggcaaaacgttttatcacaagagcttactaactcgccaccagatcattcacaccggttggaaaccctacgagtgctacgaatgcggaaagactttctgtctcaagtctgaccttaccgttcatcagcggacccataccggccagaaaccctttgcctgtccagagtgtgggaagttttttagccacaagagtacactcagtcagcactatcgtacgcacacgggagaaaagccctatgaatgccacgaatgtggaaaaattttttacaataagtcctacctcaccaagcataaccggacacatactggagagaaaccatacgaatgcaatgaatgcgggaaagccttttaccagaaatcacagcttacacagcatcagcgtatccacatcggcgagaaaccatataaatgtaacgaatgtggaaaggctttttgccacaagtcagccttaattgtgcatcagcgcacccatactcaggagaaaccgtataaatgtaacgagtgtggaaagagtttttgcgtgaagtcgggactgatctttcatgagcgaaagcacaccggggagaagccctatgagtgtaatgaatgtggaaagttctttcgccacaagtccagcttaaccgttcaccacagagcccacacaggtgagaagtcttgtcaatgcaatgaatgtggtaaaatattttatcgcaagtcggaactggcacagcatcaaaggagccataccggggaaaaaccttacgagtgcaacacatgtcgaaagacattttcccagaagtctaatctgatcgtgcaccagaggcggcacataggcgagaacctgatgaacgaaatggatattagaaatttccagccgcaggtctccttgcacaatgcaagcgagtactcccattgcggtgaatcccccgatgacatcctgaacgtgcagtag

SEQ ID NO: 247573 - DNA, 2454 bp, synthetic construct
  misc_feature 1..2454: note = Description of Artificial Sequence: Synthetic coding sequence
  source 1..2454: mol_type = other DNA
atggccaatgccactagaagagggtcaggtgtggagcagaagtctcaggaatccgtgtcttttaaagatgtgaccgttgggtttacacaagaggagtggcagcacctggatccttctcaacgggcactctatagggatgttatgctggagaattactctaacttagtgagcgtgggttactgtgtgcacaaaccagaggttatattcagattgcagcagggggaggaaccgtggaaacaggaggaggagtttcctagccagtctttccccgtgtggaccgccgaccatttaaaagagcgatcgcaggaaaaccagtcaaagcatctgtgggaggtggtctttatcaacaatgaaatgctgactaaggagcagggggatgttatcggaattccattcaacgtcgatgtgtctagcttcccctctaggaagatgttctgtcagtgcgactcctgcgggatgagtttcaacaccgtttctgaactcgtcattagcaagatcaactacctggggaaaaaatcagatgaatttaatgcttgtgggaagctcctgttgaatattaagcacgatgagactcatacccaggagaaaaatgaggtcttgaagaataggaacacattgtctcaccacgaagagacactgcagcacgaaaagatccagactctggagcacaactttgaatatagtatctgccaagaaactctcttagaaaaagctgtttttaacacacaaaaacgagagaacgccgaggaaaacaattgtgactataatgaattcggaaggacactctgtgattccagttcgctcttgtttcatcaaatcagcccttccagagacaaccattacgaattcagcgactgtgaaaaattcctgtgtgtgaagtccacgttgagtaagcctcacggagtttcaatgaaacactacgattgtggggagtctggcaacaacttccggaggaaactttgtctgagccacctgcaaaaaggagacaagggcgagaagcactttgagtgcaatgagtgtgggaaagccttctgggagaagtcacatctgaccaggcatcagcgggtgcatacgggacagaaaccattccagtgtaatgaatgcgagaaagcattttgggacaaatctaatttgacaaagcatcagcggtcgcacaccggagaaaagccatttgaatgtaacgagtgcggtaaagcgtttagccacaagtccgccctgacgctccatcagaggacacacactggggaaaaaccatatcagtgcaatgcctgcggtaagacattctgccagaagtccgacttaacgaagcatcagcggacccataccggcctgaagccctatgaatgctacgagtgtggcaaatcctttcgcgtaacctcccatctgaaggtccatcaacgaacacataccggtgaaaaacccttcgagtgtcttgaatgcgggaagagttttagcgagaaatctaacctgacacagcaccagcgcattcacataggcgataagagctacgagtgtaacgcatgtggcaaaacgttttaccataagagtttgttaacccgccatcagatcattcacacagggtggaaaccctacgaatgctacgagtgcgggaaaaccttttgtttgaagtctgatctcaccgtacatcagcggactcacaccggtcagaaaccattcgcttgccccgagtgtgggaaattcttcagccataaaagcacactgagtcagcattatcgaacacacaccggggaaaagccatatgagtgccacgaatgcggcaagatcttctataacaagagctaccttaccaaacataatcggacccacacaggtgagaagccttatgagtgcaatgagtgtggaaaagccttttaccagaagtcccagcttactcagcaccagaggatacatatcggggaaaaaccttataagtgtaacgaatgtggcaaagctttttgccacaaaagtgctctcattgtgcatcagagaactcacacccaggaaaagccttataagtgcaatgagtgcgggaagtccttttgcgtaaagtctgggctgatatttcacgaacgaaaacacactggggagaagccctacgaatgcaacgaatgtggcaagttcttcagacacaagtccagtcttactgtccaccatcgggctcatactggggagaaaagctgccaatgcaacgagtgtggaaagatcttttacagaaaatcagaactggctcagcaccagcggtctcacaccggcgaaaagccctacgagtgtaatacgtgccgaaagacttttagccagaagagcaatctcattgtgcaccagcgcaggcatatcggggaaaacctcatgaatgaaatggacataaggaattttcagccgcaagtgagtctccacaacgccagcgagtatagccactgcggggagtccccagatgatatcctgaatgtgcagtag

SEQ ID NO: 247574 - DNA, 2433 bp, synthetic construct
  misc_feature 1..2433: note = Description of Artificial Sequence: Synthetic coding sequence
  source 1..2433: mol_type = other DNA
atgaacaaagtggaacaaaagagccaggaatccgtcagcttcaaagacgtgacggtgggcttcacccaggaagaatggcagcacctggatccctcccagagggccttatatcgggacgtcatgttggaaaattactcaaacctggtgtcagtcggctactgcgttcataagccagaagtcattttccgactgcagcagggggaggagccctggaaacaagaggaagaatttccatctcagtcttttcctgtgtggactgccgatcacctcaaagaaagatcccaagagaaccagtcaaagcatttgtgggaggtcgtgtttatcaacaacgaaatgcttactaaggagcagggcgatgtgatcggaatcccattcaatgtagacgtgtctagctttcccagcagaaagatgttctgtcaatgcgattcctgtggaatgagttttaatacagtgagcgagcttgtgatcagcaaaatcaactacctcggcaagaaatccgatgagttcaacgcttgcgggaagctgctactgaatataaagcatgatgagacccatacacaggagaagaacgaagtgctgaaaaacagaaatacgctgtcacaccacgaggagacattgcagcacgaaaagatccagaccctggaacacaatttcgaatactccatttgccaggagacactgctcgagaaggccgtgtttaatacccaaaagcgtgagaacgccgaagagaataattgcgattataatgaatttgggcgaacactatgtgattcttccagtctgttgtttcaccagatatctccgtctcgagataatcactacgaattctccgattgtgaaaaattcctctgtgtcaaatccaccttaagcaaaccccatggagtgagcatgaaacactatgactgtggcgaaagcggtaataattttagacggaagctgtgcctctcacatcttcagaagggcgataagggcgaaaagcactttgaatgcaacgaatgtgggaaggccttctgggagaagtcccacctgacaagacaccagagggttcatactggtcagaaaccattccagtgtaatgagtgcgagaaagcattttgggacaaaagcaacttaacaaagcatcagcgctcccacacaggggaaaaaccctttgagtgtaacgagtgtggaaaggccttttctcacaaatccgccttgaccctccaccaaaggacgcatactggggagaaaccgtaccagtgcaatgcgtgtggcaaaactttttgtcagaaatccgatctcaccaagcatcagcggacccatacagggctgaaaccctacgagtgctacgagtgtggaaaatccttccgcgtgacaagtcacttgaaggttcatcagcgaacacacacaggcgaaaagcccttcgagtgcctggaatgcggcaaaagcttcagtgaaaaaagcaacctgactcagcaccagaggattcatattggtgataaatcgtatgagtgcaacgcctgcggcaagaccttctatcacaaatcactactgactaggcatcagattatccatactggatggaaaccatatgaatgctatgagtgtggcaaaaccttttgtctgaagagtgatttgactgtgcaccagagaacccataccggtcagaagcccttcgcttgtcctgagtgcggaaaatttttttcccataagagcacgctgtctcaacattatcggacccacactggtgagaaaccatacgagtgccacgaatgtgggaagattttctacaacaagtcttatcttacgaagcacaacagaacacacacaggcgagaagccatacgaatgtaacgagtgcggaaaagccttttatcagaaatctcagctcacgcaacaccagcgcatacacatcggtgaaaagccatataagtgtaacgagtgcgggaaggccttctgtcacaagtccgctctgatcgtgcaccagagaacccatactcaggaaaagccatacaagtgcaacgaatgtggcaagagcttctgcgtgaagtcgggtcttatctttcatgaaagaaagcatactggggagaagccttacgaatgcaatgagtgcgggaaatttttccgccacaagtccagcctgaccgtgcaccatagggcccacaccggtgaaaagtcatgccagtgcaatgaatgtggcaaaatattttataggaagtctgaattagcacagcatcagagatcccacaccggcgagaaaccttatgaatgtaacacctgccggaagactttcagtcagaagtctaacttgatcgtgcatcagcgcagacacatcggagaaaatctaatgaacgagatggacattagaaattttcagccacaggtaagcctccacaacgcctcagaatactcccactgcggcgaaagtcccgatgatatcctgaacgtgcaatag

SEQ ID NO: 247575 - DNA, 417 bp, synthetic construct
  misc_feature 1..417: note = Description of Artificial Sequence: Synthetic coding sequence
  source 1..417: mol_type = other DNA
atgaacaaggttgagcaaaagagccaggagagtgtatcattcaaggacgtcaccgtggggtttactcaggaagagtggcagcacctggatccgtcacagcgagcactgtacagggatgtgatgctcgagaattatagcaacctcgtatccgttgggtactgcgtgcataagccagaggtgattttccgcttgcagcaaggagaagaaccctggaaacaggaggaggaattcccgagccagtcatttcccgaggtgtggactgccgatcatcttaaggaacgttcacaagaaaaccagtcaaaacatctgtgggaagtggtgtttatcaataacgaaatgcttaccaaggagcagggtgatgtgatcggcattccattcaacgttgacgctcctgaaatgttaatgcctcttgactag

SEQ ID NO: 247576 - DNA, 2337 bp, synthetic construct
  misc_feature 1..2337: note = Description of Artificial Sequence: Synthetic coding sequence
  source 1..2337: mol_type = other DNA
atgaataaggtcgaccagaagtttcagggctcagtttcatttaaggacgtgacagttggctttacccaggaagagtggcaacacctggacccctctcaaagggccctatacagagatgtcatgttagagaactacagcaacctggtatcagttggatattgtgcccataaaccagaggtcatctttcgccttgagcagggggaggagccgtggcggctggaggaagagttcccttcccagagttttcctgaggtgtggacagctgaccacttgaaggagcggagccaggaaaaccagagcaagcacctgtgggaagtggtgttcataaacaatgaaatgttgaccaaggaacagggaaacgttataggaattcctttcaatatggatgttagctcctttccctcacgaaaaatgttttgtcagtatgatagtcgtggcatgtctttcaatacagtctccgaactggtgatatcaaagatcaactacctgggtaaaaagtccgacgagtttaacgcctgtggaaagctgctgttgaacattaagcacgacgagacacacacaagggaaaagaatgaggtgcttaagaaccgcaacactctgtctcaccgggagaacacactgcagcacgagaagatccagaccctggatcacaacttcgaatactccatttgccaggagacacttctggagaaggcagtattcaatacacggaagagagagaatgctgaggaaaacaactgtgattataacgagtttggtcggactttctgtgatagctcatcacttctgttccaccagatcccgccatccaaggactcacattacgagttctccgactgtgaaaagttcctctgtgtaaagtctaccctatcaaagcatgacggcgttcccgtcaagcactacgactgtggcgagtctggtaataacttccggcgaaagttgtgtctgtctcagttgcagaagggcgataagggtgagaaacatttcgagtgcaacgagtgcgggaaggccttctgggagaagtcacatctcacaaggcatcagcgagtccataccggggagaagcacttccagtgtaaccagtgcggtaagactttctgggagaaaagcaatcttacaaagcaccagcgcagccataccggtgagaaaccatttgagtgcaacgagtgtggaaaagcctttagccataagtccgctctgactctacatcagcgaacccatactggcgagaaaccgtaccaatgtaacgcttgcggaaaaactttttaccagaaatctgatttgacgaagcaccagaggactcatacgggacaaaaaccttatgaatgctatgagtgtggaaagtctttttgtatgaattcacatctgaccgtgcatcaacgtacgcatactggggaaaaacctttcgagtgtttagagtgcggcaaatcattttgtcagaagagtcacttaacccagcatcaaagaacacacattggagataagccttatgaatgcaatgcttgtggcaagactttttatcacaagtccgtcctcacacgccaccagattattcacactgggctgaaaccgtatgagtgttacgaatgtggcaagaccttttgtctcaagagcgatctgaccatccatcagaggactcataccggcgagaagccatttgcctgcccagaatgcggcaaatttttcagccataaatctacgctgagccagcactataggacccacactggagaaaagccttacgagtgtcatgagtgtggtaagattttttataacaagtcctacttaacgaagcacaatcgcacgcatacaggggagaagccctatgagtgtaatgaatgtggcaagactttctgccagaaatcccagctgacccaacaccaacgaattcatattggggagaaaccgtacgaatgcaatgagtgcggcaaggccttttgtcacaagtcggccctgattgtgcaccagcgaacccacactcaggagaaaccttacaagtgtaatgagtgcggcaagtctttctgcgtcaagagcggactgatcttgcatgaaagaaagcacactggagagaagccctacgagtgcaacgaatgtggcaaatcgtttagccacaaatctagcctaactgtgcatcacagggcacatacaggggaaaaatcttgtcagtgtaatgaatgcgggaagatcttttatagaaagtcggatctggccaagcaccagcgaagccatactggagaaaagccttacgagtgcaatacttgtcgaaagacgttctcacagaagtctaacctcattgtgcaccagcgcactcatatcggagagaaaccgtatgagtag

SEQ ID NO: 247577 - DNA, 2235 bp, synthetic construct
  misc_feature 1..2235: note = Description of Artificial Sequence: Synthetic coding sequence
  source 1..2235: mol_type = other DNA
atgaataaggtggaccagaagtttcagggttctgtttcgttcaaagatgttactgtgggctttacccaggaagaatggcagcacctggatcccagtcagcgcgctctgtaccgggacgtgatgctcgaaaactatagtaatctggtgagcgtaggcacggccgaccatctgaaagaaagatcacaggagaaccagtcaaaacatctctgggaggtcgtctttatcaacaatgaaatgcttacaaaggagcaaggcaatgtgattggcattccatttaacatggatgtctcaagtttcccttcccgcaaaatgttctgtcagtacgatagcagagggatgtctttcaatacagtaagtgagctggtcattagtaaaatcaactacctgggtaaaaagagtgatgagttcaatgcatgcggtaagcttcttcttaacatcaagcacgatgagacgcacactcgagagaaaaatgaagtcctgaaaaataggaacacactgtcacatcgggagaacacactccagcacgagaagattcagacattggaccataattttgagtactccatatgtcaggagacattacttgagaaagctgtgtttaatacccgcaagcgtgaaaacgcagaagagaataattgcgactataatgagtttgggagaaccttctgcgacagcagtagtctactctttcatcaaattccgccttcaaaggattcccattatgaattcagcgattgtgaaaagttcctgtgtgtgaagtctaccctcagcaaacacgatggcgtgcccgtgaagcactacgactgcggtgagagcggtaataacttcaggcgcaagctgtgccttagtcagctgcagaagggggacaagggtgagaaacacttcgagtgcaatgaatgtggcaaagcgttctgggagaaaagccacctgaccaggcaccaaagagttcacaccggggaaaagcacttccaatgcaatcaatgcggaaagacgttttgggaaaagtccaatctgactaaacaccagaggagccacacaggcgagaagccctttgaatgtaacgagtgcggcaaggccttcagccataagagtgctctcacactgcatcaacgcacacatacaggagagaagccctatcagtgcaatgcctgcggcaaaacgttctaccagaagagcgatctgactaagcatcagcgcactcatacaggacaaaagccatacgagtgttacgagtgtggcaaatctttttgtatgaactcacatctgacggtccaccagaggacacacacaggtgagaagcctttcgagtgcctggaatgtgggaagtctttctgccagaaatcccatttaacccagcatcagaggacacacattggtgataaaccttatgaatgcaatgcatgtggtaaaaccttttaccataagtccgttctgacaaggcatcagatcatccacactggactcaagccttacgagtgttacgaatgcggtaagacattttgtctgaagagcgatcttaccattcaccaaaggacccatacgggggaaaagccgtttgcctgccccgaatgcggcaagtttttttctcataagagcactctcagccaacactaccgcacgcacacaggcgagaagccctacgaatgtcacgaatgcggtaaaatattttataataagtcctatctgacaaaacacaaccgaacccacacaggcgagaagccttacgagtgcaacgagtgcggcaaaaccttctgccagaaatcacagctgactcaacatcagcggattcacatcggggaaaaaccctacgagtgcaatgaatgcgggaaagctttttgccacaaatctgccctgattgtgcaccagcgaacacacactcaggagaaaccctataagtgtaatgaatgcggtaaatccttctgtgtcaaaagtggtctgatattacacgagaggaagcacacgggcgaaaagccttacgaatgtaacgagtgcggcaagagcttttcacacaagagcagtctgactgtgcaccacagagcccacacaggcgaaaagagctgccagtgcaacgaatgcggcaagattttttatcggaagagcgacctcgcaaaacatcagaggtcccatacgggcgagaagccgtacgaatgtaatacttgccggaagaccttcagtcagaaatctaacctgattgtacaccagcggacacacattggagagaagccttacgaatag

SEQ ID NO: 247578 - DNA, 1683 bp, synthetic construct
  misc_feature 1..1683: note = Description of Artificial Sequence: Synthetic coding sequence
  source 1..1683: mol_type = other DNA
atgctcttgctgctgtccgaccagctcctgctgacagccctgaggaagcccaacccccaagccatggctgccctgttcctttctgcccctccccaggccgaggtgacgtttgaagatgtggccgtctatctgagccgtgaagaatgggggaggctggggcctgctcagagaggcctttatagggatgtgatgctggagacatacggaaacctcgtgtccctgggtgtagggccagccggtcccaagccgggagtgatctcccagctggagcgtggggacgagccctgggtcctcgacgtgcagggaacaagcggcaaggaacaccttagagttaactcaccagctcttgggactcggacagaatataaggagttgacttcgcaagaaacctttggcgaggaagacccgcaggggagtgagcccgtcgaggcttgcgatcatatatcaaagtcggaagggtccctggaaaaacttgtggagcaaagaggacccagagctgttaccctgaccaatggcgagtcatcaagggaaagcggtggtaatctgcgacttctaagccgtccagttcctgaccagcgtcctcataagtgcgatatttgcgaacagagctttgagcagcgctcttaccttaacaatcataaacgagtccatcggtctaagaagaccaatactgttagaaacagcggcgagatcttttcggccaatctggtagttaaagaagaccaaaagatacctacaggaaaaaagctgcactattgcagctattgcggcaagacctttcgttactctgcgaatttggtgaagcaccaacggctccacaccgaagaaaaaccatataaatgtgacgaatgcggcaaagcctttagccagtcttgcgagttcatcaatcacagacgtatgcacagcggtgagataccctatagatgcgacgaatgcgggaaaacttttacaaggcgtcccaatctgatgaaacatcagcgcatccatactggtgagaagccctacaagtgcggtgagtgtggcaagcactttagcgcctactcatctctgatttaccaccaaagaatccataccggggaaaaaccttataagtgcaatgactgcggcaaagctttcagtgatggaagcatcctaattaggcatcggagaacacatactggtgaaaaacctttcgaatgtaaggagtgcggcaaaggttttacccagtcatccaaccttatccagcatcagagaatccatactggagagaagccttacaaatgcaacgagtgtgagaaagctttcatacaaaaaaccaaactggttgaacaccagcggtctcacacgggggagaagccatatgagtgcaatgactgtggtaaagtattctcccagtctactcacctcatccagcaccaacgaattcacaccggggagaaaccatataaatgttccgagtgtgggaaagcttttcacaattctagccgactgatccatcaccagcggctgcaccacggggagaaaccttacaggtgtagtgactgtaaaaaggcgttcagtcagagtacttacctgatccagcacagacggattcataccggtgaaaaaccatataagtgttccgagtgcggtaaagctttcaggcattcttccaatatgtgtcagcaccaaaggattcacttacgtgaggattttagcatgtag

SEQ ID NO: 247579 - DNA, 1620 bp, synthetic construct
  misc_feature 1..1620: note = Description of Artificial Sequence: Synthetic coding sequence
  source 1..1620: mol_type = other DNA
atggctgctctgttcctgagcgcgccacctcaggcagaagtcactttcgaagatgtggctgtatacttaagccgggaggaatggggacgcttgggaccggctcaacgcggattatacagggatgtcatgctggaaacctatggtaatctggtgagcttgggcgttggtccagctgggccaaaaccaggagtgatcagtcagttagaaagaggcgatgaaccttgggtattggatgttcaggggacgtccggcaaggagcatctgagagtcaattccccagccctcggtactcgcaccgaatataaggaattgactagtcaggagactttcggggaggaagacccacaggggtcagaaccagtggaggcctgcgatcatatcagcaaatcggagggttcactggagaagctggttgagcagcggggtccccgtgccgtgactctgaccaatggtgaaagcagtcgagagtctggaggtaatctaaggttactgagtcggccagtgcccgaccaacgacctcacaaatgcgatatctgcgagcagtccttcgagcagaggtcctacctgaacaaccacaagcgtgtccatcgttctaaaaaaaccaacacagtgcggaacagcggggaaatcttttctgctaatctagtagtcaaagaggaccagaagattccaacgggcaagaagttgcactattgcagctattgtggcaaaacgtttcgctattcggccaatcttgtgaaacatcagcggctccacaccgaagagaagccctacaagtgtgacgagtgcggtaaggctttcagtcagagctgcgagttcatcaatcaccgccgaatgcacagcggggagataccttaccgctgcgacgagtgtgggaagacgtttacccgcagacctaatctcatgaaacaccagcggatacacaccggtgaaaaaccttataagtgcggcgagtgcggtaagcatttttctgcttatagctcacttatctatcaccaacgaattcatacaggcgaaaagccatacaagtgtaatgactgcgggaaggctttcagtgatgggtctattctgatcaggcaccgccgaacacatacgggagagaagccattcgaatgcaaggagtgtggcaaaggctttactcaatccagtaatctcatccagcaccaacgaatacacactggggagaaaccttataaatgtaacgaatgcgagaaggcattcattcagaagactaaacttgtggaacatcaacgaagccacacgggtgaaaagccctatgagtgcaatgactgtgggaaggtgttcagccagtccactcaccttattcagcaccagcgcattcacacgggagagaaaccctataagtgtagtgaatgtggaaaagcatttcataactcctctcggctcatccaccaccagagactgcatcacggggagaagccatatcggtgtagcgattgcaagaaggcctttagccagtccacatacctcatccagcaccgcagaatccataccggtgagaagccttataaatgttccgaatgcgggaaagcatttcgtcattcaagcaatatgtgtcagcaccagcggattcacctgcgcgaggattttagcatgtag

SEQ ID NO: 247580 - DNA, 1560 bp, synthetic construct
  misc_feature 1..1560: note = Description of Artificial Sequence: Synthetic coding sequence
  source 1..1560: mol_type = other DNA
atgtatctgatccgagagtcccatgcttctgggtccagctcagttacaagcagttgctccctgcctagcgagagccctactctaagacaatggcggccatgctcatgcctgccccacccgcgacccggtgtcatctcacagctggaacggggagatgaaccctgggtgcttgatgtgcaggggaccagcggcaaggaacatttgcgtgtcaattcccctgccctaggaacccggacggagtataaggagctgactagccaggagacttttggcgaagaggatcctcagggttccgaaccagtcgaagcttgcgatcacatctctaagtctgaagggtctctggagaaactcgtggaacagcgagggccaagagccgtcaccctgactaatggggagagttcacgcgaatctggtggaaacctgcgcctgctgtctagaccggttccggaccagcggccacataagtgcgatatctgcgagcagtcttttgagcagaggagctatttgaacaaccacaaacgtgtccacaggtctaaaaagacgaacaccgtgcggaacagcggggagatattcagcgctaacctggttgtcaaggaagaccagaaaataccaaccggcaagaaactccactactgttcttactgcgggaagacctttcgctactctgctaacctcgtgaagcatcaacggcttcacactgaggagaagccctacaagtgtgacgagtgtggaaaggctttctcccaatcctgtgaattcatcaaccacaggagaatgcacagtggggaaatcccttacagatgtgacgagtgtggaaagaccttcacgcggaggccaaatcttatgaagcatcagcggatccacaccggagaaaaaccctacaaatgcggtgagtgtggcaagcacttcagcgcgtattcttcactcatctatcaccagcgcatccacacaggagagaagccctacaagtgtaacgactgcggaaaggctttctctgatgggtcgatactgattagacaccgcaggactcataccggtgagaagccgttcgagtgtaaggaatgcggaaaaggtttcacacagtcatcaaacttaattcaacatcagcgcatccatactggtgagaagccttacaagtgtaacgagtgtgaaaaagcctttatccagaagactaaactggttgaacaccaaagatcacacacaggagaaaaaccctacgaatgcaacgactgcgggaaggttttttcccagtcaactcacctaatccagcaccagaggattcatacaggcgaaaagccctacaagtgtagcgagtgtgggaaggcctttcacaatagctctagactgatacaccatcaacgcctccaccacggcgagaagccctaccggtgttcggactgtaagaaggcattttcccaatctacatacctgatccaacaccgacgtattcacaccggcgagaagccctataagtgcagcgagtgcggcaaggcttttaggcactcttcaaacatgtgtcagcaccagaggattcacctgcgtgaggatttcagtatgtag

SEQ ID NO: 247581 - DNA, 1584 bp, synthetic construct
  misc_feature 1..1584: note = Description of Artificial Sequence: Synthetic coding sequence
  source 1..1584: mol_type = other DNA
atgaccgcagaactgagagaggctatggctctcgctccctggggccctgttaaagtcaaaaaggaggaggaggaggaagagaacttcccaggccaggcgagtagtcagcaggtgcacagcgagaacatcaaagtgtgggcaccagtgcagggattacagactggactcgacggctcagaggaggaggaaaagggccagaacataagttgggatatggctgtggtattgaaggcgactcaggaggcaccagcagccagcaccctgggatcgtacagcctcccaggcacactcgccaagagtgaaatccttgagacccacggtactatgaacttcctcggagctgaaacaaaaaacctgcagctcttggtccccaagacagagatttgcgaggaggcagaaaagccgcttatcataagcgagagaatccaaaaggccgacccgcagggtcccgagctgggagaggcctgtgaaaaggggaatatgttgaagagacagaggatcaagagagaaaaaaaggatttccggcaggtcatcgtaaatgactgccatttgccggagtctttcaaggaggaagagaaccagaagtgtaaaaaaagcggcggaaaatacagtctgaactctggggctgtcaaaaatcccaaaacccaactgggacaaaaaccgttcacttgttctgtgtgcggcaagggattcagccagagcgccaacctcgtcgtccaccagcggattcacaccggggagaaaccctttgagtgccacgagtgcgggaaggcattcattcagagtgctaatcttgtcgtgcatcagagaattcacacaggccagaagccctacgtctgctctaaatgtggtaaggcatttactcagtcaagtaacttgactgtgcaccagaagatccattcactggagaaaacgttcaaatgcaatgagtgtgaaaaggccttctcatacagtagccaacttgctaggcaccaaaaggtacatattacagagaagtgctatgaatgcaatgagtgcgggaaaacttttacccgtagttccaacctcatcgtgcatcagagaatccacaccggggaaaaaccctttgcctgcaacgactgcggcaaagcattcactcagagtgctaatcttatcgtacaccagcgctctcacacaggggaaaaaccctatgaatgcaaagagtgtggaaaagcattcagctgcttctctcatcttatcgtacaccaaaggattcacaccgctgagaagccttacgattgcagtgagtgcggaaaagccttttcacaactctcttgtctaatcgtacaccagcggatccactctggtgatttaccgtacgtctgtaacgaatgcgggaaggccttcacttgcagttcttacctcctcatccaccaaaggatccataatggtgagaaaccatatacctgtaatgaatgcgggaaggccttccgccagcgctcctctcttactgtccaccaaagaacccacactggagaaaagccctacgagtgtgagaagtgtggggctgctttcatctccaactcacaccttatgcgccatcaccgaacccacctggtggaatag

SEQ ID NO: 247582 - DNA, 405 bp, synthetic construct
  misc_feature 1..405: note = Description of Artificial Sequence: Synthetic coding sequence
  source 1..405: mol_type = other DNA
atgacagccgagctacgggaggcaatggcactggcaccctgggggcctgtgaaagtgaagaaagaagaggaggaggaggagaattttcctggccaggcttccagccaacaagtgcattccgaaaacatcaaggtgtgggcgcctgtgcagggtttacagaccggactcgacgggtctgaggaagaagagaagggacagaatattagctgggacatggcggttgtgctgaaggctacgcaggaggccccagccgcttcaactctcgggtcctacagcctgcccggaaccctcgcaaagtccgagattcttgaaacccacggaaccatgaactttctcggtgcagagactaaaaatttacagcttttggtgccgaaaaccgaaatctgcgaggaagccgagaagtag

SEQ ID NO: 247583 - DNA, 339 bp, synthetic construct
  misc_feature 1..339: note = Description of Artificial Sequence: Synthetic coding sequence
  source 1..339: mol_type = other DNA
atgaccgctgaactcagggaagccatggcgttggcaccgtggggccctgtgaaagttaaaaaggaggaggaagaggaagagaattttccagggcaagcctcctctcagcaggtccacagcgagaatattaaagtgtgggccccagtgcagggtttgcagaccggactggatggatcggaggaggaagagaagggacaaaatattagttgggacatggcagtcgtactgaaagcgacgcaggaggcacccgctgcctcaacgttaggaagttactctctgccaggtacactggctaagagtgagattctggagacacacggcacaatgaattttctgtag

SEQ ID NO: 247584 - DNA, 1104 bp, synthetic construct
  misc_feature 1..1104: note = Description of Artificial Sequence: Synthetic coding sequence
  source 1..1104: mol_type = other DNA
atgctgaaacgccagcgaatcaagcgtgaaaagaaggactttagacaggtcatagtcaacgattgccaccttccagagtcctttaaggaggaagagaatcagaagtgcaagaagtctggtggtaaatactccctgaattccggggcagtcaaaaacccaaaaactcagcttggccagaagcccttcacttgtagcgtatgtgggaagggatttagccagagcgccaatctggtggtgcatcagcggatccatactggcgaaaaacctttcgaatgccatgagtgtgggaaggcattcatccaaagcgctaatctggtcgttcatcagagaatacacacaggacagaaaccctacgtgtgcagcaaatgtggcaaagcgttcacgcagagctccaatctcacagtgcaccagaagatccatagtctggagaagactttcaaatgtaacgaatgcgagaaagcattttcatacagcagccaactggctcggcaccaaaaggtacacatcaccgaaaagtgttatgaatgcaacgaatgtggtaagaccttcacgcgctcctctaatcttatcgtgcaccagcgcatacatacgggggagaaacccttcgcctgtaacgattgcggcaaagcctttacacagagcgccaatttgatcgtgcatcaacgcagtcatactggtgagaaaccctacgagtgcaaagaatgcggaaaggcattctcttgtttctcacatctgattgttcatcaacgcattcatacggcagaaaaaccttatgattgctctgagtgtggcaaagctttctctcagctgtcatgccttatcgttcaccaacgaattcattccggtgatttaccttacgtctgcaacgaatgtggaaaagcattcacatgcagtagttacttgctaatccatcagcgcatccacaatggggagaagccttacacttgcaatgaatgtgggaaggcatttaggcagagatcttctctaactgttcaccagagaacacatactggcgaaaaaccctacgagtgtgaaaagtgcggcgctgccttcatttctaactcccacctgatgcgccaccacagaacccacctggttgagtag

SEQ ID NO: 247585 - DNA, 981 bp, synthetic construct
  misc_feature 1..981: note = Description of Artificial Sequence: Synthetic coding sequence
  source 1..981: mol_type = other DNA
atggatctcacagcgatatatgaatcattgctgtccctctccccagatgtgccagtgccttccgatcacgggggtactgagtccagccctggctggggaagctcaggtccatggtcgctctcgccatctgactcgagtccatctggggtaactagccgccttcccggaaggtccacatctctggtggaaggccgtagttgcggatgggtgccccctccacctggcttcgcaccgctcgccccaaggttgggccctgaacttagccccagtcctacctctcccacagcaactagtactacgccaagtagatacaagaccgaactgtgtaggaccttcagcgaatcaggccgatgtcgttatggagcaaaatgtcagtttgcccacggccttggcgagctcaggcaggcaaatcggcaccccaagtacaaaaccgaactgtgtcacaaattctaccttcaggggagatgcccatacggttcccgatgccatttcatccataatccatctgaagatctggctgcgccaggccatccccctgttctgcggcaatctatttctttctctggtcttccttccggacggagaactagcccacccccacctggactcgccggaccaagcctctcttcctccagcttcagcccgtctagctcacctccccctcccggtgacctgcctctgtctccatctgcctttagcgcagcaccgggaacccctttggcccgtagagatccaaccccggtgtgctgcccttcctgccgtcgagctacacccatttcggtgtggggaccattgggaggactcgtgaggacgccaagtgttcaatccttgggcagcgatcctgatgagtatgcatcctcggggtctagtctaggaggatccgactcacctgtgtttgaggccggtgtctttgcacctccccagcctgttgccgctcccagaaggctgcctatctttaacagaatctcagtttcggaatag

SEQ ID NO: 247586 - DNA, 1017 bp, synthetic construct
  misc_feature 1..1017: note = Description of Artificial Sequence: Synthetic coding sequence
  source 1..1017: mol_type = other DNA
atgaccactacgctggtgtctgctactatcttcgatctcagcgaagtgttatgcaaagggaacaaaatgctgaactatagcgcccctagtgcaggaggctgcttactcgacagaaaagccgttgggactccagccggaggtggcttcccacggaggcattccgtgaccctgccttcatctaagttccaccagaaccaattgctgtcttccctcaagggcgaacctgctccagcactgagctcaagagattctcgcttccgggaccggagcttctccgaagggggagagagactgctacctacccagaagcaaccaggaggaggccaggtgaacagcagtagatacaaaaccgagctgtgcaggcctttcgaagagaatggcgcttgtaagtacggggataagtgtcaattcgcacacggtatccacgaactcaggagtctgacaagacacccgaaatacaaaacggagctctgtcggacatttcacaccatcggcttttgtccttatggccctaggtgtcattttatccacaacgccgaagagcggcgtgcgctggccggagcaagagacctgtctgccgaccgcccacgcctacagcactctttctccttcgcaggttttccaagtgccgcagcaactgccgctgcgactggcctgctcgacagcccgacatccattacaccccctcccattctctctgccgacgaccttctgggatcacccactctgccagacggcactaacaatccctttgcgttttctagccaggagttagcctccctgttcgcgccatctatgggcctcccaggcggtggtagtcccacaacattcctgtttagacccatgagcgagagcccacacatgttcgattcgcctccctcccctcaggatagcttgtctgatcaggagggctacctgtcctcatctagcagcagtcacagcggatccgactcacctaccctggacaattccagaaggttgccaattttttctcgcctgagcatctcggacgactag

SEQ ID NO: 247587 - DNA, 501 bp, synthetic construct
  misc_feature 1..501: note = Description of Artificial Sequence: Synthetic coding sequence
  source 1..501: mol_type = other DNA
atgaatacatacactagatctgcctcgttcaccccaaaaacattcactttccctctggcgcaaaaccgcacatcacaccctacaacgacatcgaaactgaagtacctgggaagaccctcccccagaagagacgctctgcaggccaacggcgagggacccgaagttggcccaggaaccgaggagccagcccacaggttgcctgtaggatcaggatccgccggagaagctgccgcatcactcggcaccgccagggtgcggagcggtcgtgctgagtgtactgcaaagttggcaggagacggacacgcccgtctcgcgtcagcattcctgcaccggagggccgctctgccaccacccttaggaacgtgcagacctaggctgggcgaagggggttctgctccagcccttgggccatctcccagacgcggtcggagggtctctgaagggttaagggacagcctcccgcctctgggctccctgacactaggcaaaagccctaaatag

SEQ ID NO: 247588 - DNA, 966 bp, synthetic construct
  misc_feature 1..966: note = Description of Artificial Sequence: Synthetic coding sequence
  source 1..966: mol_type = other DNA
atgactacgacgctagtgagtgccaccatcttcgacctatctgaggtgctttgcaagggtaataagatgctgaactatagcgccccatctgcagggggttgcctgctagatcggaaggctgtcggcacaccagccggagggggattccccagaagacattctgttacgctgccttcatcaaaatttcatcaaaatcagctgttgagcagtttgaaaggcgaacccgcacctgccttgagttccagagatagtagattccgagaccggtccttcagtgaaggaggggagcggttactgcccacccagaaacaacctttcgaagaaaacggcgcatgcaaatatggggataaatgtcagtttgctcacggaatccacgagttgaggagcctcacacggcatcctaaatataagacagaactgtgccgaacatttcatacgattgggttttgtccctacggccctcgctgccactttatccataatgccgaggagcgccgagctctcgctggggctcgcgatctctccgccgacagaccacgactgcaacactccttcagttttgcagggttcccatctgcagcagcgactgcagccgctacggggctcctggactctcctaccagtatcactccaccgcctattctctcagctgacgatttgctcggaagcccaacactgccagatggcacaaacaatccattcgcatttagcagtcaagagctggcatccctgttcgccccatccatggggctcccgggtggcggttcccccacaactttcctgttcaggccaatgtccgagtccccgcacatgttcgattcccccccaagcccccaggattcattatctgatcaggagggctacctcagttccagcagcagttcccattcaggaagcgattctcctactctggataatagccggagattacctatatttagccgcctctctataagcgacgactag

SEQ ID NO: 247589 - DNA, 1017 bp, synthetic construct
  misc_feature 1..1017: note = Description of Artificial Sequence: Synthetic coding sequence
  source 1..1017: mol_type = other DNA
atgactacaacactggtctcagctaccatcttcgatttgtcagaggtcctctgcaaagggaacaagatgctgaactactcagcgccatctgcaggtggatgtctgcttgaccgcaaggcagtcggcacaccagcaggaggcggattccctcggcgtcacagcgtcaccctcccctcgagcaagttccaccaaaaccagttattgagcagcttgaaaggcgagccagcccctgctctctctagccgagacagtcgctttcgggataggagtttctctgaaggcggagagagattgctgcctacccagaaacagcccggagggggtcaggtgaattcaagtaggtacaaaaccgagctgtgtcgacccttcgaggagaacggtgcatgcaaatatggcgataaatgccagttcgcccatgggatacatgaacttcgttccctgacccgccaccccaagtacaagacagagttgtgtcggacattccacacaatcgggttttgcccctacggtccaaggtgtcatttcattcataatgcagaagaacgcagggccctggctggggctcgcgacctgtctgctgataggcccaggctgcagcatagcttttcctttgcaggcttccccagcgctgccgctaccgcagcggctaccggactgctggattcccccacctcaatcactccccctccgatcctgtcagccgatgaccttctgggaagtcctaccctccctgacggcactaataaccctttcgccttttcctcacaggagttggcttccctattcgcgccaagcatgggccttccgggtgggggaagccctaccacatttctatttcgccctatgagcgagtcccctcacatgttcgacagtccgccttctccccaagacagcctttcggaccaggagggatacctgtctagttcttccagctcacactcaggaagcgacagccccacccttgacaactctaggcggctccccatcttctcccgcctgtccattagtgatgactag

SEQ ID NO: 247590 - DNA, 1485 bp, synthetic construct
  misc_feature 1..1485: note = Description of Artificial Sequence: Synthetic coding sequence
  source 1..1485: mol_type = other DNA
atgtcaacaaccctgttgtctgccttttacgatgtagacttcctgtgtaagaccgagaaatcactggccaacttaaatctgaataatatgctggacaagaaggcagtgggtacacctgtggccgcagctccaagttctggctttgcccctggttttctgaggaggcactcagcttcgaatctgcacgccctcgcccatccagccccatccccgggatcttgctccccaaagttccccggtgccgctaacggttcaagttgcggctctgcagcagccggtgggcctacgagctacggaacgttaaaggagccctccggcggagggggaacggcactgctaaacaaagagaacaaattcagagacaggagctttagcgagaacggggataggagccagcatttactgcacttacaacagcaacagaaaggtggcggaggctcgcaaattaacagcacaagatacaaaaccgagctgtgcagaccatttgaggaatctgggacatgcaaatacggggaaaagtgccaattcgcccatggttttcacgagctgcgaagtctgacccgacatccaaagtataaaacagaactgtgtagaacttttcacactattggtttctgcccctatggccctcgctgtcattttattcacaatgctgatgagcgcaggccagcaccgagcggtggtgcctcaggtgacctccgtgcttttggtactagagatgctctacatttgggttttccacgtgagcccagacctaagctgcaccacagcctgtccttcagtggtttcccctcagggcaccaccagcccccagggggactggaaagccctctactgttggattccccgacatcgcggactccacccccacctagttgcagctccgcctcctcttgctctagctccgcctcgagttgtagtagcgcctctgcagcctcaacaccctccggcgcaccgacatgctgcgcttcagctgccgcagcagccgctgccgctctgctttatgggacgggaggtgccgaagatctcctcgccccaggcgcaccttgcgcggcttgcagctcagcctcatgtgcaaataacgcctttgcttttgggccagagctcagctctctgattacccctctggctatccaaactcataatttcgctgccgtggccgcagctgcttattacaggagccagcagcaacagcaacaacagggcctggctcctccagcccaaccgcctgccccaccctccgccaccttgcctgcaggagctgcggctccaccctctcctccatttagctttcagctcccacggagactgtccgacagcccagtcttcgacgcccctccttcccctccggacagtctgtcagatcgcgacagctacttgagcgggtccttgtcgtcagggtcattgtccggatctgaatcaccatccctggacccaggtcgtcggctgccaatctttagccgcctgtccatatcggatgactag

SEQ ID NO: 247591 - DNA, 651 bp, synthetic construct
  misc_feature 1..651: note = Description of Artificial Sequence: Synthetic coding sequence
  source 1..651: mol_type = other DNA
atgtccgctctgggccagatcacaatcactgtttctcgctgttggaacacagaacgtaaccagacagacaagaacccgtgtcttcacggggcttacctgcagttgagagagaccgtcaagaacaaaagcacacacttgaagaaaccactaatgaaacaggccccaccatggaaggaccacctgacatttcagccattacaccccgcagaacgcaagacacaagtgtggcgttggcagagtgggaacagctccgaccttgagacaacttcctcagcctcaccctggcccacgggctccaatcgagacgtcgtcttgaatacattggccgagagctgctgcggcttatccgagctaataacagcccctccttatgcaggggtgtccatccagggcttcagccagatttgggtgctcttccctttttgcggaggcactttccaccacaatgagaaagatgtgctagggctgcaggactttgagagggagtcagtctcaacatctcagagccgcaacattagcctgctgactctcgggcagctacagaactgtgttatcggaaagctgaccatcatcgatctgctcacggagcacctgctcggagtgaggcacggggtgatctgcttcccctggggcttgccctcatctagctag

SEQ ID NO: 247592 - DNA, 1224 bp, synthetic construct
  misc_feature 1..1224: note = Description of Artificial Sequence: Synthetic coding sequence
  source 1..1224: mol_type = other DNA
atgcagcaaaaagccttcgaggagtctcgatacccctggcaggagtcgttcgagaacgtggctgtttgtctccctctaagatgcccacggtgtggcgaccataccagattcaggtcattgtcatccttacgtgcacatctcgaattcagccattcatacgaggagaggacactcctgactaagtgttccttgttcccgagtctgaaggacacagatttggtgacttcctcagaattattgaagcctgggaagctacagtcctcagggaatgtggtgaagcagaagccatcctatgtgaatctttacagcatcagccacgaacacagtaaggatcgcaaacctttcgaggttgtggcagagcgccctgtctcatatgttcaaacttacaccgctatggacttgcacgccgactccctcgacggcaccagatctggccctgggctaccaacctcggacaccaaagcctccttcgaagcccatgtgcgcgaaaaattcaatcggatggtggaggccgtggaccgtacgattgaaaaaagaatcgacaaactgacaaaagagctggcacagaagacggcagagctactggaagtgagagctgcttttgtccagcttacacaaaaaaaacaggaggtccagaggcgtgagcgcgctctgaaccgtcaggtcgacgtcgctgtggaaatgatcgcggtgttgcgccagcgtcttaccgagagtgaggaggaactactccgtaaagaggaggaggttgtaacattcaaccacttcctggaagctgcagcggagaaagaggtccaaggcaaggcgaggttacaggactttattgaaaatctgctccagagagtcgagctggctgaaaaacagctggaatattaccagagccaacaggcctccgggttcgttagggacctgtcaggacatgttctgaccgacatcagctccaacagaaaacctaagtgcctgtctaggggacaccctcactccgtctgcaatcacccagatctgaaggcccacttccatcctaagggcagaaaccacctgaagaaggcaaaggatgatcgagcatccatgcaaccagctaaagctatccacgaacaggcagagtcttctcgcgatctgtgcaggcccccaaagaaaggtgaactgctgggtttcggaagaaaaggaaacattcggccaaaaatggcgaagaagaaacccaccgcgatcgtcaatatcatttag

SEQ ID NO: 247593 - DNA, 1002 bp, synthetic construct
  misc_feature 1..1002: note = Description of Artificial Sequence: Synthetic coding sequence
  source 1..1002: mol_type = other DNA
atgcagcagaaggcctttgaggagagcagatatccctggcaagagtcattcgagaatgtggccgtctgcctgccgctgcgctgcccacgatgcggtgatcatacaaggttcaggagcttgtcatcactccgtgcccatctcgaatttagccatagctacgaggagaggacgcttctcacaaaatgttctctctttccctctctcaaggatacagacctggtgacaagcagcgaactgctgaagccaggtaaactgcagagctctgggaatgtcgttaagcagaagcccagctatgtcaatttatactccataagtcacgaacacagcaaagaccgcaaaccattcgaagtggtggccgaaagaccagtaagttacgtgcaaacctacactgcaatggacctgcatgctgattctcttgacgggacccgaagcggaccagggctccccacgtctgataccaaggccagcttcgaagcacacgtgcgggaaaagttcaatagaatggtagaagccgttgaccgcaccattgagaaacggatcgacaagctgacgaaagagttggcccaaaaaacagcggagctgctcgaggtgcgcgctgcatttgttcagctgactcagaaaaagcaagaggtgcaacgacgagagcgcgcacttaaccggcaggttgatgtggctgtggaaatgatcgctgtactcagacagaggctgacggagtccgaagaggagctactgcggaaggaagaagaagtggttacatttaaccactttctggaggcagcagcagaaaaagaggtgcaggggaaagctaggctccaagactttattgaaaacctactccaacgggtggaattagccgagaagcagttggagtactaccaatcccagcaagcctctggctttgtgagagatctgagcgggcacgttagctggaagggagctggcgaggccagattggtgtgtcagaacgacctggaactcgaggaatctgcgatcgttgagtag

SEQ ID NO: 247594 - DNA, 1389 bp, synthetic construct
  misc_feature 1..1389: note = Description of Artificial Sequence: Synthetic coding sequence
  source 1..1389: mol_type = other DNA
atgcagcagaaggccttcgaggaatctagatacccatggcaggagagctttgaaaatgtggccgtgtgtcttccccttcgctgccctcgttgtggcgaccatacaagatttcgctcgctgagctccctgcgggcacatcttgaatttagtcattcatacgaagaaaggacccttctaacaaaatgctctctgtttccatcccttaaggatacagaccttgtgacctctagcgagctactgaaacccggtaaactgcagagttctggcaacgtggtcaagcagaagccttcctatgtgaatctttatagtattagccatgagcactccaaggaccggaagccatttgaggttgttgcagagagaccggtttcatacgtccagacttacaccgctatggacctccacgcagattccctcgatggcacacgaagcgggccaggattgccaacctctgataccaaagcctccttcgaagcccacgtaagggaaaagtttaatcgaatggttgaggccgtggatcggactatcgagaaaagaatagataaactgacgaaagagctggcccagaaaactgctgagctgctagaggtaagagccgcttttgttcagctaacacagaagaaacaagaggtgcaaagaagggaacgggcacttaaccgtcaggtagacgttgcagtggaaatgatcgctgtcctgcggcagaggttaactgagtccgaggaagagctgctgcgcaaggaagaggaggtggtgacctttaaccattttttggaagccgcagcggaaaaagaagtgcaaggaaaagcacgcctccaggacttcattgagaaccttctgcaaagagtggaactcgccgaaaaacagctggaatattaccagagccagcaggcctccggattcgtgcgtgatctttctggccacgtttcctggaagggagcgggagaggcaaggctcgtgtgccagaatgatctggagctagagatttttgggcatattaaccaccacctgagcggacttaaagactctcactgtctggtgttcctgcaggcaccaccagtgccttggatcatcttggcaagttttctgtggatccttgggaatccttggacatcctctacagccacggctggcttttcccagatctgggtgttgtttcctttttgcgggggaacatttcatcataatgaaaaagatgttctcggcctgcaggacttcgaacgcgaatcggtgtccaccagtcagtctcgcaatatcagtttgctgactctcgggcaacttcagaactgtgtcattgggaaattaacaataatcgacctactgactgagcatctcctcggagtccggcacggcgttatctgctttccctggggtctgccttcttcctcttag

SEQ ID NO: 247595 - DNA, 162 bp, synthetic construct
  misc_feature 1..162: note = Description of Artificial Sequence: Synthetic coding sequence
  source 1..162: mol_type = other DNA
atgcagcaaaaagcctttgaggagtcacgatacccgtggcaagagagtttcgaaaatgtggcggtttgcctcccgttgcgttgtccgaggtgtggtgatcacacccggtttcgatcgttgtcttccctcagggcacacctggaatttagtcatagctactag

SEQ ID NO: 247596 - DNA, 1893 bp, synthetic construct
  misc_feature 1..1893: note = Description of Artificial Sequence: Synthetic coding sequence
  source 1..1893: mol_type = other DNA
atgtccgtgtcatcaggtgtacagatactgacgaaaccggagacggtggaccgaaggaggtctgcagagaccacgaaggaggcaggtcggccattagagatggctgtctccgaacccgaagccagcgcagccgagtggaagcagttggatcccgcacagagtaatttgtacaatgacgtgatgctcgagaattattgcaaccaggcttctatgggttgccaggcacccaagcccgacatgatttctaaacttgaaaagggagaagccccatggctgggaaagggaaagcgccctagtcaggggtgtccctcaaagatagcccgaccaaaacaaaaggaaaccgatgggaaggttcagaaggatgatgaccagttggaaaacatacagaagagccagaacaagctgctcagagaggtggcagtcaagaaaaaaacgcaggccaagaagaatgggtctgactgcgggtcactaggtaaaaaaaacaacctgcacaagaagcacgtgccgagtaaaaagcggctgttgaaattcgagagttgcggtaaaattctgaagcagaatctggacttgccagatcacagtcgcaactgcgtcaaacgtaaatccgacgctgcgaaggaacacaagaaaagcttcaaccacagtttgtcagatacacgtaagggcaagaaacagacaggaaagaaacatgagaagctctctagccatagctctagcgataaatgtaacaaaacgggtaaaaaacacgacaaactgtgctgccactcttcttctcatatcaaacaggacaaaattcagaccggggagaagcatgagaagagcccctccctttcaagcagcacaaagcacgaaaagcctcaagcttgtgtgaaaccatacgagtgcaaccagtgcggtaaagtcctgtcccataaacagggactgattgatcatcagcgcgtacataccggagaaaaaccgtatgagtgtaatgaatgcggcattgcgttttctcaaaaaagccatctagtggtgcaccagcgcacccacaccggagagaagccttacgaatgcatccagtgcggcaaggctcatggacacaagcatgctcttactgaccaccttcggattcacacaggggaaaaaccttacgagtgcgctgagtgtggcaaaaccttccgtcactcttcgaatctcattcagcatgtaaggtcccacactggagagaagccttatgagtgtaaagagtgcgggaaaagcttcaggtataacagcagtctgaccgaacatgtacgcacgcacacgggggagatcccttacgagtgcaatgaatgcggaaaagcttttaagtactcaagttcactgacaaagcatatgagaatccatactggagagaaacccttcgaatgtaacgaatgcggcaaagctttttccaaaaagtctcatctgattattcatcagaggacgcacaccaaagagaagccgtataaatgtaatgagtgcggcaaggccttcggacattcttcctccttgacttatcatatgcggacccataccggcgagtcacctttcgaatgcaaccagtgcggcaaagggtttaaacagatagagggactgacgcaacaccaaagagtgcataccggagaaaaaccatacgagtgcaatgagtgcggaaaggccttcagtcagaagtcacacctcatagtccaccagaggacccacacgggggagaagccatacgaatgcaacgagtgtgagaaggccttcaacgcgaagtcccagcttgtgatccatcaacggagccacactggggaaaaaccttatgaatgtaatgagtgcggcaagacattcaagcaaaacgccagcctcaccaaacatgtgaaaacccactcagaggacaaatcccatgagtag

SEQ ID NO: 247597 - DNA, 1938 bp, synthetic construct
  misc_feature 1..1938: note = Description of Artificial Sequence: Synthetic coding sequence
  source 1..1938: mol_type = other DNA
atgtctgtgagcagtggagtccagatcctgacaaagcctgaaactgttgatcgacgccgttcggccgagacgaccaaggaggcaggaagacccctcgagatggcagtgagcgaacccgaggcatccgctgcagtgagtgttactttcaaacacgtgactatggcttttacacagaaagaatggaaacaattggaccctgctcagagtaatctctataatgacgtgatgcttgaaaactactgtaatcaggcctccatgggatgccaggcaccaaagccagacatgatatctaagttggaaaagggggaagctccttggctgggaaaaggcaaacgcccttctcagggctgcccttcaaaaatcgcaaggcccaaacagaaggaaacggatggaaaggtgcagaaggacgatgatcagctggaaaacatccagaaaagtcaaaacaaactgctgcgagaggttgcagtaaagaaaaaaacccaggccaaaaagaatgggagtgactgcggcagcctagggaaaaaaaacaacctacacaaaaaacacgtgccatcaaaaaaaagacttctgaaattcgagagctgcggaaaaatcctgaaacagaatctggacctcccagatcattcccgaaactgcgttaagcgtaagagtgatgccgcaaaggagcataagaaatcttttaaccattcactgtcggatacccggaaggggaaaaaacagactgggaagaaacatgaaaaactcagttctcatagttcttcagacaaatgtaataaaacgggcaagaagcacgacaagctttgctgtcactctagcagccacattaagcaggacaagattcagaccggcgaaaaacacgagaaatcaccgagcctgtccagctcgaccaagcatgagaagccacaggcttgtgttaagccgtatgagtgtaatcaatgcggcaaggtattaagccacaagcagggcctgattgaccaccaaagggtgcacactggagaaaagccatacgagtgtaacgagtgcggaattgcattcagtcagaagagccatctcgtggtccatcagcgcacccacacaggggaaaagccttacgagtgcattcaatgtggaaaagctcatggccacaaacacgctttgacagaccaccttaggattcacaccggcgaaaagccatacgagtgcgccgaatgcggcaagaccttcaggcattcctcgaacctaatacagcatgtcaggtcacatacaggagaaaagccttatgagtgtaaagagtgtggcaaatccttccgctacaactcaagcttgactgagcatgttaggacccacaccggcgaaatcccgtacgaatgcaatgagtgcgggaaggcgttcaaatatagtagcagtctgaccaagcacatgcgaatccacaccggcgagaagcccttcgaatgcaacgagtgcggtaaggccttctctaagaaatcccacctgatcatccatcaaaggactcacacaaaggagaagccttataaatgcaacgaatgtggtaaagcattcggacatagcagcagcttaacatatcacatgagaacacacaccggtgagtctcctttcgagtgcaaccagtgcggcaagggctttaaacagatcgaggggctgacccagcaccagcgggtacacacaggggagaagccctacgaatgcaacgaatgcggtaaagccttttcccagaagagccaccttattgtgcatcagcgtactcacaccggtgaaaaaccatacgaatgcaatgaatgtgaaaaagcattcaatgctaagtcgcagcttgtcatccatcaaaggagtcacactggggaaaagccttacgaatgtaacgagtgcggcaagactttcaagcaaaatgcctctctcacaaaacacgtcaaaacccacagcgaagacaagagccacgaatag

SEQ ID NO: 247598 - DNA, 1896 bp, synthetic construct
  misc_feature 1..1896: note = Description of Artificial Sequence: Synthetic coding sequence
  source 1..1896: mol_type = other DNA
atgagcgtttcgtcaggcgtgcagattctgacaaaaccagaaaccgtcgaccgcagaagaagtgcagagaccaccaaagaggctggacgtcccttggagatggcagtctctgagcccgaagctagtgccgcaaaagagtggaaacagctggatccagctcagtcaaatctgtataacgatgtcatgctagaaaattactgcaaccaggcgtccatgggttgccaggcacccaagcctgacatgattagtaaactggagaaaggagaggcgccatggttaggcaagggaaaacgaccctcccaggggtgtccatctaaaatcgctagacccaaacaaaaagaaacagatgggaaggtccagaaggatgacgaccaactggagaatattcagaagagtcaaaacaagttactgagggaagtagctgtcaagaaaaagactcaagccaagaagaacggttccgattgcggcagcttggggaagaagaataatctgcacaagaagcacgtgccctcaaagaagcgactgctgaaatttgaatcttgtggaaaaatcctcaagcaaaacctggatttgcctgaccacagcaggaactgtgtcaaacgcaagagtgacgccgctaaagagcacaagaaatcctttaaccatagcctctctgacaccaggaaaggcaaaaagcagaccggcaaaaaacacgaaaaactgtccagccactctagcagtgataaatgtaataaaaccggcaaaaaacatgataagctgtgttgccattcaagtagccacatcaagcaggacaaaatccagactggggagaagcacgaaaagtcccccagcctgtcgagctcgaccaagcacgagaaaccacaggcttgtgtgaagccttatgaatgtaatcagtgcggaaaggtgttgtcccacaagcagggcctcattgaccaccagagagtacacaccggagagaagccatatgaatgcaatgagtgtggtattgctttttctcagaagagccatctcgtagtgcatcagagaacacacacaggcgaaaaaccctacgagtgtatccagtgcggaaaagcacacggccataaacatgctctcaccgatcacctaagaatccataccggtgagaaaccttatgagtgcgccgaatgcgggaagacatttagacactctagtaatctgatacagcacgtcagatctcacaccggagaaaagccctatgaatgtaaggaatgcggaaagagctttcgatataactctagcctgactgaacacgtacgcactcataccggggaaatcccctatgagtgtaacgaatgcggcaaagcgttcaaatactcttcctcactaaccaaacacatgcgtattcatacaggagagaaaccattcgagtgtaacgaatgtggtaaggcgttcagcaaaaagtcacacttgataattcatcagagaacgcacaccaaagaaaaaccttacaagtgcaatgagtgcggcaaggcttttggccactcctcgtcacttacctaccatatgcggacacataccggagaaagtccgtttgagtgtaaccagtgcgggaaggggttcaagcagatcgaaggtcttacacaacaccaacgcgtccataccggcgaaaaaccgtacgaatgtaacgagtgcggcaaagccttctctcagaaatctcacctcattgtgcaccaacgcacgcataccggcgaaaagccttacgagtgcaacgagtgtgagaaggccttcaacgccaagtcacaactagtgattcatcagaggagtcacactggggagaagccgtatgagtgcaatgaatgtggcaaaacattcaagcagaatgcctctttgacgaagcatgtgaaaacacatagcgaagacaagtcccacgagtag

SEQ ID NO: 247599 - DNA, 1653 bp, synthetic construct
  misc_feature 1..1653: note = Description of Artificial Sequence: Synthetic coding sequence
  source 1..1653: mol_type = other DNA
atgccactgcagggctccgtgtcttttaaggatgtgaccgtcgatttcactcaggaggagtggcagcaactggatcccgcacaaaaagcactctacagagacgtgatgctggagaattattgtcattttgtgagtgtggggtttcacatggccaaaccagatatgattcgaaagcttgaacagggtgaagagctatggactcagcggattttcccgtcctatagctatttagaagaagatggaaaaaccgaggatgtccttgttaagtttaaagagtaccaggacaggcattctcgcccattgatctttatcaatcataaaaaactcatcaaggaacggagtaatatctacggtaagacgttcacactgggcaagaaccggatctctaaaacaatcctatgtgaatataaacccgatggaaaggtcctgaaaaatatcagcgaactcgtcatcagaaacatttctccaattaaggaaaagttcggcgattctacaggatgggagaaatccctgttaaatacaaagcatgagaagattcaccctgccgttaacctccataagcagacggagagggtgttgagcggcaaacaggaactcatacaacatcagaaggtacaggctcctgaacagccttttgatcacaacgagtgcgaaaaaagcttccttatgaaggggatgctgtttacacacacacgcgcacacaggggggaacgcacttttgaatataataaagacgggatcgcctttatagagaagtccagcttgtcagtccacccctccaacctgatggagaaaaagccaagcgcttacaataaatacggtaagttcctgtgtcgaaagcccgtgtttattatgccccagaggccacaaacagaggagaaaccatttcattgcccatattgcggcaataactttaggcgaaagagttacctaattgaacaccaacggatccatactggcgagaaaccctacgtgtgcaaccagtgtggaaaagcattccgacagaagacagcgctcaccttgcatgagaaaactcacatcgaagggaaaccattcatttgtatcgattgcgggaagtctttccggcagaaggctacactcacaagacaccacaagacacatacaggtgaaaaggcttacgagtgtcctcagtgtggctccgctttcagaaagaaatcttacttaatagatcaccaacggacccacacaggggagaaaccctatcagtgtaacgaatgtggcaaggcctttatccagaaaaccaccctcactgttcaccaacgaacacacacaggtgagaaaccttatatctgcaatgagtgcggaaagtcattctgccagaaaacaacactcaccctgcaccagaggattcacacgggtgagaagccgtacatctgtaatgagtgtggtaagtcctttagacaaaaagccatcttgactgtgcaccaccgcatccacacaggagaaaagtcaaacgggtgtccccagtgtgggaaggccttctctaggaaaagcaaccttatccggcaccagaaaacccacactggcgagaaaccttacgagtgtaagcaatgcggcaagttctttagctgtaagtctaatttgatcgtccatcagaagacccataaggtggagacgaccggaattcagtag

SEQ ID NO: 247600 - DNA, 1650 bp, synthetic construct
  misc_feature 1..1650: note = Description of Artificial Sequence: Synthetic coding sequence
  source 1..1650: mol_type = other DNA
atgtctcaaggatccgttagcttcaaggacgttaccgtggatttcacccaggaggagtggcagcagctcgatcccgcacagaaggcactatatagagatgtcatgctggaaaactactgccactttgtttcagttggtttccacatggccaagccggacatgattcgcaagttggaacagggcgaagagctatggacacagaggatattcccttcctattcgtacttggaagaagatggcaagacagaggacgtgctggtcaaatttaaagagtatcaagacaggcactctcggccacttatttttattaaccataaaaaacttataaaagaacgcagcaacatttacggaaagaccttcactctcgggaagaaccgcatctccaagacaatcttatgtgagtataaaccagacggcaaagtgctgaagaatatatctgaattggtgattcgcaacataagccccattaaagagaagttcggggactcaaccggatgggaaaaatctttgctgaacaccaagcatgaaaagatccacccagctgtgaatcttcacaagcaaaccgagcgcgtgctttccggaaaacaggaattaatccagcaccagaaagttcaggcaccagagcagccatttgaccacaacgagtgtgagaagtctttcttgatgaagggcatgctcttcacacacacacgtgcgcaccgaggcgaaaggaccttcgagtacaataaggatggcatcgctttcatcgagaaaagctcactgtctgtgcatccttctaacctgatggagaagaagcccagcgcttataataaatatggcaaatttctatgccggaagccagtttttataatgccacagcggccacaaaccgaggagaagccgtttcattgcccctattgtggtaacaatttcagacggaagtcctacttgatcgaacaccagcggatacacaccggcgagaagccttatgtctgcaatcagtgtggcaaggcctttaggcagaagactgctcttactttgcatgaaaagacacacattgagggaaagcccttcatttgcatcgactgcggcaaatcatttcgacagaaagcaacactgactcggcaccacaaaacccacacaggagagaaagcttatgaatgtccccagtgcgggtcagcctttcgcaagaagtcatacctaatagatcatcagaggacgcatacaggcgaaaaaccctatcagtgtaacgagtgcgggaaagcttttatccagaaaactaccctcaccgtccatcaaagaacccacaccggtgaaaaaccctacatctgcaatgaatgtgggaaatccttttgccaaaaaactacgctaacactgcatcagcgtatccacacaggcgaaaagccatacatctgtaatgagtgtggtaaaagtttccggcaaaaggccattttaaccgttcaccatcgcatacatactggagagaaatctaacgggtgtccgcagtgcggtaaagcattcagtcggaagagtaacctcatccgccaccagaaaacgcatactggtgagaagccctatgaatgtaaacagtgcgggaagtttttcagctgtaagagcaacctcatcgtccaccaaaaaacacataaggtcgaaaccacggggatccagtag

SEQ ID NO: 247601 - DNA, 1503 bp, synthetic construct
  misc_feature 1..1503: note = Description of Artificial Sequence: Synthetic coding sequence
  source 1..1503: mol_type = other DNA
atggaagagagtcactttaacagcaacccctacttttggccttcaatccccactgtgagtggccagatcgagaatacaatgttcattaataaaatgaaggatcagctgctcccagaaaaggggtgtggccttgccccaccacattatccaactctgctgaccgtgcccgctagcgtttccctccctagtggcatatccatggataccgagtcaaagtcagaccaactgacaccacactctcaagcatctgttacacagaatatcaccgtggtgccggtcccttctaccggtctgatgacagccggtccgggtttggtgataacctctccttccgggagtctcgtgacaaccgcttcttctgcgcagacctttcctatctccgcaccaatgatcgtatccgcacttcctcctggcagccaggccttgcaagtggtgcctgatttatccaaaaaggttgcctccacactgaccgaggaaggagggggaggaggcggaggtggtggctcagtggcccctaagccccctagagggagaaaaaaaaagaggatgctggagtcgggcctgccagaaatgaacgacccatacgtcctcagccctgaggatgatgacgatcatcaaaaagatgggaagacctaccggtgccgtatgtgctccctgactttttattccaagtccgaaatgcagattcattctaaatcacacaccgagacaaaacctcacaagtgcccccactgcagtaaaacgttcgctaacagtagttacctagcgcagcacattcgcatacactcgggcgcaaaaccatactcatgtaacttctgcgagaagagcttccgccagctgtcacatctgcagcagcatactcggatccacactggagacagaccctataagtgcgcccacccaggatgtgaaaaagcgtttacacaactgagcaacttgcagagccacaggcgccagcataataaagataagccttttaagtgccataattgtcatagggcatataccgatgccgcaagtctcgaggtgcacctgtcaacacacacagtaaaacacgccaaagtgtatacctgtacgatttgttccagagcctacacctctgagacgtaccttatgaaacatatgcgcaagcataatccacccgaccttcagcagcaggtgcaggcggctgccgcagctgccgcagtcgctcaggcccaggctcaagcccaagctcaggcccaggcccaagcacaggctcaagctcaggcccaggccagtcaggcctcccaacagcagcagcaacaacaacaacagcagcaacagcaacagcagcaaccaccgccacacttccagtcgcctggggctgcccctcagggtggagggggaggtgactctaacccaaatccccctccacagtgttcattcgacttgactccatataaaactgctgagcatcataaagacatttgcttaaccgttaccaccagcaccattcaggtggaacatctcgcaagcagctag

SEQ ID NO: 247602 - DNA, 1734 bp, synthetic construct
  misc_feature 1..1734: note = Description of Artificial Sequence: Synthetic coding sequence
  source 1..1734: mol_type = other DNA
atggaagaaagtcacttcaactccaacccctacttctggccctccattcccaccgtgtcaggccaaatcgagaataccatgttcattaacaagatgaaagatcagctgttgccagaaaagggctgtggcttggcccctccccactaccccaccctcctgacggtgcctgccagcgtgagcttgccatctgggatcagcatggatacagagtcgaagtctgaccagctgactccacacagccaggcttccgtcacacagaatataactgtcgtacctgtgccctctactggactgatgaccgcaggcgtctcctgttcacagcgctggcgccgagaagggtcccagagcagaggcccaggcctggttattacaagcccgtccggctctctggttaccaccgcaagctcagctcaaactttcccgatctcggcaccaatgattgtcagcgcactcccacccggaagccaggctctgcaggtggtgcctgatctctccaaaaaggtggcctccacccttacagaagagggtggcggtggcggaggtggcggaggcagcgtcgcacccaaacccccacggggacgcaaaaaaaagagaatgctggagagcggcttgcccgagatgaatgacccgtacgtcctgtcaccagaagatgacgacgatcatcagaaggatggtaagacttacaggtgccgcatgtgttcccttacgttttactccaaatccgaaatgcagatccacagcaagtctcacaccgagaccaagccacacaagtgccctcactgtagtaagactttcgccaattccagctacctcgcccagcatattcgtatccacagtggagccaaaccatactcttgcaatttttgtgaaaagtccttccggcaattgtcacatctgcagcagcataccagaatacactctaagatgcacactgagactatcaagccccacaagtgccctcattgtagcaagaccttcgcaaataccagctacctcgcgcaacacctgcggatacacagcggggctaaaccctataactgttcttactgccagaaggcttttcgtcagttaagccacctgcagcagcacacacggatccacactggcgatcggccatataagtgtgcccatcctgggtgcgagaaggcgttcacacagttgtccaatctccaatcgcatagacgacagcacaataaagacaagccattcaagtgtcacaattgccacagggcttataccgatgcagccagcctggaggtccatctaagtacccatactgtgaagcatgccaaagtatatacctgcactatttgctccagagcctacaccagtgagacgtatctgatgaagcacatgagaaaacacaatccacccgacctgcaacagcaggtgcaggccgctgctgccgcagcagccgtggcgcaggcccaagcccaagcacaggcccaggcacaggcccaggctcaggcgcaggcacaggctcaggcatcacaggcttctcagcagcagcagcagcagcagcaacagcaacagcagcaacagcagcagccaccaccacacttccagtctcccggagctgctccacagggcggaggtgggggagattctaatccaaacccaccaccacaatgttcgtttgaccttaccccctacaagacagctgagcaccacaaggacatttgcttgactgttactaccagcacaattcaggttgaacacctcgcctcctcctag

SEQ ID NO: 247603 - DNA, 1551 bp, synthetic construct
  misc_feature 1..1551: note = Description of Artificial Sequence: Synthetic coding sequence
  source 1..1551: mol_type = other DNA
atggaggagagtcacttcaactctaatccctacttctggccctcgattccaacggtctcaggccagatcgagaacaccatgtttataaacaaaatgaaggatcagttgctgcccgaaaagggctgcggcttggcacctccccattaccctactttgttgaccgtgcctgcctcggtctctctgccatctggcatcagtatggatacagagtctaagagtgaccagctgaccccacacagccaagccagcgtgacgcaaaacatcactgtagtgccggtcccgtccacaggcctgatgactgctggcgtgtcatgttcccaacgttggaggagggagggaagccagtctcgtgggccagggctggttattacctccccgtccggatcactcgtgaccactgccagtagcgctcagacatttccgatatctgcgccaatgatagtgagtgctctaccacccggtagccaggctttgcaggtcgtgcctgatctcagcaaaaaggtcgcaagcacattgaccgaagaaggcggaggtggcggagggggaggaggctccgtggcgcctaagccgcctcggggtagaaagaaaaaaagaatgctagagtctggtctcccagaaatgaacgacccttatgtactgtcacctgaagacgacgacgatcaccagaaagacgggaagacctacaggtgcaggatgtgtagcttgaccttctattcaaagtcagagatgcagatccatagcaaatctcacaccgaaacgaaacctcacaagtgccctcattgcagcaaaacctttgcaaatagctcttacctggcacaacatatcaggatccacagcggtgccaagccatactcttgtaatttctgtgaaaaaagtttcaggcagctctcccacctgcagcagcatactcgtatccacacaggagatagaccctacaagtgcgcgcacccagggtgcgagaaggctttcacccagttgtcaaacttacaatctcataggcgacagcacaacaaggataagccttttaaatgtcataattgccacagggcttacactgacgctgcgagcctggaggtacacttaagcacacatacagtaaaacacgccaaagtttacacctgtacaatctgttcgcgggcttacacatccgaaacttacctgatgaaacacatgcgcaagcacaatccccctgacctgcagcagcaagtgcaagccgcagcagctgcagcggcagttgcgcaggcacaagcgcaggctcaggctcaggctcaggctcaggcacaagcacaggcgcaggcgcaggcctctcaggcatctcagcagcagcaacagcagcagcaacagcaacagcaacaacagcaacagccgcctccacacttccaaagtccaggcgcagcaccgcagggcggtggtggaggcgactctaacccaaacccaccgcctcagtgttcttttgatctgaccccttacaaaactgccgaacaccataaggacatatgcctcaccgttacaacaagcacaatccaggtagaacatctggccagttcttag

SEQ ID NO: 247604 - DNA, 1551 bp, synthetic construct
  misc_feature 1..1551: note = Description of Artificial Sequence: Synthetic coding sequence
  source 1..1551: mol_type = other DNA
atggaggagtcccactttaattccaatccctacttctggcccagcattccaaccgtgtccgggcagattgaaaacactatgtttattaacaagatgaaagatcaactgctccctgaaaaggggtgcggcctggcgccaccccattaccccactctgctcaccgttcccgcttccgtgagccttcccagcggtatttccatggatacagagtccaagtcggaccagcttaccccccactcacaagcatccgtgacccagaacatcacagtggtgccagttcccagcactggcctcatgactgctggagtctcatgcagtcagcgatggcgaagagagggaagccagagccgcggtccaggactggtcattacctctcccagtgggtctctggtgacaactgccagcagcgcacagacttttccaatttccgcgcctatgatcgtctctgcattgccacctggctcccaggctttgcaggtggttcccgacctctccaagaaggtcgctagcactttgactgaagagggaggaggtgggggaggaggaggcggttcagtggcaccaaagcctccgcgaggcaggaaaaagaaacggatgctggaaagcggattaccggaaatgaatgatccctatgtattaagcccagaggacgacgacgaccatcagaaggatgggaagacgtatcgctgtcgaatgtgctctctcaccttctactccaaatcagagatgcagatacactctaagtctcacacagagaccaagccacacaaatgtcctcattgttctaaaacctttgccaattcgagctaccttgcccagcacatcagaattcactccggcgctaagccttactcgtgcaacttctgtgaaaagtcattccgccagctgagccacttgcaacagcacactcgcattcacacaggcgacaggccttataaatgtgcacaccctgggtgcgagaaagccttcactcaattgtccaacctgcagtctcataggagacagcacaacaaggacaaaccttttaagtgtcacaactgtcacagggcatatacagatgccgcttccctcgaggtgcaccttagcacccataccgtcaagcatgcgaaagtctatacgtgcaccatctgcagtcgcgcatacaccagcgagacctacctcatgaaacatatgaggaaacacaacccaccagacttgcaacagcaggttcaggctgccgcagcggcagcagccgtcgcacaagcacaggcccaggcccaggcacaggcccaagcccaagcccaagcccaggcgcaggcccaggcctctcaggcaagccaacagcagcagcaacagcagcagcagcagcaacaacagcagcaacagccacctcctcatttccagtcacctggggctgcaccacaagggggaggcggaggggacagcaatcccaacccacccccacaatgctcattcgaccttacaccctataaaactgcagagcaccacaaagacatatgcctgacagtaacaacgagcaccattcaagttgaacatttggcctccagttag

SEQ ID NO: 247605 - DNA, 1734 bp, synthetic construct
  misc_feature 1..1734: note = Description of Artificial Sequence: Synthetic coding sequence
  source 1..1734: mol_type = other DNA
atggaggagtcacacttcaacagtaatccatacttctggccgagcatccctaccgtgagcgggcagatcgagaacacaatgttcatcaataagatgaaggatcagcttttgccggaaaagggctgcggcttggcacctccccactaccccacactgctgacggtgcccgcttcagtatctctgccttcagggatctctatggatacagaatctaagagtgatcagctgacccctcatagccaggcctccgtcactcagaacataacagtagtgccagtgccttccacgggactgatgactgccggtgtctcttgcagccaacggtggagacgcgagggtagccagagccgcggacctgggctggtgataaccagcccttctgggtccttggtgactacggcgtcctccgcgcagactttcccaatcagcgccccaatgatcgtatccgccctgcctcccggttcccaggcattacaggtcgtgcccgatctgagcaagaaggtagcaagtaccctaaccgaagagggcggtggagggggaggagggggaggtagcgtggctcccaaaccacccaggggcaggaagaagaagaggatgctcgaatctggtcttcccgaaatgaatgacccctacgtgttgagtcccgaggatgatgacgaccatcaaaaagatggaaagacatatagatgtcgtatgtgctcgttgacattctactcaaagagcgagatgcaaattcattccaaaagtcacactgagactaaaccccataagtgtcctcattgtagtaaaacctttgctaattccagttacctcgcccaacacatacggattcactctggggctaagccctacagctgcaacttctgtgaaaagtcattcagacagctttcccatcttcagcagcatacaaggatccactctaaaatgcacacagagactatcaagccacataaatgccctcactgtagcaaaaccttcgccaatacaagttatttggctcaacaccttcgtattcattccggggcaaaaccttataattgttcttactgccagaaggcctttagacagctgagccacctgcagcagcacaccaggatccacaccggggatcgaccttacaaatgcgctcatcccggatgtgagaaagctttcacacagctatcaaatctacaatcacacagaagacagcacaataaagataagccttttaagtgtcacaattgccaccgtgcctacacagatgccgcatcactggaggtgcatctgtctacccacaccgtgaagcatgccaaagtctacacatgcacaatttgcagccgagcctacactagcgagacatacctaatgaaacacatgcggaagcataaccccccagatctccagcaacaggtgcaggcagctgcggctgcggctgccgtcgcccaagcccaggctcaggctcaggcacaagctcaggcccaagcgcaggcccaggcccaagctcaggccagccaggcctcccagcagcaacagcagcagcagcagcagcagcagcagcagcagcagcagcctcctcctcactttcagtcacccggagctgcgcctcagggcggaggcggaggagattccaatcccaacccgccaccacagtgctcctttgacttaaccccctacaaaaccgccgaacatcataaggatatctgcctgaccgtgacaacgagtaccattcaagttgaacacctcgcatcctcatag

SEQ ID NO: 247606 - DNA, 1008 bp, synthetic construct
  misc_feature 1..1008: note = Description of Artificial Sequence: Synthetic coding sequence
  source 1..1008: mol_type = other DNA
atggaagagagtcacttcaacagtaacccttacttttggcctagcatcccgaccgtctccggacaaattgagaacaccatgtttattaacaagatgaaggaccagttactgcccgaaaagggttgtggtcttgccccaccccactatccaactcttcttaccgtccctgcaagtgtgtcactgccttcaggaatctctatggacactgagagtaaaagtgatcagctgactccccactctcaggccagcgtcacccagaacattacagttgtgcctgtacctagcaccgggctgatgaccgcaggggtgagttgctctcaacgctggagaagggaagggtctcagtctcgaggacccggacttgtgattacatccccatctggatctctggtgaccacagccagtagcgcccagacctttccaatttcagcacctatgatcgtgtcagcccttccccctggcagccaggcattacaggtggtgccggatctgtccaaaaaagtggcatcgaccttgaccgaagaaggaggtggagggggtgggggtgggggaagcgtggctcccaagcctccacggggtaggaagaaaaaacggatgctggaaagcggcctccccgaaatgaacgacccctacgtcctgtctcctgaagacgatgacgaccaccagaaagacgggaagacctatcggtctgagggtaactgcggtacaggcaacggtcagtctctgggtctcatggactcagtcccagggtccacaacgaatcttctgtgtgaccccggatgccgaatgtgctctctgaccttttacagcaaatccgaaatgcaaattcactccaagtcacatacagaaaccaagcctcacaaatgtccacactgctctaaaacctttgccaactcctcatacttagcgcagcatattcgcatccacagtggggcaaagccatattcatgtaacttctgtgagaaatcattccgccagctttctcatttacaacagcataccagatag

SEQ ID NO: 247607 - DNA, 834 bp, synthetic construct
  misc_feature 1..834: note = Description of Artificial Sequence: Synthetic coding sequence
  source 1..834: mol_type = other DNA
atggaagaatctcattttaatagtaatccatacttctggcccagtatccccacagtgtcaggccagatagaaaataccatgttcataaacaaaatgaaagaccagttactgcccgagaagggctgtggattggcaccccctcattaccctactctgcttaccgtccctgcatcagtgagcttaccaagtggcatatcaatggataccgagtccaagtctgatcagctgacccctcattcacaggccagtgtcacccaaaatatcaccgttgttccagtgccttccacaggtttgatgactgccggacctggattagttataacgagcccgtccggctctctggtgacgactgctagtagcgctcagaccttccccatctccgctccaatgatagttagcgcactgcccccaggaagccaggcgttgcaagtcgtgccagatctgtctaaaaaggtcgcgtctacactgacagaggaggggggaggcggagggggaggcggaggcagtgtagcccctaagcccccacgcggaagaaagaagaaaagaatgctcgaatctgggttgcccgagatgaacgatccgtatgtgctttcacccgaggatgacgacgaccatcagaaagacggcaagacataccggtgccgaatgtgctctctgactttctattcaaagtctgagatgcagatccacagtaaatctcacacagagactaaaccgcataagtgtcctcattgcagcaaaacatttgcaaattcctcatatctggcacaacatataagaattcactcaggcgctaagccatactcgtgcaatttttgtgaaaaatccttttag

SEQ ID NO: 247608 - DNA, 1386 bp, synthetic construct
  misc_feature 1..1386: note = Description of Artificial Sequence: Synthetic coding sequence
  source 1..1386: mol_type = other DNA
atggaggagagccatttcaactccaatccttatttctggccaagtattcccacagtgtccggccagattgagaataccatgtttatcaacaagatgaaggaccagctgctgccagagaagggatgcgggctggctccgcctcactaccccaccctgctcacagtgcccgcaagcgtgagtcttcctagcggcatctccatggacacggaatcaaaatccgaccagttgacacctcactcgcaggctagtgtcacgcagaatataaccgtcgtacccgtgccctccactggccttatgacagctgctctgcaagtggttcctgacctgtcaaaaaaagtggcctcaacactgacggaggagggtgggggtggaggcggtgggggaggcagcgtggcacctaagccaccaaggggacggaagaagaaacgcatgttggaaagtggcttacctgaaatgaacgatccatatgtgcttagccctgaggatgacgacgaccaccagaaagacggcaaaacttacagatgcaggatgtgctccctcaccttctacagcaaatccgagatgcagatccactcgaagagtcatacagaaaccaaaccacataaatgcccccattgtagcaaaacattcgcaaattcatcttacctcgctcagcacattcggatccattctggggctaagccgtacagttgtaatttctgcgagaagagcttccgtcagctgtcacatctacagcagcacacccggatccacacaggggaccggccatataaatgtgcacaccccggatgtgagaaggcgttcactcaactcagcaatcttcagagccaccgcaggcagcacaataaagacaaaccgtttaaatgccacaattgtcacagggcttatactgatgctgcttcactcgaagtgcatctctccacgcacactgtaaagcatgcaaaggtctacacctgtacaatctgctcacgagcctacacttccgaaacatacctcatgaaacatatgagaaagcacaacccccctgatctgcagcagcaggtgcaagccgcagccgctgccgctgccgtcgcacaggcccaggctcaggcccaggcacaagcacaggcacaggctcaagctcaagcacaggcccaggcctcacaggccagtcagcagcagcaacaacagcaacaacaacaacagcaacagcaacagcagccccctccccatttccaaagccctggtgccgcaccacaaggcggtggaggtggtgactccaatccaaatccaccgcctcagtgctcatttgatctcacaccttacaagaccgcggagcatcacaaggatatatgtttgaccgtaaccacctcaaccattcaagtggagcaccttgcctcatcttag

SEQ ID NO: 247609 - DNA, 1161 bp, synthetic construct
  misc_feature 1..1161: note = Description of Artificial Sequence: Synthetic coding sequence
  source 1..1161: mol_type = other DNA
atgattctgggatcgctgtcacgcgctggtcctttgcccctgctccggcagcccccaatcatgcaaccacctctggatctcaagcagattctgcctttccccttggaaccagctcccactttggggcttttttctaactacagtaccatggaccccgtccagaaggctgtcctgtcgcacacgttcggcggacccctcttaaaaaccaagaggcctgtaataagttgtaatatctgtcagatcaggttcaacagccagagccaggcagaagcccactataaaggtaatagacacgccaggagagtaaaggggattgaagctgcaaaaacaagagggagagaacctggggtgcgggagcccggagaccccgctccccctggttcaacgcccaccaatggggacggcgtggccccacggccagtgtccatggagaacgggctgggacctgcgcctggatcccctgagaaacagccaggatcgccaagcccgccatctatcccagaaaccggccagggcgtaactaagggagaaggcggaacacctgcccctgccagcctgcccggaggctctaaagaggaggaagagaaagccaagcgtcttctttattgcgccctttgcaaggtcgccgtaaactccctttctcagctagaggctcacaataaagggaccaaacacaaaacgattctggaagccagatcaggcctcgggcctataaaggcttatccccgtctgggccctccgacccctggcgaacccgaggctccggcacaggatcgaacatttcactgtgagatctgtaatgtgaaagttaattccgaggtacagcttaaacaacacatttctagccgcaggcaccgcgacggtgtggcaggaaaaccaaaccccctgctgtctagacacaagaaatcccgtggggcaggagaactggcgggtacacttacgttcagcaaggagctcccaaagtctcttgcaggcggactgctccctagccctctagccgtcgccgctgtgatggctgcagctgctggcagccccttgtccctgcgtccggcaccagctgccccattgcttcagggacctccaataacacaccccttattacaccccgcaccgggacctataaggactgctcatggaccgattctgttttcgccttactag

SEQ ID NO: 247610 - DNA, 918 bp, synthetic construct
  misc_feature 1..918: note = Description of Artificial Sequence: Synthetic coding sequence
  source 1..918: mol_type = other DNA
atgatacttggcagtctgtctcgcgctggtccgctgcctctgctgcgccagccgccaattatgcagccaccactggatcttaagcagatactaccatttcccctggagcctgcccctactttgggattattctcaaactatagtaccatggaccctgttcagaaagctgtgctgtcacacacgttcgggggacccctcctaaaaaccaagcgccctgtgatttcttgtaatatctgtcaaataagattcaatagccagtcccaagccgaagcccactacaaaggcaacagacacgccagacgggtgaaaggtatcgaggccgcaaaaacccgcggacgcgagcccggagtgcgcgaacctggagaccccgcacctcccggaagtacgcctaccaacggagacggagttgccccaagacccggtacaaaacacaagactattcttgaggctcggtcgggcctgggtccaatcaaggcctatcctcgtttgggaccgcctaccccaggcgagcccgaggccccagctcaggaccgtaccttccactgtgagatctgcaatgtgaaggttaactctgaggtgcaattgaagcagcatattagctctagacgacaccgcgacggtgttgcagggaagcccaaccccctactaagcagacacaagaagtcccgtggcgctggggaactcgccggaactctgactttctctaaggaattgcccaaatcccttgccggtggcctgctgccaagccccctggcggtggctgctgtgatggcagcagctgcgggaagtcctctgtcactgcgcccagcccctgccgcacccttgctgcaggggccaccaattacacaccctctgctgcaccccgctcccggacccatcagaaccgcccatggccctattctgttctccccctactag

SEQ ID NO: 247611 - DNA, 1101 bp, synthetic construct
  misc_feature 1..1101: note = Description of Artificial Sequence: Synthetic coding sequence
  source 1..1101: mol_type = other DNA
atgcagcctcctttggacctgaagcagatcctgccctttcccctggagcccgctcccaccttgggtctgttttccaattactccacaatggacccagtccaaaaggctgtcctgtcacacacattcggaggaccgctgctgaagaccaaacggcctgtaatcagttgcaacatctgccagattcggttcaatagccagtctcaggctgaggctcactacaagggcaaccggcacgccaggcgggtgaaggggatcgaagcagcaaagacgcgtggcagggagccgggtgtgcgagaacccggagatcccgcaccgccaggatccaccccaactaatggggatggcgtggctccaagaccagtgagcatggagaatgggctaggcccagcacctggcagccctgaaaagcaacctggatccccctctcctccgtcaatccctgaaactggtcagggcgtgaccaaaggcgaagggggaactccggcaccagccagtctgcccggaggaagcaaggaagaagaagagaaggccaagagactgctgtattgtgcactctgtaaggtagccgttaattcactctcccaacttgaggctcacaataaagggactaaacacaagacgatcctagaggcacgctctgggttaggacctatcaaggcctatcccaggctgggccctcccactccaggagagcccgaagcccctgcccaggatcgtactttccactgtgagatttgtaacgttaaagtgaatagcgaagttcaactgaagcagcacatcagcagccgtcgccatagagacggagtggccggaaagccaaatccactgctcagcagacacaagaagagcagaggtgcaggtgaacttgccggaacactgactttcagcaaggaactccccaagtcacttgctggtggattgctcccttcccccctggccgtggcggcagtaatggccgcagccgctggctctcccctgtccctacgacctgccccagctgcaccactgcttcagggaccgccaatcacacatcctctgctgcaccctgcaccgggtccaatcagaactgcccacgggcctatcctattctcgccttattag

SEQ ID NO: 247612 - DNA, 699 bp, synthetic construct
  misc_feature 1..699: note = Description of Artificial Sequence: Synthetic coding sequence
  source 1..699: mol_type = other DNA
atgcaacctcctttagacctgaaacaaatcctccccttcccgctggaacctgcgccaactcttggcctgttttcgaactatagcacaatggaccctgtgcagaaagccgtcttgtcgcacaccttcgggggtccactactgaaaacgaagcggcctgtgatatcatgcaacatatgtcagatcagattcaattcgcaatcgcaggcggaagcacactataaaggcaacagacatgctcgccgagtgaagggaatcgaggcagcgaagactagaggacgggagcctggcgtgagggagcccggtgatcctgcgccacccggatccactcctactaatggggacggagttgctccacgacccgtcagcatggagaacggattaggcccagcacctggctcccctgagaaacagcctgggagtcccagccctccctccattccggagacaggtcagggcgtgactaagggggaagggggaacacctgcccctgctagtctgcctgggggttccaaagaagaggaggagaaagcaaagcgcctgctgtactgcgcactgtgtaaggttgccgttaactctctgagccagttagaggcccataataaagggacaaagcacaagacgatcctcgaggcacgctctggcctaggtcctattaaggcatacccgagactgggaccccctacgccgggagagccgtag

SEQ ID NO: 247613 - DNA, 1101 bp, synthetic construct
  misc_feature 1..1101: note = Description of Artificial Sequence: Synthetic coding sequence
  source 1..1101: mol_type = other DNA
atgcagcctccactggacctgaagcagattcttcctttcccactggaaccagctcccacccttggtctgtttagcaattactctaccatggacccagtgcagaaagccgtgctgagccacacattcggaggaccactgctgaagacaaaaaggcctgtgattagctgcaacatctgccaaattcggttcaactctcaaagtcaagccgaggcccactataagggcaacagacacgccagaagggtcaagggcatcgaagcggcaaagacacgtgggcgtgagccgggtgtgagagagcctggcgaccccgctcctcccggatcaacccctactaatggcgacggtgtcgcccctaggccagtcagcatggaaaacggactggggccagcccctgggtcgccagagaagcagcctggctcacctagcccacctagtatcccagagaccggtcaaggagtgactaagggggaagggggtaccccagccccagcaagcctgccagggggatcgaaggaggaggaagagaaggcaaaaaggctgctgtactgcgcactgtgtaaggttgccgtgaatagcttgtcccaactggaggcgcataataaggggacaaagcacaaaaccatcctagaggccagaagcgggcttgggccaatcaaagcctaccctcgcctggggcctccaacaccaggagaaccagaggcacctgcccaggaccggacttttcactgtgaaatctgcaatgttaaggtgaactcagaagtccaacttaaacaacatatctccagcagacggcaccgtgacggggttgcaggcaagccaaaccccttgcttagcaggcacaagaagagtcgcggagctggggaactagccggtactcttactttcagcaaagagctgccaaagagtctggctgggggtcttctgcccagcccactagcagtcgctgcagttatggcagctgccgcaggatcaccattgtctctgcgccctgcccctgccgctccactgctccaaggacctcccatcacccatcccctcctgcatccagcgccaggcccaattaggactgcccacggccctatcctgttctccccctactag

SEQ ID NO: 247614 - DNA, 498 bp, synthetic construct
  misc_feature 1..498: note = Description of Artificial Sequence: Synthetic coding sequence
  source 1..498: mol_type = other DNA
atgcagcctccgctcgatctgaaacaaatcctgcctttccctcttgagcccgctcctactctcggcctcttctccaattattcaacaatggatcctgtgcaaaaggcagtcttgtcacacactttcggcggtcctctgctgaagaccaagaggcctgtgatcagctgtaatatttgccagattaggttcaactcccaatcgcaggccgaagcccattacaagggcaatcgccacgccaggcgagttaaaggtatagaggctgccaaaacacggggaagagagcccggtgtccgcgagccgggtgatcccgcacctcccggaagtacccccaccaatggcgatggagtggctcccaggcctgtcagtatggagaatggccttgggcctgcccctggcagtccagaaaaacagcctggatctccctctcctccctccatccccgagactggccagggggtgacaaagggcgagggcggtaccccggctcctgccagctag

SEQ ID NO: 247615 - DNA, 438 bp, synthetic construct
  misc_feature 1..438: note = Description of Artificial Sequence: Synthetic coding sequence
  source 1..438: mol_type = other DNA
atgcagcctccgttggacctgaagcaaatcctgccttttcctctggagcccgcaccaacactaggtctgttcagcaactactctaccatggacccagtgcagaaggccgttctgtcccatactttcggcggacccttgttgaaaacaaaacgtcccgttattagttgcaacatttgccaaatacggttcaacagccaatcacaagctgaagctcattacaaaggaaaccgacacgctagaagagtgaagggcatagaggctgcaaagaccagggggcgtgagcccggagttcgagaaccaggcgatccggctcctcctggcagcactccgactaatggcgacggtgtcgctccaagacctgtaagcatggaaaatggattgggacccgcacccggaagtccagagaaacagcccggtagcccatctccaccttcctag

SEQ ID NO: 247616 - DNA, 1101 bp, synthetic construct
  misc_feature 1..1101: note = Description of Artificial Sequence: Synthetic coding sequence
  source 1..1101: mol_type = other DNA
atgcaacccccactcgatctcaagcagattctgccattcccactggagccagcacccacattagggctcttttctaactactccactatggatccagtgcagaaagcggttttgagtcataccttcggcggtccactgcttaagacaaagagacccgtgatctcatgcaatatctgtcagattcgatttaacagccagtcacaagccgaggctcattataaggggaaccgccatgctcgcagggtcaaggggattgaggccgctaagacgagggggagggaacccggagtgagagaaccgggagaccctgcccctcccggtagcacacctacaaacggggatggggtagccccacggcctgtgagtatggaaaatggcctgggcccagcccctggatcgcctgagaaacagcccggaagccctagcccgccatccatccccgaaaccggacagggcgtcacgaagggcgaaggcggaacccccgctcctgctagtctgccaggcggttcaaaggaggaggaggaaaaggcaaagcgactactttactgcgcactgtgcaaagttgcagttaactctctcagccagctggaggcccacaacaaaggaaccaagcataagaccatattagaggccaggtctggtctggggccaattaaagcttaccctcgtcttggccctcctactcccggtgagccagaggcgcctgcccaggaccgcaccttccattgtgagatctgcaacgttaaagttaatagcgaggtgcagctgaagcagcatatctctagccggaggcatcgtgacggggtcgccggaaaacctaacccgcttctgtcgagacataaaaaatctcggggtgccggagaactcgccggtaccttgaccttttcaaaggaactcccaaagagtctggctgggggattactgcccagccccttggctgtcgcagccgttatggctgcagcagctggaagtcccctgtctttgcggcctgcaccagcagcaccactgctgcaggggccaccaattacccaccctctcttgcatccagcccctgggccaatcagaaccgctcacggaccaatccttttcagcccttactag

SEQ ID NO: 247617 - DNA, 858 bp, synthetic construct
  misc_feature 1..858: note = Description of Artificial Sequence: Synthetic coding sequence
  source 1..858: mol_type = other DNA
atgcagccaccgctagaccttaagcagatactgccttttccacttgagcctgcgcctacactgggattgtttagtaactactcgaccatggaccctgtgcagaaagctgtcctgagccatactttcggaggtcctctactcaagacaaagcgacccgtgataagttgcaatatttgtcaaattaggtttaatagccagagccaggccgaagcccactacaaagggaatcgccacgcacggagagtgaagggcattgaagctgccaaaaccagaggcagagaaccgggagtcagggagccaggcgacccagccccaccagggagtacccccacgaatggagatggtgtggccccaagacccggaaccaaacataaaaccatcctggaagcgagatctggcctgggcccaatcaaagcgtacccccgtctggggccaccaacaccaggggaacctgaagctccagctcaggaccgaacatttcactgcgagatctgcaacgtgaaagtgaacagtgaagttcagttgaagcagcacatatctagcaggcgtcatcgggacggtgtcgccggaaaaccaaatccattgcttagtcgccataagaaaagtagaggcgctggcgaactcgcgggtacacttacgttcagtaaagaactgcccaagtccctggctggcggactcctgccttctccgctggctgttgccgcagtgatggcggcagctgcgggatctccactctcactgcgcccagcccctgctgcaccactcttgcaaggtccgcctattacccatcctctgctccaccctgccccagggcctatccggactgcacacgggccaatcctcttcagcccttactag

SEQ ID NO: 247618 - DNA, 1110 bp, synthetic construct
  misc_feature 1..1110: note = Description of Artificial Sequence: Synthetic coding sequence
  source 1..1110: mol_type = other DNA
atgatgcagcccagcctggatataaaaccatttatgtctttcccagtggacagctcctccgccgtggggctgttccctaacttcaatactatggaccccgtgcaaaaagctgttatcaaccatacttttggggtgagtattccacctaaaaaaaagcaggtcatctcatgcaacgtatgtcaacttcggttcaacagtgatagccaagcagaggcccattacaaaggttccaaacacgccaaaaaggttaaggccctggacgctactaagaataagcctaagatggtgcctagcaaagattcggctaaggccaatcccagttgcagtataactcccatcactggcaataacagcgacaagtccgaggacaagggaaagttgaaagctagttcatcaagtcagccttccagtagcgaatctggttcattcctgctgaagagtggtactacaccgctccccccaggagcggctacaagccctagcaagtcaacgaatggagcgccaggtaccgtggtggagtcggaggaagagaaggctaaaaaactgctgtactgtagcctatgtaaagtggccgtcaatagtctatctcaactagaggctcacaatactggctcaaaacacaaaacaatggtggaggccaggaatggcgcaggccctataaagtcctaccccagacccggaagtagactcaaaatgcaaaatggaagtaagggctctgggctccagaacaagactttccactgtgagatctgcgacgtgcatgtaaactctgagattcaactgaagcagcatattagcagccgcagacataaagacagggtagccggaaaacctctgaaaccaaaatacagtccgtataataagctgcagagatccccgtctattcttgccgcaaagctggcattccagaaagacatgatgaagcccctcgcacccgcatttctgtcgtcacctttggccgctgcagctgctgtgtccagtgccttatccctgcctccacgcccatcggcctcattattccaggctccggcaatccccccagcgcttcttagacctgggcatggtccaatcagggccactcctgccagcatattattcgccccatactag

SEQ ID NO: 247619 - DNA, 1188 bp, synthetic construct
  misc_feature 1..1188: note = Description of Artificial Sequence: Synthetic coding sequence
  source 1..1188: mol_type = other DNA
atgtggagcggacttccctctcggggttctacttgccacactacaacgcttcccgctttagtacgtaccccaacacttatgatgcagccctcgctggacatcaagccattcatgtcctttcctgttgacagctcttctgccgtcggtttgttccctaatttcaacacaatggacccggtgcagaaagccgtaataaaccacacgttcggggtatcaattccacctaagaagaagcaggtgattagctgtaatgtctgccagctccgcttcaattctgattctcaagctgaagctcattataaaggttcgaagcacgcaaaaaaagttaaggctttggacgcgacaaagaacaagcccaagatggtcccaagtaaggactccgctaaggccaacccatcttgttcaattactccaattaccggcaataattctgataaatccgaggacaagggcaagctcaaggcatcatcaagttctcaaccctcttcaagcgagagcggtagtttcctcctcaagagcggcacaacccccctaccacctggagccgcaacctccccatcaaagtccactaatggcgctcccggaaccgtagtcgagagcgaggaggagaaggcaaaaaagctcttatattgctcactctgcaaagtcgcagtcaattcgctctcccagttggaggcccacaacactggcagcaagcacaagacaatggtggaagccagaaatggtgccggaccgataaagtcttaccctcgccctgggtctagattgaagatgcagaacggatccaaaggctctgggcttcagaacaagacctttcactgcgagatctgcgacgtgcacgttaactctgagattcagctgaaacagcacatttccagccggcgtcacaaggaccgcgttgcaggtaagcccctcaagccaaagtactccccctataataaactgcaaaggagcccctcaatccttgctgccaaactcgccttccagaaggacatgatgaaaccactggcccctgcctttctttccagtccgttagcagcagctgccgcagtgagttctgctctgagtctgccccctagaccttcagcctcgctgtttcaggctccagctattccacctgcactcttgagaccaggacacggccctatcagagcaacccctgcatcaatcctattcgcaccttattag

SEQ ID NO: 247620 - DNA, 1110 bp, synthetic construct
  misc_feature 1..1110: note = Description of Artificial Sequence: Synthetic coding sequence
  source 1..1110: mol_type = other DNA
atgatgcagccttcactggatatcaagccgtttatgtcgtttcccgtagactcctccagtgccgtcggcctatttccgaattttaacaccatggatccagtgcagaaggccgtgattaaccatacttttggtgtttctataccaccgaaaaagaagcaggtcatcagttgtaatgtgtgccagttgcgttttaattctgacagtcaagccgaggcccattataaaggcagcaaacacgccaagaaggtcaaggctcttgacgctaccaagaataagcccaaaatggttccttcaaaggactccgcaaaggccaaccctagctgtagtatcaccccgatcacgggcaacaacagtgacaagagcgaggacaaggggaagctcaaagccagcagttccagtcaaccatcttctagtgagagtggtagcttcctgttgaagtccgggaccaccccccttccgcctggggctgctacctccccttctaaatcaaccaatggggctcccggaactgtcgtggaatccgaggaagagaaggcaaaaaagctgctttactgttctctttgtaaggtggctgtgaattctctgtcacaattagaagcacacaatactggttcaaaacataagacaatggttgaagcacggaatggcgctggcccaatcaagtcttatccacggccaggcagcaggctcaagatgcagaacggcagtaaggggagcggactgcaaaacaaaacattccattgcgaaatctgtgatgtgcacgtcaattctgagattcagttgaaacagcacattagctctaggcgacacaaggatagagtggccggtaagcccttgaaacctaaatacagcccgtataacaaactccaaaggagccccagtattctggccgcaaaactggcatttcagaaggatatgatgaaaccactcgctccagcgttcctctctagcccacttgctgccgcagcagccgtgagcagcgccctgagcttgcctcctagaccatctgccagcctcttccaggccccagcaatcccacctgcgctgcttcggccaggacacggtcctataagagcgaccccagcttcgatcctctttgcaccgtactag

SEQ ID NO: 247621 - DNA, 1416 bp, synthetic construct
  misc_feature 1..1416: note = Description of Artificial Sequence: Synthetic coding sequence
  source 1..1416: mol_type = other DNA
atgaacatggccaacttcctgcgtgggtttgaagaaaaaggaataaaaaacgatagaccggaggatcagctctctaaggagaaaaaaaagattctcttctcgttttgtgaagtgtgtaacattcaacttaacagcgcagcccaggcccaagtgcattccaatggcaaaagccatcggaagagagtgaagcagcttagcgacggacaacctccccctcccgctcaggcgtctccctccagcaacagtagcacaggttcaacctgccacaccacaacacttcccgcattggtgcgcactccaactctaatgatgcaaccttccttggatataaagccgttcatgtcctttcccgtggatagtagcagtgcggtagggctgtttcccaatttcaatactatggatccagtgcagaaagctgttatcaatcataccttcggtgtgtccattcctcccaagaaaaagcaggtaatcagctgcaatgtatgccagttaaggtttaacagtgattcccaggcagaggcccactataaaggaagtaagcatgccaagaaggtgaaggctcttgacgccaccaaaaataagcctaaaatggtgccatctaaagactccgccaaggccaaccctagttgcagcatcactccaattacagggaataactccgataaatccgaagacaaggggaaactcaaggcctccagttcctctcaacccagctcctccgaatccggatcatttctactcaaaagtggtactactcctttacctccgggtgctgctacctctccatctaagtccaccaacggagcccctggcacagtcgtcgaaagcgaggaggagaaagcaaagaaattgctatactgcagtctctgcaaagttgctgttaacagcctctcacagctggaagcgcacaatacaggctccaagcacaagaccatggtagaagctcgaaacggggctgggccaataaagagctaccctcgccctggcagtagacttaagatgcagaatgggagtaagggatccggcttacagaacaaaacgtttcactgtgagatttgcgatgtacacgtcaacagtgaaattcagctcaagcagcatataagttctcgtcgtcacaaggacagggtcgccggaaaacccctgaagcctaagtattcaccatacaacaaactccagcgctcaccctctattttggccgcaaagctggccttccaaaaggatatgatgaagccgctcgcccctgctttcctgagcagcccgttggccgctgcagctgccgtgtcttcagcgctgtctctgccacctcgaccatcagctagtcttttccaggcccctgctataccacctgccctgcttcggccagggcacgggcctataagagctactccggctagtattctcttcgcgccatattag

SEQ ID NO: 247622 - DNA, 96 bp, synthetic construct
  misc_feature 1..96: note = Description of Artificial Sequence: Synthetic coding sequence
  source 1..96: mol_type = other DNA
atgaatatggctaattttctccggggtttcgaagaaaagggtattaagaatgatagacccgaggaccaactgtcgaaagagaaaaagaagatatag

SEQ ID NO: 247623 - DNA, 417 bp, synthetic construct
  misc_feature 1..417: note = Description of Artificial Sequence: Synthetic coding sequence
  source 1..417: mol_type = other DNA
atgcttggtagtacctgtcatacgacaacacttcctgccctcgtgaggacccctacattaatgatgcaaccatctctcgatatcaaaccattcatgagtttcccagtagacagcagcagcgcggttggtcttttccctaactttaatactaagaggagggggctgttcgaaacgaataaattttgccaaatggatccagttcaaaaggccgtgataaatcatacttttggggtgtcgatcccgcctaagaagaagcaggttattagttgcaacgtgtgccagcttcgatttaattctgacagtcaggccgaggcccactataagggtagcaagcatgctaaaaaggtaaaggcgttggacgcaaccaaaaacaaacccaaaatggtgccaagcaaagactctgctaaggccaactag

SEQ ID NO: 247624 - DNA, 228 bp, synthetic construct
  misc_feature 1..228: note = Description of Artificial Sequence: Synthetic coding sequence
  source 1..228: mol_type = other DNA
atgaacatggccaactttctaagggggttcgaagaaaaggggatcaagaacgacagacccgaggaccagctgtccaaagaaaaaaagaaaatcctgttttccttttgtgaggtgtgcaacattcagctgaactcagcagctcaagcacaggtgcattctaacggcaaaagccataggaagcgggtcaagcagctgtccgatggccagccaccaccaccggctcagtag

SEQ ID NO: 247625 - DNA, 792 bp, synthetic construct
  misc_feature 1..792: note = Description of Artificial Sequence: Synthetic coding sequence
  source 1..792: mol_type = other DNA
atgatgcaaccatcactggacataaaaccattcatgagctttccagttgattctagcagcgccgtcggtttattcccgaatttcaataccatggaccctgtgcagaaggctgtcataaaccatacattcggagtgtccattccacccaagaagaaacaagtgatctcatgtaacgtgtgtcagctgcgtttcaactcagattcccaggcagaggcccattataaggggtcgaagcatgccaaaaaggtgaaagcccttgatgccacaaaaaacaagccaaaaatggtcccatctaaggatagcgctaaggccaaccctagttgctctataactcctatcacgggcaacaattcagacaaaagcgaggacaaagggaagctgaaggccagtagttcctcacagccctccagctctgagagtggatcttttttgttgaagagcggcacaacaccgctgccacccggtgcggctacttctccatctaagtccaccaatggtgccccaggcacggttgtagaatctgaagaggaaaaagccaagaagctgctttactgcagcttgtgcaaagtcgccgtgaattctttgtcacagttagaggctcacaataccggctctaagcacaagaccatggtggaagctcggaatggcgcagggcctatcaaaagctaccctcgacccggatcaagactgaaaatgcaaaacgggagtaaaggctcggggctgcagaataagaccttccactgcgaaatctgtgacgtgcacgttaattcagagattcagttgaagcaatag

SEQ ID NO: 247626 - DNA, 1002 bp, synthetic construct
  misc_feature 1..1002: note = Description of Artificial Sequence: Synthetic coding sequence
  source 1..1002: mol_type = other DNA
atgtcggccaaactaggcaagagcagcagcttactaacccagaccagcgaagagtgcaatggaatacttacagagaagatggaggaggaggagcaaacctgtgaccccgattcatctctccactggtcttcctcatattcaccagaaaccttccgacagcaattcaggcagttcggttatcaggattctcccggaccacacgaagccctgtcccggttgtgggagttatgtcacctgtggttacggcctgaggtgcacaccaaggagcagatcctggagcttcttgtgctcgagcagtttctggctatactacccaaagagctgcaagcgtgggttcagaagcaccatccagagaatggcgaagaaacagtgacaatgctggaggacgtggagagggaattggacggccctaaacagatcttctttggcaggcgaaaggatatgattgcggaaaagcttgcccctagcgagataactgaggagttgccaagtagccagctgatgccagtgaaaaagcagctacaaggggcttcttgggaattgcagtcgctacgcccacatgatgaggatatcaaaaccaccaacgttaaaagcgcttcccggcaaaaaaccagcttgggcattgagctccattgtaatgtgagtaacattctgcatatgaacgggagccaaagctcaacatatcggggaacctacgaacaagatggcagattcgagaagcggcaaggcaacccttcatggaaaaaacagcaaaaatgtgacgagtgtggaaaaatattttcccagtcttctgcactgatcctgcaccagagaatacattctggtaagaagccatacgcttgtgatgagtgcgccaaggccttttccagatccgcaatattgatacagcatagacggactcacacggactccaaatatgagcatgctatagctgaagctcagaagaatatgtactttaagacaaggctgaaatgtcctcgtagtttgtccgggggtcggtag

SEQ ID NO: 247627 - DNA, 1008 bp, synthetic construct
  misc_feature 1..1008: note = Description of Artificial Sequence: Synthetic coding sequence
  source 1..1008: mol_type = other DNA
atgtccgcgaagctaggcaagtcttcatctctgcttacccagacaagtgaggaatgcaatgggatattgacagagaaaatggaggaagaggaacagacatgtgatccggatagcagcctgcactggagctcttcctacagccccgaaacctttcgccaacagtttcgccagtttggctaccaggatagtcccggtccacacgaagcactttcacggctttgggaactgtgccatctgtggctaaggcccgaagtgcataccaaggaacagatcctggagctgctggttctggagcagtttctcgctatcctgcccaaagagttgcaggcatgggtccagaagcatcatccagagaacggagaggagaccgttaccatgttagaagacgttgagagggaactggacgggcctaaacagatcttcttcggcagacggaaggacatgatcgccgaaaaactggcaccttcagagattaccgaggaactcccttcttcccaactgatgcctgtgaagaagcagttgcaaggagctagctgggaacttcagtcactacgccctcatgatgaagatattaagacaaccaatgtaaagagtgcaagccggcaaaagacttcgttaggaatcgagctccactgtaacgtcagcaacatcctgcatatgaatgggagtcagtcctctacataccgcggtacttatgaacaggatgggaggttcgaaaaacgccaaggcaacccaagttggaagaaacagcagaaatgcgatgagtgtggtaagattttcagccagagctccgccttgatcctccaccagaggatccactctggcaaaaaaccatatgcgtgcgacgaatgtgcgaaggctttcagccggtccgcaattcttattcaacaccgtcggactcatactggcgagaaaccatataagtgccatgattgtggcaaagcctttagccagtcatcaaatctgttccggcatcggaagcggcacatccgcaagaaagttccctag

SEQ ID NO: 247628 - DNA, 828 bp, synthetic construct
  misc_feature 1..828: note = Description of Artificial Sequence: Synthetic coding sequence
  source 1..828: mol_type = other DNA
atggcggttgaatccggcgtaatttccaccctgatcccgcaagaccccccagagcaggagcttattcttgtaaaagtcgaggataacttcagttgggatgagaagttcaagcagaatggttccacccagtcttgtcaggaacttttccggcagcagttcaggaagttttgttaccaggagacaccgggtccccgagaggcgctatctcgactccaggagctctgctaccaatggctcatgcctgagctgcacacaaaagaacaaatattagaactgctggttctggagcagttcctcagtatccttccagaagaattgcagatttgggtgcagcagcataacccggaaagcggcgaggaagctgtaactctgctggaagatcttgagcgggaattcgatgatcccggacagcaggtgccagccagccctcagggacctgcggttccctggaaagaccttacgtgtttgcgcgcaagtcaggaatctaccgacattcacctgcagcctctgaagacgcagctcaaatcttggaagccttgcttatccccaaagtccgactgtgagaatagtgagacagccactaaggagggtatctccgaggagaaaagtcagggcttgccccaggagcccagtttccgaggaataaaacttagcaggccaccgaaagcttcatctgccattcgctgggaatgcgtaagcccgggttcctttcctggagacatcattgcagcggaagccacacattcaaccatctcctgctttgcaattaacacactgcccgcaaccatactccccagcaagaacgtcaataggaagtactttagctag

SEQ ID NO: 247629 - DNA, 1605 bp, synthetic construct
  misc_feature 1..1605: note = Description of Artificial Sequence: Synthetic coding sequence
  source 1..1605: mol_type = other DNA
atggctgttgagagtggggtgatatcaacactcattccacaggatcccccagagcaggagcttattctagtgaaagtcgaggacaacttctcctgggacgagaaattcaagcagaacgggtccacgcagtcatgccaggaactgttccgtcagcagttccggaagttttgttatcaagagacgccagggcctcgggaggcactctcacgactgcaagaactctgttaccaatggttgatgcctgaattacatacgaaggagcagatcctcgaactgctggtgttagaacagtttctgagtatcctcccagaggaactccaaatctgggtgcaacaacacaatcctgaatcaggtgaagaggccgttacactgctggaggacctggaacgtgagtttgatgatcccggtcagcaagttccggcatctcctcaagggccagcagttccttggaaggatctcacatgccttagggcctcccaggagtccaccgatatacaccttcagccgctgaagacccagttaaagtcttggaagccttgtctatctcctaaatccgactgtgagaacagcgagacagctaccaaagagggcatttcggaagaaaagagtcagggactgcctcaggagccatcctttaggggaatttcagagcacgaatccaatctagtctggaaacaggggtcagccaccggggagaagctgcgctcccctagtcaaggaggatcatttagccaggttattttcactaataagtccctggggaaacgcgacctgtacgacgaggccgagcgatgcctgatcctcactaccgattctatcatgtgtcagaaggtcccgcctgaagagaggccctataggtgtgacgtttgtggacatagttttaagcagcattcgagtttgacccagcatcagcggatccacaccggggagaaaccatataaatgtaaccagtgcggaaaagctttttcactacgcagttacctcatcattcaccagcggatccacagtggcgagaaggcttatgagtgctccgagtgcggaaaagctttcaaccaatcttctgcccttattagacacagaaagatacacaccggagagaaggcctgcaagtgtaacgaatgcgggaaagctttttcgcagtcctcttatctgattatccaccagcgaattcacacaggtgagaagccgtacgagtgcaacgagtgtggcaagacattctctcaaagcagtaagctgatcaggcatcagcgaatacatacaggcgagaggccttatgagtgtaatgagtgtggtaaggcctttcggcagtcttccgaattgatcacacaccagaggatccactccggtgaaaagccatatgaatgctcagagtgtggtaaagcttttagcctcagctccaatttgattaggcatcaacgaatccactcgggggaagaaccctaccagtgcaatgaatgcggaaaaacattcaagcgttcctcagctctggtacagcaccagcggattcatagcggggatgaggcttatatatgcaacgaatgtggaaaggcatttaggcaccggtccgtgttgatgcgccatcagcgagttcacacgataaaatag

SEQ ID NO: 247630 - DNA, 738 bp, synthetic construct
  misc_feature 1..738: note = Description of Artificial Sequence: Synthetic coding sequence
  source 1..738: mol_type = other DNA
atggccgttgagagcggtgtgatctctactctgataccacaggatccaccggaacaggagttaatcttagttaaggtggaggataatttttcctgggacgaaaagttcaagcagaatggatccactcagagttgccaggagctctttagacaacagtttcgcaagttctgttaccaggaaacccccggaccaagggaggccctctctcggctgcaggaactttgctaccagtggcttatgcccgagcttcacaccaaggagcagattctagaactgttagtgcttgaacaattcctgtcaatcttgcccgaagagctccagatctgggttcagcaacacaaccccgagtcgggcgaagaggctgtaacactcctggaagatctggaaagagagttcgacgaccctggacagcaggtgcccgcatcaccacagggacccgctgtgccttggaaggacctgacttgcttgagggcaagccaggaatccaccgacattcatctgcaacccttaaaaacccaactgaagtcttggaaaccttgcctctccccaaaatctgagctgagcaggccacccaaggcatcctctgcaatccgatgggagtgcgtcagcccgggatcctttccaggggatatcatcgcagcagaggcgacacactcaactatcagttgcttcgctattaacactctaccagctaccatccttccttcaaaaaacgtcaatcgcaagtatttttcctag

SEQ ID NO: 247631 - DNA, 2340 bp, synthetic construct
  misc_feature 1..2340: note = Description of Artificial Sequence: Synthetic coding sequence
  source 1..2340: mol_type = other DNA
atggctgccaacggagattcccctccgtggtcgcctgctcttgctgccgaagggaggggctccagttgtgaggctagcgtgtccttcgaagatgtgaccgtggacttctctaaggaggagtggcagcatctggacccagctcagagacgtctgtactgggacgtgacgctggaaaactacagccacctgctctcggtcggatatcagattcctaaatccgaggcagctttcaagctggagcaaggtgaggggccatggatgctcgaaggggaagccccacatcagagctgcagcggggaagccatcggcaagatgcagcagcaggggataccaggcggaatttttttccactgtgagcgcttcgatcaacccattggcgaagactcactctgcagtatcctcgaagaactttggcaggataacgaccagcttgagcagcgacaagagaatcagaataatcttctgagccatgtgaaagttctgataaaggaacgcggatatgagcataaaaatatcgagaagattatccacgtcaccacgaagctggttccttccataaagcgcctgcataactgtgatacaatattaaagcacacattaaattcccacaaccacaatcgcaattctgccacgaaaaatctgggtaaaatatttggtaacgggaataatttcccacactctccatcttcaacaaagaacgagaacgcaaagacaggggcaaatagttgtgagcatgaccactatgagaaacacctgtcacataaacaggcccctacccaccatcagaagatccatcctgaggaaaaactgtacgtgtgcacagaatgcgtcatggggtttactcagaaaagccacctgttcgagcaccagcggatacatgcaggggaaaagtcccgcgaatgtgataagagcaataaggtgtttcctcagaagcctcaggtagatgtgcatcccagcgtgtacacaggggagaaaccctatctgtgtacacagtgtggcaaggtgttcacactgaagtcaaacctcatcactcaccaaaaaattcatacagggcagaaaccatacaagtgttcagaatgtggcaaagccttctttcaacgctccgatctgttccgacatttacgcatccacacaggcgagaaaccttacgaatgctctgagtgcgggaagggcttctctcagaattctgatcttagcatacatcaaaagactcacactggcgagaagcactacgaatgcaatgagtgcgggaaagcatttacacgaaagtcagcccttaggatgcatcagaggattcacacaggcgaaaagccttatgtgtgtgcggattgcgggaaggccttcatccagaaatcccacttcaacactcaccagcggatacatacgggagagaagccttacgagtgttctgattgcggaaagagttttacgaaaaagtcccagttgcacgtgcatcagcgcattcacacgggggaaaaaccctacatctgtacggagtgtggaaaagtctttacccatagaacaaacctcacgacccatcagaagacacatacaggtgagaaaccctacatgtgcgctgagtgcggtaaggcattcactgaccagtcaaacctgatcaaacatcagaaaacacacaccggagagaaaccatacaagtgtaatgggtgcggcaaggccttcatatggaagagtcggctgaagatccaccagaaatctcatattggggaaaggcactatgaatgcaaggactgtgggaaagcatttattcagaaatcgacactctccgttcatcaaaggattcacacaggggagaaaccttatgtatgccctgagtgcggaaaggctttcatccagaaaagtcacttcatcgcccaccatagaattcacaccggagagaaaccatatgagtgctcagactgcggtaaatgcttcactaagaagtctcagctgcgtgtccatcagaagatccatactggagagaagccgaatatttgtgcagaatgtggcaaggctttcactgataggagtaacctgattacccaccagaagatccatacgcgtgaaaagccttacgagtgcggtgactgcggtaaaacgtttacctggaagtcccggctcaacatccaccagaagtctcacacgggcgagagacactatgagtgctccaaatgcggcaaagcgtttattcaaaaagccactcttagtatgcaccagataatccatacaggcaagaaaccatacgcatgcacagagtgtcagaaggccttcacagaccggtctaacctaatcaaacaccagaagatgcactctggcgaaaagagatacaaggctagtgattag

SEQ ID NO: 247632 - DNA, 2340 bp, synthetic construct
  misc_feature 1..2340: note = Description of Artificial Sequence: Synthetic coding sequence
  source 1..2340: mol_type = other DNA
atggctgctaatggcgacagcccgccttggagtccggcactggctgccgagggacgaggcagcagctgcgaggcatccgtatcattcgaagatgtcactgtagacttttctaaggaggaatggcaacatcttgatcccgctcagcggcgattatactgggacgtgacactggagaactactcacacctgctgagtgtgggctatcagatccctaagtctgaggccgctttcaaactagaacaaggcgagggaccctggatgctcgagggggaagctccccatcagtcctgtagtggtgaggccataggtaagatgcagcagcagggtatccccggtggaatcttcttccactgcgagcgatttgaccagcccattggcgaggacagcctgtgttctatcttggaggagctctggcaagataatgatcagctggaacagcggcaagagaaccagaataatcttctatcacatgtaaaggtgctcatcaaagagaggggatacgaacacaagaacattgagaagattattcacgtgactactaagttggtgccttcaattaagcgtctccacaactgcgacacgatcctgaaacacaccctgaacagtcataaccataaccgaaatagcgccacgaaaaaccttggcaagattttcggcaacggaaacaacttcccccactcgccgagctcaacaaagaacgagaatgccaagactggcgcaaattcttgcgagcacgatcactacgagaagcacttgtcccacaagcaagcccctactcatcaccagaaaattcacccagaagagaaactgtatgtatgcaccgaatgtgtcatgggcttcactcagaaatcccacctgttcgaacatcagagaatacatgccggtgagaagagccgcgagtgcgataagtctaacaaagtttttcctcaaaaacctcaggtggatgtgcaccctagcgtgtataccggagagaaaccttacctgtgcactcagtgcggaaaagtttttacactgaagtctaacctgataactcatcagaaaattcatactggacagaagccctataagtgtagtgaatgtgggaaagctttctttcagcgatccgatctttttagacacttgcgcatccatactggcgagaagccctatgagtgctccgagtgtggcaagggatttagtcagaacagcgatctttctatccaccaaaaaacccacacaggcgaaaagcactacgaatgtaatgaatgcggcaaggcattcacgcgcaaatctgccctgcgaatgcaccaaagaattcacaccggtgaaaaaccttatgtctgtgccgattgcggcaaggccttcatacagaagtcacactttaacacccatcagaggattcacaccggcgagaaaccttatgagtgcagcgattgtggcaaaagtttcacaaaaaagtctcagctgcatgtccatcaaagaatccacaccggcgaaaagccctatatttgcaccgagtgtggaaaagtctttactcacaggaccaatttaaccacacaccaaaaaacacatactggtgagaagccctatatgtgtgccgagtgcggtaaggcatttacggatcaatctaacctgatcaagcaccagaaaacccataccggcgaaaagccttataagtgcaacggttgcgggaaagcatttatatggaaaagtagacttaagatccatcagaagtcccacatcggcgagaggcactatgagtgcaaggattgcggaaaggccttcatacagaagtctactctgtccgtgcaccagcgcattcataccggtgagaagccctatgtttgtcccgagtgcggaaaagccttcatccagaagagccactttattgcgcaccacagaatccataccggggaaaaaccttacgagtgttcagactgtggaaaatgctttacaaagaaaagccagctgagggtgcatcagaagatccataccggagaaaaacccaatatctgcgccgagtgcggcaaggcttttaccgaccgctcaaacctcatcacacaccagaagattcacactagagaaaaaccttatgagtgtggagactgcggtaagacgttcacgtggaaaagtcggctcaatattcaccagaagagccacaccggcgaaaggcactacgaatgtagtaagtgtgggaaagccttcatccaaaaagccacactgtctatgcatcagatcatccacacaggcaaaaagccctatgcgtgtaccgagtgccagaaagccttcactgatagaagcaatttgatcaagcaccaaaagatgcacagcggcgagaagaggtacaaagcgtctgactag

SEQ ID NO: 247633 - DNA, 2370 bp, synthetic construct
  misc_feature 1..2370: note = Description of Artificial Sequence: Synthetic coding sequence
  source 1..2370: mol_type = other DNA
atgggcacgctgccccatgggccaagaccatggttgcagcgcgatgtggcggctcacgtctctgccgaccatgctgcgctgaactcgattgtatctctgcaggctagcgtgtcgtttgaagacgtgaccgtggacttttctaaggaagagtggcagcatcttgacccagcccaacgccgattgtattgggacgttacgctggaaaattactcacaccttctgagcgttggctaccagattcccaagtcggaggccgcttttaaacttgagcagggagagggcccatggatgcttgaaggggaagcaccccatcaatcgtgctctggcgaagcgatcggcaagatgcagcagcagggaatccccggaggaatcttcttccattgcgagagattcgatcagccaattggagaggatagtctgtgctcaattctcgaggagttgtggcaggataacgaccagctggaacagcgccaggagaaccagaacaatctcttgagccatgtgaaggtgttaataaaggagagaggttatgagcacaaaaatattgagaagattattcatgttaccacgaagcttgtgccttcaatcaagagactgcataactgcgatacaatcctgaagcatacactaaacagtcataatcacaatcgcaactcagccaccaagaacctgggcaagatattcggcaatggcaacaatttcccccactcaccttcatctaccaagaacgaaaacgctaagaccggtgctaattcctgtgagcatgatcactacgagaagcacctgagtcataagcaagccccaacccatcatcagaagatccatccggaagaaaaactctacgtgtgtaccgaatgtgtaatgggctttacgcagaaatcgcacctgttcgagcatcagcggatccacgccggagagaagtcacgtgaatgtgataagagcaataaagtgttcccgcaaaagccccaggtggatgtccacccaagcgtgtatactggcgagaagccttatctctgtactcaatgcggcaaagtattcactctgaaatccaatctcataacccatcagaaaatacacacagggcaaaagccatacaagtgctcagagtgtggcaaggcattcttccaaagatctgatctgttccgccatctccggattcatacgggtgagaaaccgtacgagtgttctgaatgtgggaagggattctctcaaaatagtgatcttagcattcatcagaaaacgcatactggtgaaaagcattacgagtgcaatgagtgcggcaaggcctttactcggaaatccgcgttgagaatgcaccagagaatccataccggcgagaagccatacgtgtgtgcagattgcggaaaggctttcattcaaaaatcccatttcaatacacaccagaggatccacactggtgagaaaccgtatgaatgctcggactgtggtaaatcattcacaaaaaaatctcaacttcacgttcaccaacgtatccatacaggcgagaagccatacatctgtactgaatgtggtaaagtgttcacacataggactaacctcactactcatcaaaaaacccatacaggagagaaaccttacatgtgcgcagagtgtggtaaggcgtttacggatcaatcaaatttaatcaaacaccagaaaactcacaccggagagaagccttataaatgtaatggttgcggtaaagcatttatctggaagagccgccttaagattcaccagaagtcacacattggcgaacgtcactacgaatgcaaggactgcggcaaggcctttattcaaaaaagcaccctttcagtacatcagaggatccatactggagaaaaaccatatgtctgcccagaatgcggaaaggcgtttatccagaagagccactttattgcccatcaccgcatccacaccggggagaaaccttatgagtgcagtgactgcggaaagtgcttcacaaaaaaatcacagctcagagtgcatcagaagatccatacaggtgagaagccgaacatatgtgcagagtgcggcaaggcgtttacggataggagcaatttgatcactcatcagaagatccacacccgcgaaaaaccctacgaatgtggtgactgtggcaagactttcacatggaagtcaaggttaaacatccaccaaaaaagtcacaccggggaaagacattacgaatgctctaagtgcggtaaggcctttattcagaaggccacccttagcatgcatcagattattcacaccgggaaaaaaccttatgcctgcacagagtgccagaaggcattcactgatcgcagcaacctgataaaacaccaaaagatgcactccggagaaaagcgctacaaagcttccgactag

SEQ ID NO: 247634 - DNA, 537 bp, synthetic construct
  misc_feature 1..537: note = Description of Artificial Sequence: Synthetic coding sequence
  source 1..537: mol_type = other DNA
atggggactttgccacacggacccagaccttggctgcagcgcgacgtggcagcccatgtcagcgcagaccacgcagccctcaactctatcgtctcacttcaggcttccgtgtcattcgaggatgtgaccgtcgacttcagtaaagaggaatggcagcacctggatccagctcagcggcgactgtattgggatgttactctcgagaattactcacatctccttagtgtcggctaccagatcccgaagtctgaggccgcattcaagctcgaacagggagaaggaccatggatgctagagggcgaggcgccacatcagtcttgttccggggaggctattggtaaaatgcagcagcaggggatcccaggcggaatttttttccattgcgagcggttcgatcagcctatcggagaggatagcctgtgctctatcctcgaagaactgtggcaggataacgatcagctcgaacagagacaagagaaccagaacaacttgttgagccacgtgaaggtgctgataaaggagcgtgggtacgagtag

SEQ ID NO: 247635 - DNA, 3855 bp, synthetic construct
  misc_feature 1..3855: note = Description of Artificial Sequence: Synthetic coding sequence
  source 1..3855: mol_type = other DNA
atgcacaagaaacgcgtggaagagggcgaagccagcgatttctctctggcgtgggacagctcagtgactgctgccggtggcctggagggggaacctgagtgcgaccagaaaacatctcgcgctctcgaggatcgcaactcagtgacgagccaggaggagaggaatgaggacgatgaggacatggaagacgaatctatttatacttgtgaccactgccaacaggatttcgagtccctggctgatctgaccgaccacagagcccaccgctgtcctggtgacggggacgatgacccccaattatcctgggtggctagctccccctcttccaaggatgtggcctctcccacccaaatgattggtgatggctgcgatctcggtctgggcgaggaggaaggcggaacaggactgccctatccctgccagttctgcgacaagtcttttatccgcttgtcttacctaaagaggcatgagcaaatccattccgacaaactgccgttcaaatgcacctactgctccagactcttcaagcataagaggtcaagagaccgtcacattaaattacatactggcgacaaaaagtaccactgccatgaatgcgaagcagccttttcccggagcgatcatcttaaaatccatctcaagacccattccagttctaagccctttaaatgtactgtctgcaagagaggattctcttcaacatctagcttgcagagccatatgcaggctcataagaaaaacaaggaacacctggccaaatccgaaaaggaggcaaagaaagacgactttatgtgcgactattgcgaagataccttcagtcagacagaagagttggagaaacatgttctgactcggcatccccagttgtccgagaaggccgacctgcaatgcattcattgccctgaagtgtttgtggacgaaaatacccttctggcacacatccaccaggctcatgcaaaccagaagcataagtgtccaatgtgtccggagcaattcagctcagtggaaggcgtgtattgtcacctagattcccaccgacagcccgactcctccaaccatagcgtcagccccgaccctgtgctcggatcggtcgcatcaatgtcttcagccacacctgactcctcagcatcggtcgaacgcggatccaccccagacagtactttgaaacccctgcgtggtcaaaagaaaatgcgcgacgacggccagggttggaccaaggttgtgtacagctgcccctattgctctaagcgcgactttaatagtttagctgtgcttgagatccacttgaagactatccacgcagacaaaccccaacagagtcatacctgccagatctgtctggatagtatgcctacactctacaacctgaatgaacacgtcaggaaactgcataaaaaccatgcgtatcctgttatgcagttcggcaacattagcgcttttcactgcaattactgtccggagatgttcgccgatatcaacagcctgcaggagcacatcagagtgtcccactgcggtcccaacgctaatcccagcgatgggaacaatgcatttttctgcaaccagtgctcgatgggcttcttgacagagtcttcactaaccgaacatatacaacaggcccattgtagtgttggcagcgccaagttagagtctccagttgtgcagcccacacaaagcttcatggaggtgtatagctgcccctactgtaccaatagccctattttcggcagcatcctcaagctcaccaagcacataaaggaaaatcacaaaaatatacctctcgcccacagcaaaaagagcaaagctgagcagtcccccgtatcctccgatgtcgaagtgagctctcccaaacgccagagactgtcagcctcggccaattctatctcaaacggtgagtatccatgcaaccagtgtgacctcaaattttctaactttgagagcttccagacacaccttaaattgcatttagagttgctgctgcggaaacaggcatgcccacagtgcaaggaagacttcgactcccaggaatcactactccagcatcttacagttcactacatgactacttccacacattatgtctgtgaaagctgtgacaaacagttttcctcagtcgacgatttgcagaaacatttgctggatatgcatacctttgtcttgtatcattgtaccttgtgccaagaagtattcgactccaaagtttctatccaggttcatttggcagtgaagcatagcaacgagaagaaaatgtatagatgcaccgcttgtaactgggactttcggaaagaggcggacctgcaagtgcacgtgaaacactcacacctaggcaatccggcaaaggcacataagtgtatattttgtggtgagacattttctaccgaagtggagttacagtgccatatcacaacacattccaaaaagtataactgtaagttttgcagcaaggcatttcacgcaattattcttctggaaaagcatctccgggagaagcactgcgtgtttgacgccgctaccgagaatggaactgccaacggtgttccccctatggctactaagaaagccgagccagcagacctgcaggggatgctgctgaagaatccggaggctccaaatagtcacgaagcttctgaggatgatgtggatgccagcgagcccatgtacgggtgtgacatctgtggggctgcgtatacaatggaagttctcttgcaaaaccaccggctcagagaccacaacattcgtcccggtgaggatgacggctctcggaaaaaggccgaatttataaagggcagtcataagtgcaacgtgtgtagtagaacctttttttctgagaatgggttaagagagcacctgcaaacacacagaggtcccgctaagcactacatgtgcccaatctgtggggagcggttcccttcccttctcaccttgactgaacacaaggtgactcattcaaaaagccttgacaccggaacctgtagaatatgcaagatgccccttcaaagcgaagaagagtttatagaacattgccaaatgcatccagacctacggaattccctaaccggttttaggtgtgttgtctgcatgcaaacagtcacctctacactggagctgaagattcacgggacattccacatgcagaagctggctggcagttccgcagcctcttcaccaaacggccaggggttacaaaagctatacaagtgcgcactgtgtctcaaagagtttcgatccaagcaggatcttgtgaagctagatgtgaacgggctgccatatggcctctgtgctgggtgcatggcgcgtagcgccaacggacaggtggggggtctagcccctccagagcccgctgatcggccttgtgcaggacttaggtgccctgaatgctccgtgaaatttgagtctgcggaagatctggagtcgcatatgcaggtggaccaccgggacctgacaccagagaccagcgggccaaggaaaggaacacagactagtccagttcctcggaagaaaacctaccagtgcatcaaatgccagatgacgtttgaaaacgagcgggagatccagatacatgtcgccaatcacatgatcgaggagggtataaaccacgaatgcaagctctgcaaccagatgttcgactctcccgcaaagctgctgtgccaccttatcgagcactcctttgagggcatggggggtacttttaagtgtccagtgtgttttaccgtgtttgtgcaggccaataaactgcagcagcacatcttcgctgtgcatggtcaggaggacaagatttacgactgctcccaatgcccccagaaatttttcttccaaactgagttacaaaaccacaccatgagccagcatgcacagtag

SEQ ID NO: 247636 - DNA, 3504 bp, synthetic construct
  misc_feature 1..3504: note = Description of Artificial Sequence: Synthetic coding sequence
  source 1..3504: mol_type = other DNA
atgatcggcgacgggtgcgacctcgggctcggcgaagaggagggcggtaccgggttgccatacccttgtcagttctgcgacaagagcttcattcgacttagctatctgaaaaggcacgagcaaattcacagtgacaagctaccgtttaagtgtacgtactgcagccggctcttcaagcataaaagaagccgcgaccgccacataaaactgcacactggggacaagaaataccattgtcatgagtgtgaggcagcattctcaagatctgaccaccttaagatacacttaaaaacccattctagctccaagccctttaagtgtactgtttgcaaacggggtttcagtagcacaagcagcctacagtcacatatgcaggcgcacaagaagaacaaagagcatctggccaaatctgaaaaggaggccaagaaggatgactttatgtgcgattactgtgaggacacattttctcaaactgaggagttggagaagcacgtcctgacacgacacccccaattgtctgaaaaggctgatcttcagtgcatccactgccctgaagtgttcgtggacgaaaatactctcttggcacacattcaccaggctcatgcaaaccagaagcacaagtgcccgatgtgtcccgaacagttctctagcgttgagggtgtgtattgtcatctagattctcaccgccaacctgattccagcaaccactccgtgagccccgacccggtcttagggtccgtcgcctcaatgagttcagcaacgccagactctagtgcctcagtcgaaagaggttcaacaccagacagcaccttgaagccactgagggggcaaaaaaagatgcgtgacgatggtcagggctggactaaagtcgtgtattcatgtccgtactgttctaagcgggactttaacagcttggccgtccttgagattcacctgaagactattcacgcagataagcctcagcagtctcacacctgtcagatctgcctagacagtatgccaaccctctacaacctcaatgaacacgttcgaaagctccacaaaaaccatgcctatcccgtgatgcagtttggcaacattagcgcattccattgtaattactgccctgaaatgtttgccgatattaactctctccaggaacatatcagggtctcgcattgcgggccaaacgcgaatccatctgatgggaataatgccttcttctgtaaccaatgctccatggggtttctaacagagagttctctcacggaacacattcagcaggcccattgtagcgtgggctctgctaagttagaaagccccgtggtccagcctacgcaatcatttatggaagtatatagctgtccctactgtaccaattccccaatttttggctccatactgaagctgacaaaacacatcaaagaaaatcacaagaacattcccttggcccactcaaagaaatccaaggccgagcagagtccagtctcttccgacgtggaggtgagttcccctaagagacaaagactctcagcaagtgcaaactccatatccaacggggagtatccatgtaaccagtgcgatctgaagttcagtaacttcgaaagcttccagacccatctcaaactacacctggagctactgctgcgaaagcaggcatgtccccagtgcaaggaggacttcgactcccaggagagcctgctgcagcatctgaccgtgcactacatgacaactagcactcactatgtgtgcgaatcttgtgacaagcagttcagcagcgtggatgacctccaaaagcatctcttagatatgcataccttcgtgctgtatcactgcactctctgtcaagaagtgtttgacagcaaagtaagtatccaggtgcacttggccgtgaaacacagcaatgagaaaaagatgtaccgctgtacagcctgcaattgggactttcgtaaggaggctgatctgcaggtgcacgtgaagcactctcaccttggaaatcccgcaaaggcccacaagtgcattttctgcggcgaaaccttctctacagaagtcgagctccaatgtcacatcacaacacattcaaagaagtataactgcaaattctgttccaaagcctttcatgccattattctgctggaaaaacacctacgggagaaacactgcgtgtttgatgcggcaacggaaaatggcactgctaatggagtgccgccaatggcaaccaagaaggcagagcccgcagaccttcagggaatgctgctgaaaaaccccgaggccccaaatagtcatgaggcatctgaagacgatgtagacgcctcggagccaatgtacggctgtgacatctgtggcgctgcctatactatggaggtcttgttgcaaaatcatcgactgcgagatcataacattcgcccaggagaagacgacggatctagaaagaaggccgaattcatcaaaggtagtcataagtgcaatgtttgttccagaacgttcttttcggaaaacggactgcgggaacatctacagacacaccggggtcccgcaaagcattacatgtgcccaatatgcggggaacgctttcctagtctgctgacgctgaccgagcataaggttacacattccaagtcccttgacaccggcacttgtcggatctgtaagatgcccctgcagagcgaggaagaattcatcgagcactgtcagatgcatcctgacctcagaaactctctgactggcttcagatgtgtcgtgtgcatgcagacggttacatcaacattggagctcaagatacatgggacattccacatgcagaaattggcagggagctccgccgcttcctccccaaacgggcagggtcttcagaagctttacaagtgtgctctttgcctcaaggagtttaggtcgaagcaggacttggtgaagctagacgtcaacggactgccctatggtctttgcgctgggtgtatggcaaggagtgcgaacgggcaggtgggcggtctggcaccacccgagccggcagaccggccatgcgccggtctgaggtgcccggaatgttccgtcaagttcgaaagtgccgaggacctcgaatcccacatgcaggtcgaccatagagatttaacgcctgagacgtccggccctcgcaaaggtacccaaacctcccccgtacctaggaaaaagacttatcaatgtattaaatgtcagatgacctttgagaatgagcgggaaattcagattcatgtggcgaaccacatgatagaggaaggaataaaccatgaatgtaagctgtgtaatcagatgttcgacagtcccgcaaaattgttgtgtcatctcatcgaacattcctttgaaggcatgggtggcaccttcaaatgtccggtgtgcttcactgtgtttgtccaagcgaacaagttacagcagcacatcttcgctgtacatggacaggaagacaaaatatacgattgtagccagtgtccccagaagttcttcttccaaaccgaactgcagaaccataccatgagccagcacgctcagtag

SEQ ID NO: 247637 - DNA, 3855 bp, synthetic construct
  misc_feature 1..3855: note = Description of Artificial Sequence: Synthetic coding sequence
  source 1..3855: mol_type = other DNA
atgcataagaaaagggtggaggaaggcgaggcctctgacttttctttggcttgggattcctccgttaccgccgcagggggtctggagggcgagccggaatgcgatcagaagacatctcgagccctggaggataggaacagcgtgacctcccaagaggagcggaatgaggacgatgaggatatggaagacgagtctatttatacatgcgaccattgccaacaggactttgagagcctggcagacttgaccgaccatcgcgctcatcgctgcccgggtgacggagatgatgacccccagctaagttgggtcgcttcctcccctagctctaaggatgtggccagccccacacagatgattggagatggctgcgatctgggtctgggagaggaagaaggagggaccgggctaccctacccttgccagttttgtgacaaaagttttatcagattatcctacctgaagcgacacgagcagatccactccgacaaactcccctttaagtgtacctactgcagcagactgttcaagcacaaaaggtccagagataggcacatcaagttgcacacgggggacaagaagtaccattgtcacgagtgtgaggccgcattcagcaggagcgaccacctgaaaatacaccttaaaacacactcctcctcgaagccttttaagtgcaccgtgtgcaagcggggtttttcaagcactagctccttacagtcccatatgcaagcacataagaagaacaaggaacacttggcgaagagtgagaaagaggctaagaaagacgactttatgtgcgactactgcgaggacacattttcacagacagaagagctcgagaagcacgtccttacaagacacccccaactttctgaaaaggccgatctgcagtgtattcattgccctgaggtattcgtggacgaaaacaccttgctggctcatatccaccaggcacatgcaaaccagaaacacaaatgcccgatgtgtcccgaacagttcagctcagtcgaaggcgtctactgccaccttgatagccataggcaaccggatagcagtaaccattctgtgtcccctgaccccgttcttgggtcagtcgccagcatgagttctgctacacctgactcgtctgccagcgttgaacggggatctacgccggattccactttaaagcctctcagaggccaaaaaaaaatgagagatgatggtcagggctggaccaaggtagtctactcctgcccttactgcagcaaacgggatttcaattcactggcagtgctggaaatccacctgaagaccatccatgctgataagccccagcagagccacacctgtcagatctgcctggactccatgccaacactgtataatcttaatgaacatgtgcgcaagttacacaagaatcacgcgtatcctgtgatgcagttcggcaatatttctgcattccattgtaactattgtcctgagatgttcgctgatataaactccttgcaggaacacatccgtgtctctcactgcgggcctaatgcaaacccttcagacggtaataatgcttttttctgcaaccagtgttccatgggatttctgacagaatcatcccttaccgagcatatccaacaggctcactgttcggtagggtccgccaagttagaatcgcctgtggtgcagcctacacagtcgtttatggaggtgtattcatgtccgtactgcacaaactctcccatttttgggtccatcctgaaacttacgaaacacattaaggaaaatcacaaaaatattccccttgctcactctaagaagagcaaagcagaacagtcaccagtgtcaagtgacgtcgaagtgtctagcccaaagagacaacggttaagtgcttctgctaactccatctccaatggcgaatacccttgcaatcaatgcgacctcaagttctcgaatttcgagtctttccaaacacaccttaaactgcacctcgaacttctgttgcgcaagcaggcctgccctcaatgtaaggaggactttgacagccaagagagcctcctgcagcatctgactgtgcattacatgaccaccagcacccactatgtctgtgagagttgtgataagcagttctctagcgtagacgacctgcagaagcacttgctggatatgcacaccttcgttctgtaccattgcaccctgtgtcaggaggtgttcgattccaaggttagtatccaggtgcacctcgcggtgaaacactctaacgaaaagaagatgtacaggtgcacagcatgcaattgggacttcagaaaggaagccgacctgcaagtgcacgtgaagcattcacacctggggaaccccgctaaagcccacaagtgcatattttgcggagagactttcagtactgaggtcgagctgcagtgtcacatcaccacacattcgaagaaatacaattgcaaattttgtagtaaggcattccatgccatcattctgctagaaaaacatttacgtgagaaacattgcgtgtttgatgccgctaccgaaaacggaacggcaaacggagtgccacccatggccacaaaaaaagccgaacctgccgatctgcagggcatgctcctgaagaacccagaggcaccaaactcccacgaggcatccgaggacgacgtagatgcatcagaaccaatgtacgggtgtgacatctgtggggctgcgtacacaatggaagtgctcctccagaatcatcgcctgcgggatcacaacattcggcctggggaggatgacggctccaggaagaaggccgagttcataaagggctcccacaagtgcaacgtctgcagccggacttttttctcggagaacggcctgcgcgaacacctgcaaacccatcggggtccagccaagcactacatgtgtccgatttgtggtgaaaggtttcctagtctgttgacgttgaccgaacacaaggtcacacactcaaagagccttgacacagggacctgccggatatgcaaaatgcccctccaatccgaggaggaattcatcgaacactgccagatgcatccagacttaaggaactccttgaccggcttcaggtgcgttgtttgcatgcagaccgtcacgtctactctagaactgaagattcatggaacattccacatgcagaaactggctggaagttcagcggcatccagtccaaacggccagggtctgcagaagctctacaagtgcgccttgtgcttgaaagaattcagaagtaagcaagatctggtaaagctggacgtcaatgggcttccttatggcctgtgcgctggctgcatggccaggtccgccaatgggcaggtgggagggctggcccctcctgagcctgcagatcgaccttgcgccggactgcgctgtccagagtgctctgttaagttcgagagcgcagaagacctggaatcccacatgcaggtggaccaccgggatctgactcctgaaacgtctggacctcgcaaaggcacacagacgtccccagtgcctcgcaagaaaacatatcaatgtatcaagtgccagatgacctttgagaatgagagggaaatacaaatccacgtcgccaatcacatgatcgaagagggcattaatcacgagtgcaagctctgcaaccagatgtttgacagcccagctaagctattatgtcacctgatcgaacacagttttgaaggcatgggagggacattcaagtgcccagtgtgtttcacagtcttcgtccaggccaacaaactgcagcagcacatcttcgcagtgcatggccaagaagacaagatttatgactgttctcagtgccctcaaaaattctttttccagactgagctacagaaccacacaatgagccagcacgctcagtag

SEQ ID NO: 247638 - DNA, 2430 bp, synthetic construct
  misc_feature 1..2430: note = Description of Artificial Sequence: Synthetic coding sequence
  source 1..2430: mol_type = other DNA
atgggccctctcacgttcatggatgtggccatcgaattttgcctggaagaatggcagtgtctggatatcgcccagcaaaacctctaccggaacgtgatgttggaaaattaccggaaccttgtctttctgggaatcgcagtaagcaagcctgatctgattacatgcctggagcaggagaaagaaccttgggagcctatgagaagacatgagatggtggcaaagcctcctgttatgtgtagccactttacgcaggacttctggcccgagcagcatatcaaagacccattccagaaggcaactctcagaagatataaaaattgtgagcataaaaatgttcatttgaagaaggatcacaaatcagtagatgaatgcaaggtccaccgcggaggctataacgggtttaaccagtgcctgcctgcgacccagtcaaagatcttcctgttcgacaagtgtgtcaaagctttccacaaattctcgaattccaatcgtcacaaaattagccatactgagaagaaattgttcaagtgcaaagaatgtggaaagagtttttgcatgttaccccacctggcgcagcataaaatcatccacactcgagtgaacttttgtaagtgtgaaaaatgcgggaaagcatttaactgtccttccattattacgaagcataagcggatcaatacaggtgagaaaccctacacctgtgaagagtgcggcaaggtgtttaattggtcttctagactgactacccataagaagaattatacgcgctacaaattgtacaaatgcgaggagtgtggtaaagcctttaataaaagctctatcctgacaactcacaagatcatacgtacgggggaaaagttctacaagtgcaaagaatgcgcgaaggcatttaaccagagctctaatctgacagagcataagaaaatacatcccggagagaaaccgtacaagtgcgaggaatgtggtaaggcctttaattggccgagtaccctcactaaacataaacggatacacacaggagaaaaaccatatacctgtgaggaatgtgggaaggccttcaaccagtttagcaatttgacgacccacaaacgaatccataccgccgagaagttctataaatgcaccgagtgcggagaagctttttcacggagctccaacttaaccaagcacaagaagatccacacagagaagaaaccgtacaagtgcgaggagtgcgggaaagcttttaagtggagctcaaaattgactgagcacaaactgacacacaccggtgagaagccttacaagtgcgaggaatgcgggaaagctttcaactggcccagcacccttaccaaacacaatcggatccatacgggcgagaagccatacaagtgcgaagtatgcggaaaagcatttaaccagttctccaacctcaccacacataagagaattcacaccgccgagaaaccttataagtgcgaggaatgcggcaaggccttttcacgaagttccaacttgactaaacataaaaagatccacattgaaaagaagccatataaatgtgaggagtgtggtaaagccttcaaatggtcatctaaactcactgaacacaaaatcacccataccggggagaagccatacaaatgcgaggaatgcggaaaagcttttaatcacttcagcatcctgacgaagcataagagaatccatactggagaaaagccctacaaatgtgaggagtgtggcaaggccttcacacagtccagcaacctgaccacccacaagaagatccataccggtgagaagttctacaagtgtgaggaatgtggcaaagcatttacccagtctagcaacctgacaacacacaagaagatacacactggtgggaaaccttacaagtgtgaagaatgcgggaaagctttcaatcagttctcgactctgacaaagcacaagattattcacaccgaagagaagccttacaagtgcgaagaatgcggaaaagccttcaagtggtccagtactttgaccaaacataagatcattcataccggcgagaaaccatataagtgtgaggaatgtggcaaggctttcaaactgagcagcaccctcagtactcataaaattattcatactggggaaaagccatacaagtgcgagaagtgcgggaaagcgtttaaccgttcatccaacttgatcgaacacaagaaaatacatactggggaacagccttataagtgtgaagaatgcggcaaagctttcaattactcttctcacctcaacacgcacaagcggattcataccaaagaacaaccctacaagtgtaaggagtgtggtaaggcgtttaatcaatactcaaatctcacgacccacaacaagatccacaccggcgagaagctatacaagccagaagacgtcaccgtcatcctcacaacaccccagacgttcagcaatatcaaatag

SEQ ID NO: 247639 - DNA, 2427 bp, synthetic construct
  misc_feature 1..2427: note = Description of Artificial Sequence: Synthetic coding sequence
  source 1..2427: mol_type = other DNA
ggacctctgacgtttatggacgtggctattgaattctgccttgaggaatggcagtgtctggatattgcacagcagaacctttaccgcaacgtgatgctagaaaattaccgtaatctcgtgtttctgggtattgccgttagcaagcctgacctcataacctgtctggaacaggaaaaggagccatgggaaccaatgcgcagacatgaaatggtcgctaagccacctgtcatgtgcagccacttcactcaggacttctggccagagcagcatattaaggatccttttcagaaagccaccttacgcagatacaagaactgcgaacataaaaacgtacacctcaaaaaagatcacaagtccgtggacgagtgtaaggttcacagagggggatacaacgggttcaatcagtgcttaccagccactcagagcaagatcttcttattcgacaagtgtgtgaaggcgtttcacaagttctctaactccaaccgacacaaaatctcccacactgagaagaaattgttcaaatgcaaggagtgcgggaaatccttttgtatgctaccacacctcgcccagcataaaattatccacaccagggtcaacttttgcaaatgcgagaagtgcgggaaagcctttaattgccccagcatcatcacaaaacataagaggattaacaccggcgaaaagccatacacatgcgaggaatgtgggaaggtgttcaattggtcctcgcgcctaacgactcacaagaaaaactatacaaggtacaagctctacaagtgtgaggagtgtggcaaagcatttaataaatcctcaattctcactacgcacaaaattatacgtaccggggaaaagttttataagtgtaaagagtgcgcaaaagcgttcaatcagtcttcaaatctgacagagcataagaagatccaccctggcgaaaagccttataagtgtgaagaatgcggaaaggcctttaactggccgtctactctcacaaagcacaagcgcatacacactggcgagaaaccgtacacttgtgaggaatgtgggaaggctttcaaccagttcagtaacctaaccacccataaacgaatccacacagccgagaagttttacaaatgtacggagtgcggtgaagccttctcccggtcatcgaacttaacaaaacacaagaagatccacacggaaaaaaagccttacaagtgcgaggagtgcggtaaggccttcaagtggtccagtaagcttacagaacataaactgactcatacgggcgaaaaaccctataagtgcgaggagtgcgggaaggccttcaactggccatctacactgaccaagcacaacaggatccatactggggagaagccatataaatgtgaggtgtgtggcaaagccttcaaccagttttccaatttaaccacacacaagcgaatccatactgccgagaaaccctacaaatgcgaggagtgtggcaaggccttctctcggtccagcaacctaacaaagcataagaaaattcatattgagaaaaagccttataaatgtgaggaatgcggcaaagcgttcaagtggtcctcaaaactgactgaacataaaattacccatacgggcgaaaagccctacaaatgcgaggagtgcggtaaagctttcaaccacttcagcatattaaccaagcataaacgcattcatacaggagaaaaaccttacaaatgtgaggagtgcggcaaggcattcacccagagcagtaacttgacaacccacaagaaaatccacaccggcgaaaagttttacaagtgtgaggaatgcggcaaggctttcacccagtcctctaatctcaccacgcataagaaaattcacaccggaggcaaaccttacaagtgtgaggagtgcggcaaagctttcaaccagtttagcactctaaccaaacacaagatcattcataccgaagagaagccatacaagtgtgaggagtgcggaaaggcctttaaatggagctctacactgaccaagcacaagataatccacaccggcgagaagccatacaaatgcgaagagtgtggtaaggccttcaagctgagctctaccctgtctacccacaagatcattcacacgggtgaaaaaccctacaagtgtgagaaatgcggaaaagcctttaacagaagctctaatctcattgaacacaagaagatccacaccggagaacagccatataaatgcgaggagtgcggtaaggccttcaactactcctcccatttaaatacccacaagcgcattcatactaaggagcagccttataagtgtaaggagtgcggcaaggcctttaaccagtactcaaacttgacgactcataataaaattcacactggagaaaagctgtacaaacccgaagatgtgaccgtgattcttaccacgcctcagactttttccaacatcaagtag

SEQ ID NO: 247640 - DNA, 2412 bp, synthetic construct
  misc_feature 1..2412: note = Description of Artificial Sequence: Synthetic coding sequence
  source 1..2412: mol_type = other DNA
atggatgtggcgatagaattctgtctggaagagtggcagtgcctcgatattgcccaacagaacctgtatcgcaatgtcatgctcgagaattacagaaacttggtctttctgggtatcgcggtttccaaacccgacctgattacctgcctggaacaagaaaaggagccatgggagcctatgaggaggcatgaaatggtcgccaagccacctgtcatgtgcagccatttcactcaagatttttggcctgagcaacatatcaaagatccctttcagaaggctactcttcgtagatacaagaattgtgaacataagaacgtccatctgaagaaggatcacaaaagtgtggatgagtgtaaggtccacaggggaggatataatggctttaaccagtgtctgccggcaacccagtcgaagatcttcctgttcgacaagtgtgtgaaggcatttcataagtttagcaattccaaccggcataagattagtcacactgagaaaaaactgttcaagtgcaaagagtgcgggaagtcattctgtatgctccctcatcttgcccaacacaagattatccacacccgcgtcaatttctgtaaatgtgagaagtgcgggaaggcttttaattgccccagcatcatcacgaaacacaagcggatcaatactggggagaaaccttatacctgcgaagagtgtggcaaagtcttcaattggagcagtcgacttaccactcataagaagaactacacaagatacaagctgtacaaatgcgaagagtgcggcaaggctttcaacaagtcttctatccttaccacccacaaaatcatccgtaccggagagaaattctataagtgtaaggagtgtgctaaagcttttaatcaaagctcaaatctcactgagcataagaaaattcatccaggcgaaaagccatataaatgcgaagagtgcgggaaagcattcaactggccatcaactctgacgaagcataaacgcattcatactggagagaagccgtacacctgtgaagagtgcggtaaagcctttaaccagttttcaaatctgacaactcacaagagaattcatactgccgaaaaattttataagtgtaccgagtgtggcgaggcttttagcagaagctctaacctgacgaagcataagaagattcacaccgaaaagaaaccatacaagtgcgaggagtgcggaaaagcttttaaatggagctccaaactgaccgagcacaagctgacgcacaccggtgagaaaccttacaagtgcgaggaatgcgggaaagctttcaactggcctagtacactgaccaagcataaccgcatacacacaggcgaaaagccctacaaatgcgaggtctgtgggaaggctttcaaccaattctccaaccttaccactcacaagcggatccatacagctgagaagccatacaaatgtgaggaatgcggaaaggccttttcacggtcgtccaacctgactaagcacaagaagattcatatcgaaaaaaagccctacaagtgtgaggagtgcgggaaggctttcaaatggtcgagcaagctgactgagcacaagattacccatacaggcgagaagccttacaagtgcgaggagtgtgggaaagcgtttaaccattttagtatcttgacaaaacacaagcggattcatactggagaaaagccatacaaatgtgaagagtgcggaaaagccttcacgcagtcgtccaatctgactacccacaaaaaaatccatacgggagagaaattctacaagtgcgaagagtgcggtaaggccttcacacagtcatccaatcttacaacacacaaaaagatccatactgggggaaaaccttataaatgcgaagagtgtggtaaggcattcaatcagttttcgaccttgaccaaacacaagataattcacactgaggagaagccctacaagtgtgaggaatgcgggaaggcctttaagtggagcagtacactgaccaagcataagataatccacaccggggaaaagccatacaagtgcgaggaatgcggaaaggcgtttaagctgtcatctacgctcagtacgcacaagatcattcatacaggggaaaagccctataaatgcgaaaaatgtggcaaggcttttaatcgcagcagtaatcttattgagcacaaaaaaatccatactggcgagcagccctataaatgcgaagagtgtggcaaagcatttaactactctagccatctgaacacccataagcgtatccatacaaaggagcagccttacaaatgcaaggagtgcggcaaggccttcaaccagtacagtaacctcacaacacacaacaagattcataccggggaaaagctatacaaacccgaggatgtaactgtgatactaaccacgccccaaactttcagtaacatcaaatag

SEQ ID NO: 247641 - DNA, 1713 bp, synthetic construct
  misc_feature 1..1713: note = Description of Artificial Sequence: Synthetic coding sequence
  source 1..1713: mol_type = other DNA
atggaaaacttgaagtccggtgtgtatccgctaaaggaagcctccgggtgtcctggagccgatcggaatttgctggtctacagtttttacgaaaaaggcccactgacctttagagacgtggctatagagttcagcctggaagagtggcaatgtctagacaccgcccagcaggacctctatcgcaaagtgatgcttgaaaactacaggaatttggtgttcctggctggcattgccgtgagcaagccggatctgatcacatgcctcgaacaggggaaagaaccatggaatatgaagcggcatgcaatggtggatcagccccctgtcacctactctcattttgcccaagatttatggccagagcaaggaatcaaagactcttttcaggaagtgattctgcggagatacgggaagtgtggccatgaggatcttcaactgcgcacgggctgtaaatccgtcgacgagtgcaacctccataaagagtgttatgacgagctgaaccaatgcctaaccactacacaatcggaaatcttccaatacgataaatacgtgaacgttttttacaagttctccaaccctaacatccagaaaataaggcatacagggaagaagccttttaagtgcaaaaagtgtgacaagagcttttgtatgctgttgcatctcacacagcataagcgcatccacatccgagagaacagctatcaatgtgaggaatgcggtaaggttttcaattggttctctaccctgactcgtcatagaagaattcacactggcgagaagccttacaagtgcgaacagtgcggaaaagcattcaagcagtctagtacactgaccacacacaagattatacacacaggtgagaagccatatcggtgtgaagaatgcggaaagaccttcaatcgaagctctcatcttactacacataagcggattcacactggggaaaagccctatcgctgcgaagagtgcggaagggcctttaaccgcagctcacacctcaccacacataagatcatacatacaggggagaagccctataagtgcgaagaatgtgggaaagctttcaatcaaagcagcacactaaccacccataaaatcattcatgccggagaaaagccttacaagtgcgaggaatgcggaaaggctttctaccggttctcatatctgaccaagcataaaataatacacaccggggaaaaattctacaagtgcgaggagtgcgggaaggggttcaactggagcagcactctaacgaaacataaaagaatccacactggagagaagccctataagtgtgagcagtgtgggaaggctttcaacgagagtagtaacctaaccgcacacaagattattcataccggggaaaaaccttacaagtgcgaagaatgtgggaaagcgttcaatagatctccgaaactgacagcacataaggtcatccatagtggagagaaaccatacaaatgtgaggaatgcgggaaggcttttaatcaattctccaatctcactaaacacaagatcactcacattggcgatactagttataaatatctagaatgcgacaaggcattttctcagagctccaccttaactaagcacaaggtcatacatacaggggaaaagccctacaattgtgaagaatatggcaaggctttcaatcagagttcaaacctcatcgagcagagcaattcttactggagggaaaccctgcagatgtag

SEQ ID NO: 247642 - DNA, 1413 bp, synthetic construct
  misc_feature 1..1413: note = Description of Artificial Sequence: Synthetic coding sequence
  source 1..1413: mol_type = other DNA
atggctgcaacactgcttatggccggaagtcaggcaccagtcacattcgaagacatggcaatgtaccttacccgagaggaatggcggccattagacgctgcccagagggacctatacagggacgtgatgcaagagaactatggaaacgtggtctctctggatttcgagattaggagcgaaaatgaagttaatcctaagcaggagatcagcgaagacgtgcagttcggcaccacctctgagaggccggcagaaaatgctgaagagaatcctgagtcggaggaaggcttcgaatccggcgaccggagtgaaaggcaatggggggatctaactgcagaagaatgggtgtcctatcctttgcaacccgttaccgatctgcttgtacataaagaggtccacaccggcatccgttatcacatatgtagtcattgtggtaaggccttctcccagatcagtgacctcaaccggcatcaaaaaacgcatactggagacagaccttacaagtgctacgaatgcgggaaggggtttagtcgaagcagccacctgattcaacaccagaggactcataccggagaaaggccatacgattgtaacgaatgcggaaagtcattcggaaggtcttcccacctgatccagcaccagaccattcacaccggagagaagcctcacaaatgtaacgagtgcgggaaatcattctgccggctgtcacacctcatacagcatcaacggacacatagtggtgagaagccatatgagtgcgaagagtgtggcaagtccttctcccggtcttcccatcttgctcagcaccagaggacccacacaggcgagaaaccatatgagtgtaacgagtgcggcaggggattctcagaaagatccgatctgattaagcattaccgcgttcacaccggggaacggccttataagtgtgatgaatgcggaaaaaacttttcacagaacagtgacctggttcgccaccggagggcccacacaggggagaaaccctaccattgtaacgagtgcggcgagaatttcagccgcatcagccacctggtacagcatcagcgcacacataccggagagaagccctatgagtgtaacgcctgcggcaagagtttctcgcgatcttcacacctgattacccaccagaagattcacacaggcgaaaaaccttacgaatgcaacgagtgctggcgtagcttcggcgagcgcagcgacctcatcaagcatcagaggacccacaccggcgagaagccctacgaatgcgtgcagtgcggaaaggggtttacccagtcatccaatctcatcacccaccagcgtgtgcatactggagagaagccctacgagtgcacggaatgtgagaaatccttctctcgctcttctgcactgattaaacacaagcgcgtccacacagactag

SEQ ID NO: 247643 - DNA, 1413 bp, synthetic construct
  misc_feature 1..1413: note = Description of Artificial Sequence: Synthetic coding sequence
  source 1..1413: mol_type = other DNA
atggccgctaccctcttaatggcgggtagccaggcgccagtgacattcgaagatatggccatgtacttaaccagggaggaatggagacccctggacgccgcacagcgcgatctgtaccgcgatgtgatgcaagagaattatggaaacgtggtgagccttgactttgaaatccggagtgagaacgaggtcaatccaaagcaggaaatttcggaagacgttcagtttgggactacgtcagagcgccctgccgagaatgcagaggaaaatccagaatccgaagaggggtttgagtctggagataggtctgagcgtcagtggggcgatttaaccgccgaagagtgggtctcgtaccctctccaacctgtgaccgatctgctggtccacaaggaggtacacacaggtatcagatatcacatctgctcccattgcggcaaagccttctctcaaatctctgacctcaacaggcatcagaagacacacacaggtgacaggccatacaaatgttatgagtgcggcaagggatttagccgcagcagtcacctgatccaacatcaacggactcacaccggcgaacgcccttatgactgtaacgaatgcggtaaatcttttggtcgaagcagtcacttaattcagcaccagactatccataccggggagaagccccataaatgcaatgagtgcggcaaatctttttgccgtctttctcacctgattcagcatcaaaggacccatagtggggagaagccctatgagtgcgaagagtgtgggaaaagcttctcccgcagttctcacctcgctcagcaccagcgtacccataccggagagaagccttacgaatgtaacgagtgtgggagaggttttagcgaaaggtctgacttaattaagcactatagggtccacacaggagaaagaccgtacaagtgtgatgagtgcggaaaaaacttttcccagaacagcgatctggtgcggcaccgacgcgctcacacaggggaaaaaccttatcattgcaatgagtgcggcgagaactttagtaggatctcgcacctggtacagcaccagcgcacccataccggcgagaaaccttacgagtgcaacgcgtgcgggaagagctttagccgttcatctcatctgattacccatcagaagattcacaccggagagaaaccttatgagtgtaacgaatgctggaggagtttcggagagaggtctgacctgatcaagcatcagcggacacacacaggggagaaaccgtatgagtgcgtacagtgcggtaagggattcacacagtctagtaatctgatcacccaccagcgcgtccataccggtgagaagccttatgagtgtaccgaatgtgagaagagcttttcccggtcctccgcactaatcaaacacaagcgggttcacacagattag

SEQ ID NO: 247644 - DNA, 909 bp, synthetic construct
  misc_feature 1..909: note = Description of Artificial Sequence: Synthetic coding sequence
  source 1..909: mol_type = other DNA
atggcagccactcttcttatggctggctctcaggctcccgtgacttttgaggacatggccatgtatctgacaagggaggagtggagacccctagacgctgcacagcgggatctgtaccgcgacgtgatgcaggagaattacgggaatgttgtgtctctcgacttcgagattcggtcggaaaacgaggtcaacccaaagcaggagattagtgaagacgtgcagtttggaactacttctgaaagacccgctgaaaacgcagaagagaatcctgagtccgaagaaggtttcgaaagtggagacagatccgagcgtcagtggggggatctgacagccgaagaatgggtgagctaccccctgcagcctgtgacggacctcttggtgcataaggaggtccataccggcatccggtaccatatctgctcccattgcgggaaagccttttctcagattagcgaccttaacagacatcagaagacccataccggtgatcggccttataagtgctacgagtgtggcaagggcttctcaaggtcaagccatctgattcaacaccagcggacccacaccggagaaagaccttacgattgcaacgagtgcggcaagtcatttgggaggtcttctcacttgattcaacatcagactatccataccggcgagaagcctcacaagtgtaatgagtgtgggaagtccttttgccgcctgtcacacttgatccagcatcagcgcacacatagcggggaaaagccgtatgagtgcgaggaatgcggcaagagcttctcgcgctccagccatctcgcccaacatcagcggacacataccggggaaaagccttatgagtgtacggagtgtgaaaagtcattttcgcgatctagcgccctcatcaagcataaacgcgttcatactgactag

SEQ ID NO: 247645 - DNA, 1848 bp, synthetic construct
  misc_feature 1..1848: note = Description of Artificial Sequence: Synthetic coding sequence
  source 1..1848: mol_type = other DNA
atggacagcgtggcattcgaagacgtggctgtgaatttcactcatgaggaatgggccttgcttgggccttcacagaagaatctttatcgcgatgtcatgcgtgagaccatcagaaacctgaactgtattggaatgaagtgggaaaaccagaatatcgatgatcagcatcagaatcttcgaaggaaccctaggtgcgatgtggttgaaaggtttgggaagtcaaaagatggcagccaatgcggggagacactgagtcagattcggaattcaatcgtaaacaaaaacacaccagctcgggtggatgcgtgtggcagctccgttaacggggaggtgataatggggcactcttccctgaactgctatatccgtgttgataccggacataagcatagagagtgccacgaatacgctgagaagtcctatacacataaacaatgcgggaagggcctgtcatacaggcattctttccagacttgcgaaagacctcacactggcaagaagccttatgactgcaaagagtgcggaaagacattctcctctcctggcaacctccgccgacatatggtcgtcaaggggggagacggtccatacaagtgcgagctgtgcggcaaagcgttcttttggcctagcttgttgagaatgcacgaacggactcatacgggggaaaagccttacgagtgcaaacagtgcagtaaagccttcccagtctacagctcttatttgcgccatgagaagattcataccggagagaaaccctatgaatgtaagcagtgctccaaggccttcccggactactcttcctacttgagacatgaacggactcatactggcgagaaaccgtacaagtgtaaacagtgtggaaaagcctttagtgtgagcggatctctgagagtccacgagaggattcacacaggggaaaagccatacacttgcaagcagtgtggcaaggcattctgccacctcggatctttccagcgccacatgattatgcactcaggcgacgggcctcataaatgcaaaatttgtggcaagggcttcgatttcccagggagcgctaggatccatgaaggtacccacacactcgagaaaccgtacgagtgcaaacagtgcggtaagctgttaagtcatagatcgagctttcggcgacatatgatggctcatactggagatggcccacacaagtgcacagtgtgcggcaaagccttcgacagccctagtgtgttccagcgccacgagaggacacacacaggggagaagccctacgaatgcaagcaatgtggaaaagctttcagaactagcagctcactccgtaaacatgagacaacccacacaggagaacagccttacaaatgtaaatgtggcaaggccttctctgatctgttctctttccagagtcacgagacgacccactcggaggaggagccatatgagtgcaaagagtgcgggaaggctttctcatccttcaaatatttctgtagacacgagcgcactcattccgaggagaagagttacgaatgccagatttgtggcaaagcgttctcccgctttagctatctgaaaacccacgagagaacacatactgcggagaagccctacgagtgtaagcaatgccggaaggccttcttctggccttccttcctgctacggcatgagcgaacgcatacaggcgaaaggccctacgagtgcaaacactgtgggaaggccttctctaggtcgtcattttgtagagaacacgagcgcacacatacaggggaaaagccttacgagtgtaaagagtgcgggaaggcattctcctcgctgagctctttcaataggcataagcggacacactggaaagatattctgtag

SEQ ID NO: 247646 - DNA, 1992 bp, synthetic construct
  misc_feature 1..1992: note = Description of Artificial Sequence: Synthetic coding sequence
  source 1..1992: mol_type = other DNA
atggctctctgctacggaaccttttgggggtacccaaaaatgctagaagctgccaacttaatggaaggtctcgtggacatcggaccgtgggtaactcttcctcgaggccagccagaggtgctcgaatggggacttccaaaagatcaggactcggtggccttcgaagacgtggcagtgaactttacccacgaggagtgggctctccttggtccatctcagaaaaatctgtaccgcgatgtgatgcgcgagactattcgcaatcttaactgtattggaatgaagtgggaaaaccagaacatagatgatcagcaccagaacctgcgtcggaatccccgatgcgacgtggtggagcggtttgggaagagcaaggatggctctcagtgcggggaaaccctgtcccagattcggaacagcattgtcaacaagaacaccccagccagagttgacgcctgtggttcctccgtgaacggggaggttattatgggccattcgtctcttaactgttacattcgcgttgatacagggcataaacatcgtgaatgccatgaatacgctgagaaatcatatacccacaagcagtgtggaaaaggcctgtcttacaggcatagctttcagacatgcgaacgtcctcacacaggtaaaaaaccatatgactgcaaggagtgcgggaaaaccttttcatctccgggtaaccttcgtaggcacatggtcgtcaaagggggagatggaccctacaaatgcgaactgtgtggtaaagctttcttctggcccagccttctgagaatgcatgaacgcacccataccggggagaaaccttacgagtgcaaacagtgctccaaggccttcccagtttactctagctatctcagacatgaaaagatccacacgggagagaaaccctacgagtgcaagcagtgtagcaaggcttttcccgattattccagctatctccggcatgaacggacgcacaccggcgaaaaaccctacaagtgcaaacagtgtggaaaagctttctctgtgtctgggtccttaagggtgcatgagaggatccacaccggagagaaaccttacacgtgtaagcagtgtggtaaagctttttgtcacctgggaagttttcaaaggcacatgattatgcattcgggcgatggaccacataaatgtaagatttgcggtaaaggattcgacttccccggtagcgccagaattcatgagggtacgcacacactcgaaaagccctacgagtgtaaacagtgcggcaagcttctttctcaccggagcagctttaggcgacacatgatggcccacacaggggacggcccacataagtgtactgtctgtggtaaagcctttgacagcccttccgtttttcagagacatgaacgcacccacactggggagaagccttatgagtgcaagcagtgcgggaaagcgtttcgtacgagttctagtttaaggaaacacgagactacgcacaccggagaacagccgtacaagtgcaagtgtggtaaagcctttagtgatctgtttagctttcaaagccatgaaacgacacatagcgaagaagagccatatgagtgcaaagaatgtggcaaggctttcagtagtttcaagtacttttgccggcacgaacgcacacactctgaagaaaaatcctatgaatgtcagatttgcgggaaggccttttctcgcttcagttacttgaaaacccatgaacgtacccacacagccgaaaaaccctatgagtgtaagcaatgtaggaaagcgttcttttggccctcatttcttctgcgccatgaaaggacgcacacaggggaacgcccttacgagtgtaaacattgcggaaaggctttctcaaggtcgtctttctgcagggaacacgagagaacgcacactggtgagaagccgtatgaatgtaaagaatgtggaaaggccttcagctccctgagctcgtttaacagacacaaaagaacccattggaaggacattctatag

SEQ ID NO: 247647 - DNA, 1914 bp, synthetic construct
  misc_feature 1..1914: note = Description of Artificial Sequence: Synthetic coding sequence
  source 1..1914: mol_type = other DNA
atggccctttgttacggtactttctggggataccctaaaatgttggaggccgctaatctcatggagggcctggtggacattgggccttgggtcaccctgccgcgaggccagccagaggtactcgagtggggccttcctaaggaccaagacagcgtcgccttcgaggatgtggctgttaattttacccatgaagagtgggcgctgcttggaccatcacagaaaaatctttacagggacgtgatgagggagaccattcgtaatctgaattgtatcgggatgaaatgggaaaaccagaacatcgacgatcaacatcagaatctgcggcgtaacccaaggtgcgacgtcgtagagcgtttcgggaaaagcaaggacggcagccagtgcggagaaaccctgagccagataaggaactcaattgttaacaagaatactccggcaagagttgacgcttgtggtagctccgtgaatggtgaggtgatcatgggacattcttcactgaactgttatattcgcgtggataccgggcacaaacaccgggaatgccacgaatatgctgagaagtcttacacccataaacaatgtgggaagggactgtcgtaccgacactcattccagacatgcgagcgccctcatactggaaaaaagccatacgattgtaaggagtgcggcaagaccttctcgagcccaggcaatttgcgacgccacatggtggtaaagggcggagacggaccctacaagtgtgaactctgcgggaaggcattcttttggccttcactgttgcgtatgcacgaaaggacacacacaggtgaaaagccatatgagtgcaaacagtgcagcaaagcctttcctgtgtatagctcttacctgagacatgagaaaattcacactggggaaaaaccttatgaatgcaaacagtgttccaaggccttccccgactattcttcctatctgcgacatgaacgcacacataccggcgagaaaccctacaaatgcaaacaatgcgggaaagccttctctgtatccggttctttgagagttcatgagagaattcatacgggggagaaaccctacacgtgcaaacaatgcggcaaggctttctgccacctaggttccttccaacgccatatgatcatgcactccggtgacggccctcacaagtgcaagatctgtggtaagggattcgattttcccggaagcgctaggatccacgagggcacccatacgcttgagaaaccatacgagtgtaagcagtgcggaaaacttctgtctcatcgctctagttttcggcgacacatgatggcccatacaggagacgggcctcacaagtgtaccgtgtgtggaaaggcattcgactccccaagcgttttccagcgacacgagcggacccataccggcgagaagccatacgaatgtaagcagtgcgggaaagccttccgtacctcttcatcactgagaaagcatgaaactacacatacaggggagcagccatacaaatgtaagtgcggcaaggcgttcagcgatctgtttagcttccaaagccacgagactacacacagcgaggaggagccatatgaatgtaaggagtgtggaaaggcattctcttcgttcaaatatttctgccgccacgagaggacccactctgaggaaaagtcttacgagtgccagatttgcggaaaggcattctctcggttttcatatctgaagactcacgagaggacgcatacagctgagaaaccatacgaatgcaagcaatgtcggaaagcattcttctggccatcatttctgctgagacatgaacgtactcacaccggagaacgaccttacgaatgtaaacactgtggtaaggcgtttagccgcagttcattttgccgtgaacacgaaagaacccataccggggagaaaccatacgaatag

SEQ ID NO: 247648 - DNA, 1770 bp, synthetic construct
  misc_feature 1..1770: note = Description of Artificial Sequence: Synthetic coding sequence
  source 1..1770: mol_type = other DNA
atggatagcgttgcatttgaagatgtggccgtcaacttcacccacgaggagtgggcactattgggaccttcccagaaaaatctgtaccgggacgtgatgagagaaacgattcgcaatttgaattgcatcggcatgaaatgggaaaatcaaaatattgacgaccaacaccaaaatctgcgaagaaatccacgctgcgatgtcgtggagaggttcggtaagagcaaagatggcagtcagtgtggcgagaccctatcgcagattagaaacagcattgtaaacaagaatacaccagcacgagtcgacgcttgtggctccagtgttaacggggaagtgatcatgggtcatagctcgcttaactgttatatccgggtcgacacggggcataagcaccgggagtgccacgagtatgctgagaaaagttacacacataagcagtgcggaaaggggctgtcatacagacattcctttcagacttgcgaacggccacacactggcaagaaaccctacgattgtaaggagtgcgggaaaactttcagcagcccgggaaatctacgcagacacatggtggtgaagggtggggatggtccttacaaatgcgaactgtgcggtaaggccttcttttggccctccctgttacgaatgcacgaacgtacgcacaccggtgaaaaaccctatgaatgtaaacagtgttctaaggctttccctgtctatagtagctatctgagacacgagaaaatacacacaggcgagaaaccatacgagtgtaagcagtgcagcaaagccttccccgactattcttcatacttacgccatgaacggacacacacaggggagaagccatacaaatgcaagcagtgtggtaaagcattttcagtgtctggcagcctcagagtccatgagcgcatccataccggggaaaaaccatacacttgcaagcaatgcggaaaagctttttgccatcttgggtcctttcagcggcacatgatcatgcacagcggcgacggcccacataaatgtaagatctgcggcaaaggcttcgatttccccggatccgctcggattcatgagggtacacatactctggagaagccttatgaatgtaagcagtgcggtaagcttcttagtcaccggagctcttttagacgacacatgatggcgcacactggcgatggaccccataaatgtacagtctgtggtaaggcgtttgacagtccgtccgtgttccagcggcacgagagaacacataccggcgaaaagccttacgaatgtaagcagtgtggaaaagcctttcggaccagctcttctctgcggaaacacgagaccacacacaccggggaacagccgtataagtgtaagtgcggcaaagcatttagtgatttatttagttttcagagtcatgaaaccactcatagcgaagaggaaccatacgagtgtaaggagtgtggaaaggccttctccagcttcaagtacttctgcagacatgaacgcacgcacagcgaggaaaaaagctacgagtgtcagatatgtgggaaggccttttcccgcttcagctacctcaagacccacgaacgcactcatacagccgagaaaccgtacgaatgtaagcagtgtcgaaaagccttcttttggcctagttttctgctcaggcacgaacggacccatactggcgagcgcccttacgagtgtaagcactgtggcaaggctttctcccggtcttccttctgtagagaacatgagagaactcacacaggcgagaagccctacgaatag

SEQ ID NO: 247649 - DNA, 1623 bp, synthetic construct
  misc_feature 1..1623: note = Description of Artificial Sequence: Synthetic coding sequence
  source 1..1623: mol_type = other DNA
atgggaatcgtggagaaggcttcctctagctccgactctgtaacatttgaagacgtagccgtaaactttacgcaggaggagtggaccctgttagaccccagccagaagaaactgtacagagatgttatgtgggaaacattcagaaatttggccacaatcggcaccaagcaaaaagaatggaatatcgaggaacagtataaaaatcagggcaggaacctcagaaatcatatggttgaacggctgtgcgaatccaaggaaggctctcacggtggtgaaggcttctcgcagatcgcaaacctgagtcttaacaagaagaccccctccggaggcaaactgtgggaatctagtgtgtgcggcaaggtgcttagccatcattcctccctgaaccgccatattcggtcatataccaggcacaaactgtataagtgtcaggaatatggtgagaaaccttataagtgcaaaaagtgcggaaaacccttcagctacttgcagagcttcaagaaacacaaacggactcattcagctgggatagtgtataagtgcaaagcctgcggaaaagcattttcctgccagagaagcttccagattcacggtcgcacccacactggggataaaccttttaagtgcaaggagtgcggaaaagcgtttcgctaccaccaaagcgcacaaaagcacgagaaggctcacacaggcgaaaaaccttacaagtgcaaggaatgtggcaaaccgtttatttatagacacagcgctcgtgcacacgagaggaatcataccgtgcagaaacgatacgagtgtaaacagtgtggcaaaacgtacatctcctctgtcggcttccaggcccacgagcgcacccacaccggtgagaagccctacgaatgcaagaaatgcggtaaggtcttcgtataccacaatagtgcccagagacacgaaaagacacacactggcgagaaaccctacaaatgcaaggagtgtggcaaagcattctcgtatcattgtacggcccagaagcatgagagaaaccacacggctcagaaacactacgagtgtaaactgtgcggcaagacgtaccttagccctctagggttccaggctcatgaaagcacacacacaggggacaagccctttgaatgcaaaaagtgcggaaaggcctttcgttattactacagtgcgcagcggcacgaaaggactcacaccggagagaaaccttataaatgcaaagagtgtggaaaggccttctattgttgttcatcagcccgacgacacgagaggatgcacactgctaagaaacagtacgaatgcaagaaatgcgggaagacatatatcaccctagccggtttccagatccatgaacggactcatacaggtgaaaaaccttacgagtgtaagcaatgcggaaaagctttcagctctagctcttacatacatatccatgagagaatccataccggggagaagccctacgagtgcaaagagtgtggcaagcctttctcgttcctcactggatttagagtccatatgaggatgcacacaggcgagaaaccctataagtgtaaagattgtggcaatgccttcatctggagagcctccctccagtatcatgttaagaaagtccatgctgagtag

SEQ ID NO: 247650 - DNA, 1848 bp, synthetic construct
  misc_feature 1..1848: note = Description of Artificial Sequence: Synthetic coding sequence
  source 1..1848: mol_type = other DNA
atggacagtgtggcttttgaagatgtagcggtaaacttcacccatgaagaatgggccctgcttgggccaagccaaaagaacctgtatagagacgtcatgcgggagaccatcagaaatttgaattgtatagggatgaaatgggagaatcaaaacattgacgaccaacatcagaatttgcggagaaatccgagatgtgacgtggtggaaaggttcggaaaatccaaagatggcagtcagtgcggcgagactctgtcacagatcagaaactcaatagttaataaaaatacacccgctagagtcgacgcatgcggatcgagcgttaatggggaagtaatcatgggacactctagtctgaactgctatatccgggtcgatactggtcataagcatcgggaatgccacgagtacgccgaaaaatcctacactcacaaacaatgcggcaagggactgtcttacaggcattcttttcagacatgtgaaagaccccacacgggcaagaaaccctacgactgtaaagaatgcggcaagactttttccagccccggtaatctgcggagacatatggttgttaaaggcggtgatggcccatataagtgtgaactgtgtggtaaggctttcttttggcccagcctcctacgaatgcatgagagaacacacaccggcgaaaagccctatgagtgcaagcagtgttccaaggcgtttccagtctattctagctacttacgtcatgaaaaaatccacacaggcgaaaagccttacgagtgcaagcagtgcagtaaggcattccctgactatagtagctatctcaggcatgagagaacccacacgggcgaaaaaccctacaagtgcaagcaatgtggtaaggccttcagcgtgagcggttccctacgggtgcacgagagaatccataccggcgagaaaccatatacctgcaaacagtgtggaaaggccttttgccacctgggaagtttccagcggcatatgatcatgcattctggtgatggaccccacaagtgcaaaatctgtggcaaggggttcgattttccaggctctgcgcgtatccatgaaggtacccatactttggagaagccctacgagtgcaaacagtgtggaaaactgcttagtcatcggagttccttccggagacatatgatggcacacactggagatggccctcacaagtgcacggtgtgcggcaaggcctttgactctcccagtgtgtttcagcgtcatgaacgtacccacacgggcgagaaaccatatgagtgcaagcagtgcggcaaggcatttaggacatcttcctctctccgcaaacatgaaaccacgcacaccggggagcaaccctacaaatgcaaatgcggcaaagccttttctgatctgttcagtttccaaagtcatgaaacgacccactctgaggaggagccctatgagtgcaaagaatgcgggaaagcattttcctcatttaagtatttctgtagacacgaacggacgcattcagaagaaaaaagctatgagtgccaaatctgtggtaaggcattcagcaggttttcctatttgaaaacgcatgagcgcacacatacagccgaaaagccttacgaatgcaaacaatgtagaaaggcatttttttggcctagctttctcctgaggcatgagaggacacatacaggggagcggccttacgagtgtaaacattgcgggaaggcattttcaaggagcagtttttgccgtgagcacgaacggacacataccggagaaaaaccttatgagtgtaaggaatgcgggaaagctttctcttccctgagcagcttcaatcgccacaagcggactcactggaaggacatcctttag

SEQ ID NO: 247651 - DNA, 984 bp, synthetic construct
  misc_feature 1..984: note = Description of Artificial Sequence: Synthetic coding sequence
  source 1..984: mol_type = other DNA
atggaggtggccgtaccagttaagcaggaggcagagggtctggctctggactcaccctggcataggttcaggaggtttcaccttggtgatgcccctggccctcgggaggccctgggcttactccgcgcactctgtagggattggctacgaccagaagtgcacacaaaggagcagatgctggagcttctggtgctggagcagttcctgagcgcattgccggcagacactcaggcttgggtctgttctcgccaaccccagtcaggagaagaggccgtggccctcctcgaggaattgtgggggccagccgcaagtcccgatggatctagtgcgactagagtaccgcaggacgtcacacaagggccaggcgcaacgggaggcaaagaggactccggcatgatcccgctcgcgggtactgcccctggcgctgaggggcctgccccaggtgattcacaggcggttaggccttataaacaggaaccctcctcccccccattggcccctgggctccccgcattcctggccgcacccggaactaccagctgcccagaatgcggaaagaccagcctcaagcctgcccacttgctacggcacagacagagtcactctggtgaaaagccccacgcgtgcccagagtgtggcaaggccttccgtcggaaggagcacctgcggagacaccgggacacgcaccctgggtcacctggaagtcccggtcccgctctcagacccctacccgcaagggagaagccacatgcctgttgtgagtgtggtaagacattctattggagagagcacttggtgcgacataggaagacccacagcggagccaggcccttcgcttgctgggagtgcggcaaggggttcggcaggcgggaacacgttctaagacatcagaggatccacggccgagccgcagcttccgcccagggagccgtggcccctgggcctgatggcggtggcccattccctccttggcctttgggctag

SEQ ID NO: 247652 - DNA, 1557 bp, synthetic construct
  misc_feature 1..1557: note = Description of Artificial Sequence: Synthetic coding sequence
  source 1..1557: mol_type = other DNA
atggctgtcgcgctaggttgcgccattcaggcaagcctaaaccagggatccgttttccaggagtacgatactgactgtgaagtattcagacaaagatttaggcagttccagtatagagaagcagcaggaccgcatgaagcatttaacaagttatgggaattgtgttgccagtggctgaagccgaaaatgcgctccaaagaacagatactggagcttttagtgttggagcagtttttaaccatccttccgaccgaaatcgagacatgggtgcgggaacactgccccgagaaccgtgagagagtggttagcttaatcgaggacctacaacgagagctcgagatcccagagcagcaagttgacatgcacgatatgctactggaggagctggccccagtggggaccgctcatattcctcctactatgcaccttgagtccccagccttgcaggttatggggcctgcacaagaggccccagtggccgaggcttggattccacaggcaggccctccggagctgaattacggggctacaggagagtgccaaaattttcttgatcctggctatcctctgcctaagcttgacatgaatttcagccttgagaatcgagaagaaccctgggtaaaggagctccaggactccaaagaaatgaagcagttattggattctaagataggttttgaaatcggcatcgagaacgaagaggacacttccaaacaaaagaagatggagacgatgtatccattcatcgttacactggaggggaacgctctgcaggggccaatcctccagaaagattatgttcagcttgagaatcagtgggaaacaccaccggaagacctgcagaccgatctggcgaagctggtggaccagcagaatccaactctcggcgagacccccgagaattctaacctggaagagccactgaacccaaaaccacacaagaaaaaatcaccgggagaaaaaccgcacaggtgcccacaatgcggcaaatgtttcgctaggaagagccagctgaccgggcatcaaagaatccactccggtgaagagccccacaagtgccccgagtgtgggaaaagatttctgaggagctccgatctgtataggcaccagcggctacataccggtgagaggccttacgaatgtacagtctgcaaaaagaggtttactaggcggtctcacctgattggccaccaacgcacacactctgaggaagagacatataagtgtctggaatgcggtaaaagcttttgtcatgggtcctctcttaaacgccatctgaaaactcacactggagaaaaaccacacaggtgccacaactgcggaaaatccttttcacgcttgactgccctgacgctgcatcagagaacacatacagaagagcgaccatttaagtgtaattactgcggcaagtcattccgacagaggccttccctcgtgatccacctcaggattcacacgggcgagaagccttacaaatgtacccattgctccaagagcttccgccaaagggctgggctgataatgcaccaggttacacactttaggggcttgatttag

SEQ ID NO: 247653 - DNA, 384 bp, synthetic construct
  misc_feature 1..384: note = Description of Artificial Sequence: Synthetic coding sequence
  source 1..384: mol_type = other DNA
atggccgttgctctcggctgcgccatacaggccagcctgaatcaaggatctgtgttccaagaatatgatacagattgcgaggtgtttaggcagaggttccgtcagtttcagtatcgcgaagccgctgggccacatgaggcctttaacaagctctgggaactttgttgtcaatggctgaaaccaaagatgcgaagcaaagaacagatcttagaactgctggttctggaacagttcctcacaatcttgcctactgagatcgagacctgggtaagggagcactgtccagagaaccgggaaagagtggtgtcacttatcgaagatctacagagggagttggagatccccgagcagcagacattcgccgcagagtacagccattattag

SEQ ID NO: 247654 - DNA, 495 bp, synthetic construct
  misc_feature 1..495: note = Description of Artificial Sequence: Synthetic coding sequence
  source 1..495: mol_type = other DNA
atggctgttgcccttggttgcgctattcaagcctctttgaatcaggggtcagtgttccaggagtacgatacggactgtgaggtttttaggcagaggtttcgccaattccagtatcgggaggcagcaggacctcatgaggcctttaacaaactgtgggaactatgctgccagtggttgaagcccaaaatgcgctctaaagagcagattctcgagctgctcgtgctggaacagttcctgaccatcttgcctacagaaattgaaacttgggtgcgtgagcactgccccgagaatagggaaagagttgtgagtcttatcgaagacttgcaacgggaacttgaaatcccagaacagcaggtgcgaaaagagtgcggaatcttcgtgataggcccaaaggaggtagcagaggctgccggtacccggcctcacatctgcttatacgtaatcccacagcctcaggacttctcacgggtactttttctgtttctgttctgctag

SEQ ID NO: 247655 - DNA, 2049 bp, synthetic construct
  misc_feature 1..2049: note = Description of Artificial Sequence: Synthetic coding sequence
  source 1..2049: mol_type = other DNA
atgactaagtcgaaggaggctgtgaccttcaaagacgtagctgtagtattcagcgaagaggagctccagctgttggaccttgctcagagaaaattatatagggatgtcatgctggagaacttccgaaacgtcgtgtcggtgggccaccagtcaacgccagatggattacctcagctcgaaagagaagagaaattatggatgatgaaaatggctacacagcgggacaacagtagcggcgcaaagaatctgaaggagatggaaaccttgcaggaggtaggcctcagatacctgccgcacgaggagctgttttgttcacagatatggcagcaaattaccagggaactcatcaaataccaggacagcgtcgtgaacattcagaggactggctgtcagctagagaagcgggacgatctgcattacaaggatgagggtttttctaaccagtcatcccatttgcaggttcatagggttcatacaggtgaaaaaccttacaaaggggagcattgtgtcaagagcttcagctggtcctcacacttacagatcaaccagcgagcccatgctggagagaaaccctataagtgtgagaaatgcgataacgccttcagaaggttctcatctcttcaggcccatcagcgggtgcactccagggccaaatcctacaccaacgatgcctcttataggtcattcagtcaaagatcacatctacctcatcaccaaagagtgcccaccggcgagaatccttataagtatgaggaatgcggtcggaacgtaggaaagtctagccattgtcaagcgccacttatcgttcacaccggggagaaaccttacaagtgtgaagaatgcggggtgggtttttctcagagatcttatcttcaagtgcacctgaaggtccacacaggaaagaaaccatacaaatgcgaggagtgcgggaagagtttttcttggagaagccgcctgcaagcccatgagaggattcatacaggagagaagccctacaaatgcaatgcttgcggcaagtcattttcctatagtagtcacctgaacatacactgtagaatccacaccggagaaaagccttacaagtgtgaagagtgtgggaagggcttcagcgtggggtctcacctacaggcccatcagattagccatacaggggagaagccttacaaatgtgaggagtgcggcaaggggttctgtcgcgctagtaacctgttagatcaccagcgaggccacactggcgagaagccctaccagtgcgatgcctgcgggaagggctttagtcgctctagcgattttaatattcactttagggtccacacaggggagaaaccttacaaatgtgaagagtgtggcaaaggcttctcccaggccagtaatttacttgcacatcagagggggcacactggtgagaaaccctataaatgcgggacatgcggcaagggtttctccagatcatcggacctcaacgtgcactgccgtatccacactggagagaaaccgtataagtgcgaaagatgcgggaaggctttctctcagtttagctcacttcaggttcaccagcgggtgcataccggcgagaagccatatcagtgtgcagagtgcggtaagggattttccgtcggctctcagcttcaagcccaccagcgttgccacacaggagagaagccataccagtgtgaggagtgtggcaaaggattctgcagagcaagcaatttcctcgcgcatcgcggagttcatacgggcgaaaaaccctatcggtgcgatgtctgcgggaaacgcttccgccaaaggagttacctgcaggcacatcagcgggtgcacacaggtgagcggccttataaatgtgaggaatgcggcaaagttttttcatggtcaagctacctccaagctcatcagcgcgtgcataccggcgaaaagccctataagtgtgaagagtgcggaaaaggtttttcatggtcctcttctctaattattcaccagcgcgtgcatgctgacgatgaaggggacaaggacttcccttccagcgaagattctcatcgcaagactcgctag

SEQ ID NO: 247656 - DNA, 1617 bp, synthetic construct
  misc_feature 1..1617: note = Description of Artificial Sequence: Synthetic coding sequence
  source 1..1617: mol_type = other DNA
atgacaaagtccaaggaggccgttacatttaaagatgtcgccgtagtgtttagcgaggaggaactgcagctcctggatctggcccagcggaaactgtacagggatgtgatgctggagaacttccggaacgtggtttccgtgggacaccagtcaacccctgacggcctcccacaattagaaagagaggagaagctctggatgatgaaaatggcgacccagcgggacaactcttcaggggctaagaacctcaaagagatggagacacttcaggaggtcgggttgcgttatctcccacacgaagagctattttgcagccagatctggcagcagatcacaagagagttgatcaagtatcaggatagcgtcgtgaatattcaacgcaccggttgccagctggagaagcgggatgatctgcattacaaagacgagggtttctcaaatcagagctcccacctgcaggtgcaccgcgtgcataccggggagaagccgtataagggtgaacactgtgttaagtcattcagttggtcttctcatctccaaatcaaccagcgtgcccatgcaggagagaaaccgtacaagtgtgagaagtgtgacaatgctttccgacgcttcagttcattgcaggcacaccaaagagttcactcaagagccaagagttataccaacgacgcaagttatcggtcattttcccaacgttcccacctgccccaccaccagcgcgttccgaccggagagaacccgtacaaatacgaagaatgtgggagaaatgtcgggaaatcgtctcactgtcaggcacccctgattgtgcacaccggggagaagccatacaaatgcgaggaatgcggcgtgggattctcccagcgcagttacctccaggtgcacctcaaggttcacacgggaaagaagccgtacaagtgtgaagagtgcggcaaatccttctcttggagatccaggctgcaggcccatgagcgcatccacacaggagagaagccatacaagtgtaacgcttgtggaaagagtttcagctattcaagccacctgaatattcattgtaggatacacactggagaaaaaccctataagtgcgaagagtgtggcaagggcttttcagtggggtcccatttacaagcccatcagattagccacacgggcgagaagccatataagtgcgaggagtgtggcaaaggcttttgccgcgcaagtaatctgctggaccaccagcgcggtcatacgggagagaagccctatcagtgtgacgcttgcggaaaaggcttttctcgctcctccgatttcaacattcacttccgggtgcataccgggaagaatcccatcaacgtaaggtccgtggcaagagcctccgccagaccacagattttttggcccatcaaggaggctacactcgaaaggaatccaaccaacgtcgttcacgtgggtagagctagcgtgggcgcacagatactaatgtacaccgtggaaagtacccaggaacgaaatcccattaatgcaagaggggtggtgcgacctagtgtgagcagtcctgccttccgttgcatcagggagtttacccttgagcggaaccacataagcgttcagtctgtcggcagggcgagtgtgtag

SEQ ID NO: 247657 - DNA, 1689 bp, synthetic construct
  misc_feature 1..1689: note = Description of Artificial Sequence: Synthetic coding sequence
  source 1..1689: mol_type = other DNA
atggcagccgcttggatggctcctgcccaggagtccgtcacttttgaggacgtggctgtgaccttcactcaggaggagtgggggcagcttgatgtcactcagcgagccctatatgtggaagtgatgctggaaacgtgtggcctgctggttgctttgggggacagcaccaagccggaaacagtagaaccaattccgtcacacctcgctctgcccgaagaagtctcactgcaggaacagttggcccagggagtccccagatactcctatctggggcaagccatggatcaggacggaccctcggaaatgcaggagtactttctgcggccagggactgacccccagtcagagaagctgcacgggaagatgtctctggaacatgagggcctggccactgctgacggtatttgtagcatgatgattcaaaaccaggtcagccccgaggacgctctgtacggcttcgactcctacggaccagtgactgactcactcattcatgaaggcgaaaattcttataaattcgaggaaatgttcaatgaaaattgttttctggtgcaacacgagcagatcctgcccagggtaaagccctatgattgcccagagtgcgggaaagcgtttggcaaatcaaaacatctgcttcagcaccacattatccacacaggagaaaagccttacaagtgcctggagtgcggaaaggattttaaccggaggtcacacctgacaagacatcaaaggactcacaatggggataagccttttgtatgctctgagtgcggaagaaccttcaacagaggatcacatttgacccgacatcagcgggttcatagcggggagaaaccttttgtttgtaatgagtgtggaaaggcgttcacatatagatctaatttcgtgctacacaataaatctcacaacgagaaaaagcctttcgcttgttcggagtgcggcaagggattctacgaaagcaccgctcttattcagcacttcatcattcacacaggcgagaggccattcaagtgcctggagtgcggtaaggcatttaactgcagatcccacctgaaacaacacgagcgcattcacaccggcgagaagccctttgtgtgcagccagtgtggcaaggcttttactcactactctacatatgttttacacgaacgggctcataccggagaaaagccattcgagtgtaaggagtgtggcaaggctttttcaattcgtaaagacctgatccggcattttaacatccatacaggtgagaagccctatgaatgcctccagtgcggaaaagccttcactcgaatgagtgggctgacgagacaccagtggattcacaccggcgagaagccgtacgtgtgcattcagtgcggcaaagcgttttgccgcacaacaaatctgattcgccacttttccatccatacaggagagaagccatatgagtgcgtcgaatgtggcaaagcgttcaaccggagaagccctctgactcggcaccagcggatacacaccgctgagaaaagccacgagcccatccagtcaggcaacgtgtcttgcgagagcacggaccttatccagcattctatcatccacactgagagcagtcccgtgagtgccgtgaacatggagaccccgtcaatagcagcgcactcaagttcccttgacatcaacggcttcatagtggaagagaccctgcccctgtag

SEQ ID NO: 247658 - DNA, 1566 bp, synthetic construct
  misc_feature 1..1566: note = Description of Artificial Sequence: Synthetic coding sequence
  source 1..1566: mol_type = other DNA
atgttagagacttgtggccttctcgtggcactgggagattctacaaagcctgaaacggttgagccgatccccagccacctagccctgcccgaggaggtctcgcttcaggaacagctggcccaaggagtaccccgatactcttacctgggtcaggccatggaccaggacggacctagtgagatgcaagagtattttcttcgccctggtacggatccccaatcagagaagctgcatgggaaaatgtctctggagcatgaggggctggctactgctgatgggatctgctccatgatgattcaaaatcaggtttcgcctgaagacgcactttatggtttcgatagttacgggcctgttaccgattctctgatccacgaaggcgaaaactcctacaagttcgaggagatgttcaacgagaactgtttcctagtccagcatgagcagatactcccaagggtcaaaccttacgactgcccggagtgtgggaaagcattcggtaaatccaaacatcttctgcaacaccatatcatccacacaggagaaaaaccttataaatgtctcgagtgcggtaaagactttaatcgcagaagccatttgacaagacatcaacgcacccataacggagataaaccattcgtttgctccgagtgcgggagaacattcaacaggggctctcaccttacgcgccaccaaagagtccatagtggtgagaagcccttcgtgtgcaatgagtgtggcaaggcttttacatatcgcagtaactttgtgctgcacaacaaatctcacaacgagaaaaagccttttgcgtgctccgaatgtggcaagggcttttacgagtccacagcactgattcagcactttatcatccataccggggaacgtcctttcaagtgtctggagtgcggcaaagccttcaactgtaggtcgcatctcaagcaacatgagcggattcacacaggcgaaaaacccttcgtgtgtagccaatgcgggaaagcctttactcattactctacatacgtactacatgaacgcgctcacacaggcgaaaagcccttcgagtgcaaggaatgcggcaaggcgttctccatccgcaaggacctgatcaggcatttcaacatccatacgggggagaagccctacgaatgcctgcaatgcggtaaggcattcactagaatgtccggattgacccgccaccagtggatacacacaggggagaagccttacgtgtgtatccagtgcggcaaagccttttgcaggactacgaacctgattcgtcatttttccatccacacaggcgagaagccatacgaatgtgttgaatgtggtaaagcctttaatcggaggagccctctaactagacaccagaggatccacaccgccgaaaaatcccacgagcctatccagagcgggaatgttagctgcgagtccactgaccttatacagcattctattatacacaccgaatcttctccagttagcgcagtgaatatggaaaccccatcaattgcagcgcattcaagctcccttgacatcaacggctttattgttgaggaaactctccccctctag

SEQ ID NO: 247659 - DNA, 1623 bp, synthetic construct
  misc_feature 1..1623: note = Description of Artificial Sequence: Synthetic coding sequence
  source 1..1623: mol_type = other DNA
atggcacatgaactcgtaatgtttcgcgacgtggcgatcgacgtgagccaggaagagtgggaatgtttgaacccagcacagcgcaacctgtacaaagaggtcatgctggagaactatagcaatctcgtgtcgttaggtctgagcgtaagcaaacctgcggtgatcagcagcctagaacagggcaaggagccctggatggtggtgcgcgaggagaccggcaggtggtgccccgacctggcctcccgtgatgagcctcagaaactgtccccaaagcgagacatctacgagactgagcttagccagtgggttaacatggaggagttcaagagtcactccccagagcgcagcatattctctgccatttgggagggcaattgccactttgagcagcaccaggggcaggaagaaggctattttagacagcttatgatcaaccacgagaacatgccaatcttttcgcagcacacgctgcttacccaggaattttatgaccgtgagaagatttccgaatgtaagaaatgccgtaagatcttctcctaccacctgtttttttcacatcacaagaggacccactctaaggaactgtcagagtgtaaggaatgcaccgagattgttaacacaccttgtctgttcaagcagcagacgatccagaacggggacaaatgtaacgaatgtaaggaatgttggaaggctttcgtgcattgcagtcagttgaaacacctgagaatccataacggcgagaagcggtacgagtgcaatgaatgtggaaaggcattcaactacggttccgaactgacacttcatcaacgcatccatacgggcgagaaaccctacgagtgcaaggaatgtggcaaggcattcagacagcggtctcagctcacacagcatcaaaggttgcataccggagagaagccttacgagtgcaagcagtgtggcaaggctttcatccggggattccaactcactgaacacctgcgcctccacaccggtgagaaaccctatgagtgtaaggagtgtggtaagactttccgtcacagatctcatctgacaatccatcagcggattcacaccggcgaaaagccctacgaatgtagggaatgcggaaaggctttcagctatcactctagttttagccatcaccaaaagatccatagcggtaagaaaccatatgagtgtcacgagtgtggtaaggctttctgcgacggactgcagctgacacttcatcaacggattcatacgggggagaagccttacgagtgtaaagaatgtggcaaaacatttagacagtgcagccacctgaagaggcatcaacggatacacaccggggaaaagccccacgaatgtatgatctgcggcaaggcctttcgcctacactcccacctgattcaacatcagcggatacacactggcgaaaaaccctatgaatgtaaagagtgcgggaaggcattcagctaccattccagcttctcgcatcaccagcggatacacagtggcaagaagccatatcagtgtggtaaggccttcaatcaccggctccagttgaatttacatcaaacactacacacaggcgagaaaccagtaagattcccacttctgccaccacacccctccttggcctcgtag

SEQ ID NO: 247660 - DNA, 741 bp, synthetic construct
  misc_feature 1..741: note = Description of Artificial Sequence: Synthetic coding sequence
  source 1..741: mol_type = other DNA
atggtcgtgagggaagaaactggaaggtggtgtccaggcacatggaagacctggggattccacaacaattttctggataacaacgaagcaacagacatcaacgcagatctcgcctcccgtgacgaaccccagaaactcagccccaagcgagacatctacgaaaccgaactgagccagtgggtgaacatggaagaatttaaatcccattctccggagagatcaattttttccgctatctgggagggtaattgtcattttgagcaacaccaaggccaggaagaaggttactttcggcagctcatgatcaatcacgaaaacatgcccattttctcgcaacacaccctgctgactcaagagttctatgacagggagaagatcagtgaatgcaagaaatgccgtaaaattttcagttaccacctgtttttttctcaccacaaatgcagccatctcaaaaggcaccagcggatccataccggcgaaaagccgcacgagtgtatgatatgtggcaaggcattcaggctgcactctcatttgattcagcaccagcggatccacacaggggagaaaccttatgagtgtaaagagtgcggtaaggccttctcctaccatagctcgtttagtcatcaccagaggatccactccggaaagaagccatatcagtgcgggaaggctttcaaccaccgactgcaactcaatctgcaccaaacactccatactggagagaagcccgtaagattttag

SEQ ID NO: 247661 - DNA, 1692 bp, synthetic construct
  misc_feature 1..1692: note = Description of Artificial Sequence: Synthetic coding sequence
  source 1..1692: mol_type = other DNA
atggctcatgaacttgtcatgtttagggacgttgcaattgatgtgtcacaggaagaatgggaatgcctcaatcccgcacagcgtaacttatacaaggaggtgatgttagaaaactacagtaatctggtcagcctcggccttagtgtgtctaagccagcagttattagttctctggagcagggaaaggagccatggatggtagtgcgggaagaaactggcaggtggtgcccgggaacctggaaaacttgggggttccataataatttccttgacaataacgaagctactgatataaacgctgatcttgccagtcgggacgagccacagaagctttctccaaaaagggacatttatgagacagagctgagccagtgggtcaatatggaggaattcaagtctcactctcccgaaagatccattttcagcgccatttgggagggtaactgccattttgagcagcatcagggccaagaagagggttacttcagacagctgatgattaaccatgaaaacatgcccatctttagtcagcacactctgttgacccaggagttttatgacagggaaaaaatttctgagtgcaaaaaatgcagaaagatcttctcttatcatctgtttttcagtcaccataaaaggacgcattccaaggagctgagtgagtgcaaggaatgtacagagatcgtgaacacgccctgtttgtttaaacagcagacaatccaaaacggcgacaaatgcaatgagtgtaaagaatgctggaaggccttcgtgcattgttcgcagctcaaacatcttagaattcacaatggtgagaagcgctatgagtgtaacgagtgcggcaaggctttcaactatggctcggagctgactctgcaccagcgtatccacaccggagaaaagccatatgaatgtaaggagtgtggaaaagcctttcgacaacgatcacagctcacgcagcatcaaaggttacataccggggagaaaccctatgagtgtaaacagtgcggaaaggcgtttatccgagggtttcagctgacagagcacctgagactacatacgggagagaagccctacgaatgtaaggagtgcggaaaaacattcaggcataggtctcacttaacaatacaccaacgtattcataccggtgaaaagccctatgaatgcagagaatgtggtaaagcgttttcgtaccattcttcattcagtcaccaccaaaaaatacacagcggtaagaagccttacgaatgtcacgaatgtggcaaagctttctgcgacggactccagctcaccttacaccaaaggatacataccggagaaaagccgtacgagtgcaaagagtgcgggaaaacattccgccagtgtagtcatttaaagcggcatcaacggatccacaccggtgagaagccgcacgaatgtatgatttgcggaaaggcttttaggctgcacagccacttgatccagcaccagaggatccacacaggtgagaaaccctatgaatgtaaagagtgcggcaaggcattctcttaccatagcagtttctctcatcaccagcgcatccattccggcaagaagccctatcagtgcggcaaagctttcaatcatcgattacagcttaatctccaccaaacactgcataccggcgagaagcccgtccgtttcccactcttacctccgcacccctctctggctagctag

SEQ ID NO: 247662 - DNA, 777 bp, synthetic construct
  misc_feature 1..777: note = Description of Artificial Sequence: Synthetic coding sequence
  source 1..777: mol_type = other DNA
gaaaagcgttacgagtgcaacgagtgcggtaaagcattcaactacgggagcgagcttacattacatcagaggatacacacaggtgagaagccgtatgaatgcaaagaatgtgggaaggcttttaggcaaagatctcagctgactcagcaccagcggctgcacacgggagaaaagccttatgagtgcaaacaatgcggaaaagcattcattcggggattccagctgacagaacatctgcggctccacacaggtgaaaaaccttacgagtgcaaggaatgtggtaaaacttttcgacatcgttcccaccttactatccatcagcgtatccatacgggcgaaaagccatatgagtgccgggaatgtggaaaggccttctcctaccattcgagcttttcccaccatcagaaaattcacagcggcaaaaagccttacgaatgccacgagtgcggcaaggcattttgtgacggcttgcagcttacactgcatcagcgaatacatactggggaaaagccctacgagtgcaaggagtgcggcaagacttttaggcaatgctcgcacctaaagaggcatcagcgcatacatactggcgaaaaacctcatgaatgtatgatatgcggcaaggcattcagattacactcacacctgatccagcatcagcggatccacacaggcgagaaaccatatgagtgcaaagaatgcgggaaagccttctcataccattcgtccttcagccatcatcaaaggattcacagcgacgctaccacagccattagctag

SEQ ID NO: 247663 - DNA, 1311 bp, synthetic construct
  misc_feature 1..1311: note = Description of Artificial Sequence: Synthetic coding sequence
  source 1..1311: mol_type = other DNA
atggaagagtttaaatcgcactctcctgagcgatccattttttcggccatttgggaagggaactgtcactttgaacagcaccagggccaggaagagggttattttcgccagctgatgattaatcacgaaaacatgcctatcttttcccagcatactctcctgacacaggaattctacgatcgagaaaagatctccgaatgcaagaaatgccggaagatcttctcttaccacttattcttctcccaccacaaacggacacacagcaaggaactaagcgagtgcaaggagtgtactgagattgtgaacaccccatgtctgttcaagcagcagaccatccagaacggcgataagtgcaatgagtgcaaagaatgttggaaggctttcgtccactgcagtcagctcaagcatttaagaattcacaatggagagaagagatacgagtgcaacgagtgcggcaaagcatttaactacggaagcgaactgactttgcatcagcggattcatacaggtgagaaaccctatgagtgtaaggagtgtgggaaagcttttagacagagatcacagctcacacagcaccagaggctgcataccggcgaaaaaccatatgagtgcaaacaatgcggaaaggcctttatcaggggattccagctgacagaacacctgcggctgcatactggcgagaaaccctacgagtgtaaagaatgcggcaagactttccggcatcgctcacacctgactatccatcagaggatccacacaggagagaagccctacgagtgccgtgaatgtggaaaggccttctcttatcatagctctttctcacaccaccagaagatccactctggaaagaagccatacgaatgtcatgagtgtggtaaggctttctgtgatgggctgcaactgaccttgcaccagagaattcatactggagaaaaaccctacgagtgcaaggagtgcggaaagacatttcggcagtgtagtcatctgaaacgtcaccagcggatccacaccggcgagaaaccacacgaatgcatgatctgtggcaaagcctttcgcctgcacagccaccttatccagcaccagcgcatccatactggcgagaagccttacgaatgcaaggaatgtggcaaggcctttagctaccattcatccttcagtcatcaccaacggatacattcgggaaagaaaccttatcagtgcggtaaagccttcaaccaccgcctgcagctgaacctacaccagactctgcataccggggaaaagcccgtaaggtttccattattgccccctcacccctctctggcaagctag

SEQ ID NO: 247664 - DNA, 1692 bp, synthetic construct
  misc_feature 1..1692: note = Description of Artificial Sequence: Synthetic coding sequence
  source 1..1692: mol_type = other DNA
atggctcacgagcttgtgatgtttagagatgtggccattgacgtgtcgcaagaggaatgggaatgtctgaaccccgctcagagaaacttatataaggaagtgatgttagagaattactcgaacctggtctctctcggcctcagtgtgtccaagcccgcagtgatctcatctttagagcaaggcaaggagccctggatggtagtgcgggaggagaccgggagatggtgtccaggaacatggaaaacctgggggttccataacaatttcctggataataacgaggctaccgacatcaacgcggacttagccagcagagatgagccgcaaaaactgtcgccgaaacgggacatatatgaaacagagctgtcccagtgggtgaacatggaagaattcaaaagccactcccctgaaaggtcgattttctcagccatttgggagggcaattgccactttgaacagcaccagggccaggaggaggggtatttcagacagctaatgattaaccatgagaacatgccaatattctcccagcacacgctgctgacccaggaattctatgatcgcgaaaagatttccgagtgcaagaaatgcaggaagattttcagctaccacctcttcttctctcaccataaacgcacccacagtaaagagttgagtgagtgcaaggagtgcaccgagattgtaaatactccttgtctttttaaacaacagaccatccaaaatggcgacaagtgcaacgagtgcaaggagtgttggaaggcattcgtgcactgctcccaattaaagcatctccgtattcacaacggggaaaagcggtacgaatgcaacgaatgcggcaaggcatttaattacggatccgagcttacgctccatcaacgtatccacacaggcgaaaaaccctacgagtgcaaggaatgcggcaaggctttcaggcagaggagccagctgactcaacatcagcgactgcacacaggagagaaaccctatgagtgcaaacagtgcggaaaagccttcattcgtggtttccagctgaccgagcatctgaggctccacactggcgaaaagccctacgaatgtaaggagtgcggcaagacttttagacatcgaagccatcttactatacatcagaggatccatacaggtgaaaaaccctatgagtgccgggagtgtgggaaagccttttcgtaccattctagcttcagccaccaccagaaaatccattccggaaaaaaaccttacgagtgtcatgaatgtgggaaagctttttgcgacggtctgcagctaactctccatcagcggattcacactggtgagaagccttatgagtgcaaagaatgcggcaaaacctttcgccagtgctctcacttgaagaggcatcagagaattcacaccggtgaaaaaccgcacgaatgcatgatctgcgggaaggctttccgcctgcattcacacttgattcagcaccagcgcattcacaccggcgagaagccctacgagtgcaaggagtgcggcaaggctttctcgtatcatagctctttcagtcaccatcagaggattcacagcggcaagaagccttatcaatgcggcaaggcattcaaccatcgcctgcagttaaatctccaccaaacactgcataccggggagaagcccgtgcgctttccgctcctaccacctcacccctccttagccagctag

SEQ ID NO: 247665 - DNA, 1788 bp, synthetic construct
  misc_feature 1..1788: note = Description of Artificial Sequence: Synthetic coding sequence
  source 1..1788: mol_type = other DNA
atgagggaaacacttgaagctcttagcagtcttggtttttccgttggacaacccgagatggcgcctcagagcgagccacgagaagggagccataacgcccaggagcagatgtccagtagtagagaagagagggcccttggtgtctgttcgggccatgaggcccctaccccagaggaaggcgcacacaccgaacaagccgaagccccttgcagggggcaggcttgctctgcccagaaagcgcagccagttgggacctgtcctggcgaggagtggatgatcaggaaggtgaaggtggaggacgaggaccaggaagctgaagaagaagtggagtggcctcagcatcttagcctgttaccatcgcctttccctgctcccgatctgggtcacttagctgccgcatacaagttagagcccggtgccccaggagcactcagcggtctagccttaagtggatggggcccaatgccagaaaagccgtatgggtgtggcgaatgtgagcgcagattccgggatcagctcaccctgcgcttacaccaacgcctgcaccggggtgaaggtccttgcgcctgcccggactgtggtcgctcattcacccagcgtgcccacatgctgctccatcagagatcacatcgaggcgagaggccctttccttgctccgagtgcgataagagattcagcaagaaggcccacctgacgcggcacttaaggacgcatacaggcgaaagaccctacccctgtgcagagtgcggcaagcgcttttctcaaaaaatacacttaggctctcaccaaaagactcacacaggagagcgtcctttcccttgtaccgagtgcgagaaaagattcagaaaaaaaactcaccttattcgccaccagcgcatccatacaggcgagagaccctatcaatgcgcccagtgcgcacgttcctttactcacaagcaacacctggtgcgccaccagagagtgcaccagacggccggtcctgccaggcctagtcctgactcctcagccagccctcacagcaccgcaccttctccgaccccctcctttcccggaccaaagccctttgcctgctccgattgtggtctttctttcgggtggaaaaagaaccttgcgacccatcaatgtcttcaccggagtgagggaaggccatttggatgcgatgagtgtgcactgggcgctacagtcgacgccccagctgctaaaccactggctagcgctcctggcggacctggctgtggtcccggatcagatcctgtggttcctcagagagctccaagcggcgagaggagctttttctgccccgactgcggcaggggcttttctcacggccaacacctggcacgtcacccgcgagtgcacacaggagaacgacctttcgcatgcacgcagtgtgaccggaggtttggcagtcgacctaatctggtggctcactcccgtgcccactcaggggcacgccctttcgcctgcgcacagtgcgggcgaaggttcagcagaaaaagccaccttgggcgtcatcaggctgtgcacacaggatcccgtccccatgcctgcgcggtgtgtgcacggtctttttctagtaaaacgaacctggtgcggcaccaggccatacacacagggagtaggccattttcgtgtccccaatgtggcaaaagtttttcccggaagacacacttggtccgccaccagttgattcacggcgaagcggcacatgcagctcctgacgccgcactggccgcacccgcatggtctgctccacccgaagtggcgccaccccctctcttcttctag

SEQ ID NO: 247666 - DNA, 11778 bp, synthetic construct
  misc_feature 1..11778: note = Description of Artificial Sequence: Synthetic coding sequence
  source 1..11778: mol_type = other DNA
atgccgggtgaacgcccacgcggagctccaccccctactatgaccggggacctccagccacgccaggtggcaagctcccccggtcatccaagtcagccgcctcttgaagataacacccccgctactcgtacaacaaagggggctagagaagctggtggccaagcccaggcaatggagctcccggaagcacagccacggcaggctcgtgatggagagctgaaacctccatcacttcgcggacaggccccttccagtacacctggcaagcggggaagtccgcagacaccacccggtagaagcccactgcaggctcctagcagactcgccggaagagccgaggggtcgccccctcagaggtatatcctaggaattgcgtcttctaggactaagcccacactggatgagacacctgagaacccacaactagaagccgctcagctgcccgaggtggacacaccccaggggcctggcaccggtgcacccctccggcctgggctgccacgcaccgaagcccagccagccgcagaggaactgggtttccatcgctgttttcaagagcctccatccagtttcacctcaaccaactatacgtcaccttcagcaacaccaaggccccctgcccctgggccaccgcagtcacgtggaacatccccccttcagccagggtcttaccccgaatatcaggcctccggggcagactcctggccacctgccgctgagaatagctttcccggtgcaaacttcggcgttcccccagccgagcccgagcctataccaaagggcagtcgcccaggtgggagcccccgaggtgttagttttcagtttccctttcccgcattacacggcgctagcaccaaacctttcccagccgacgtggccggacacgctttcaccaacggacccttagtattcgcattccaccagccccagggggcttggcccgaggaagcagtggggaccggacctgcctatcctctccctactcaacccgctccaagccccttgccttgctaccaggggcaaccaggcggtctgaataggcacagcgacctcagtggagccctttcttctccaggcgcagcacactctgccccaaggcctttttccgatagtttacacaagtcactgacaaaaattctaccagaacggcctccctctgcccaggatgggctgggctctaccaggggtcccccaagttctctgcctcagcgccacttcccagggcaggcctatagagcaagcggcgtcgatacaagtccaggacccccagataccgagctcgctgccccaggtccccctcccgctcgtctgccacagctatgggatcccaccgctgcgccttatcccacacccccaggaggtcccctggcagccacaaggagcatgtttttcaacggccaaccctccccaggccagcgactgtgtctcccgcaaagcgctcccctgccctggcctcaggtgcttccgaccgcccgaccttcgccacatggtatggagatgctatcacggctgcctttcccagccggagggcctgaatggcaaggcggatctcagggcgcattaggcaccgctggcaagacccccggtccaagggagaagctgccggcagtgcgctcaagccaaggtggcagcccagccctgttcacctataatgggatgaccgaccccggtgcgcagcccctgtttttcggcgtcgcccagcctcaagtgtctccacacggtaccccatctttgccgcctccacgggtcgtgggagcgtccccgtccgagagcccactccccagtcctgcgaccaatacagctgggagcacctgctccagcctcagccctatgtccagctctcctgccaatccttcctcggaggaatcgcaactccctgggccactgggaccctctgccttctttcatccacccacccatccccaggaaaccgggtcccctttcccgtcccccgagcctcctcattctctcccaacccattaccagcctgagcctgcgaaagcatttccttttcctgcggatgggctgggtgcagaaggagccttccagtgcctagaagaaacgcccttcccccacgagggacccgaggtggggagaggcggtctgcaggggtttccaagagccccaccgccttatcccactcaccatttcagtctctcttccgcatctctggaccagctcgacgtactgctgacgtgtcggcagtgtgatcggaactatagcagtctcgcagccttcctggctcacagacagttttgcggccttctgctggccagagccaaagacggtcaccagaggtcccctgggccaccaggactgccttcccctcccgctgctcctagggtccccgctgatgcccatgccggtttactgagccacgcaaagacattccttctagccggtgatgctcaggccgaaggcaaagatgaccccctcagaaccggctttcttccttcattggcggctactccatttcctctgcctgccagcgatctcgacatggaggacgacgctaagctggactcactcattacagaggccctgaacgggatggaatatcaaagcgacaatccggaaatcgactcgtcattcattgatgtgttcgctgatgaagagccgtctggcccacgagggccatcttccgggcatccgcttaaatctaaggccggagtcacaccagagtccaaggctccaccacccctccctgccgctaccccagacccccaaacccctcgcccaggcgacagggggtgccctgcacgcggtcgtcccaagactcggtctctaggtttagctcctacggaggctgacgcaccaagccagggccgacagcagcgcagaggcaaacagctgaagctgtttcggaaggacctcgacagtggaggtgccgcagagggcagcgggtctgggggtggcggacgggcatcagggctgagacccaggagaaacgacggtctgggggaaagaccgcctccaagaccgaggagacctagaacccaggcccctggatctcgcgctgaccctgcccctagggttcccagagccgctgctctccccgaagagacccggtcaagccggagaaggcgcctcccccctcgtaaagatccgaggaaacggaaagcacggggaggcgcttgggggaaggaactgatcctcaagattgttcagcagaagaaccggctgcgggagtatgattttgcttcagagtctgaggaagatgaacagccaccaccgaggggcccaggtttccggggacgcagagggcgtggagaaaagcgtaaggaagtggagctaacacaaggcccaagggaggacgagccgcagaaacctagaaaggcggcacgtcaagaggcaggcggagacggggctcctgctaatcccgaggagcccggaggatcaagaccgggacccggacgatcacctcaggcacgaggaccttctcggagtttggaaacgggcgcagcagcccgtgaaggcggtcccaagtgtgcggatagaccctccgtggcccctaaagatcctttacaagtgcccactaacaccgagaccagcgaggaaaccagaccatcgctggactttccacaggaggcaaaggaaccggaaacggctgaggagtctgcccctgatagtactgaattcactgaggcactgagatcccccccagcagcctgtgcgggtgaaatgggagcctctccaggccttttaatcccagaacagccccctccatctagacacgacactgggacccccaagccctctggatcactcgcgaacaccgctccccacggttcttcccctaccccgggagtagggtctcttctgggcggtcccggaggaacccaagcacctgtttcccacaactctaaggacccgccagcacgacagcctggcgaatttttggcacctgtggccaatccgagcagtacagcatgtcctaagcccagtgtgctgtcctccaaaattagctctttcggttgtgatcctgccggatttaacagagatcccctgggagttccagttgccaaaaaaggacctcagccgtacagttctccccacagcgaactgtttctcggtccaaaggacctggctggttgctttctcgaggaactacaccccaaaccctccgccagggacgctccccctgcgtctagctcttgcctttgccaggacggtgaggatgccggaagtcttgaacctcaactcccccgatcccctcctggcaccgctgagaccgagccaggcagggcggctagcccacccacccttgagtcatctagcctgtttccagatctgccagtggaccgctttgatcctcctctttatggatcactctccgcaaatagggattcgggcctcccattcgcgtgcgctgatcccccacagaagacagtcccaagcgatcccccataccccagctttttgctgttggaggaagtctcccctatgctaccaagtcacttccccgatctgtctggaggaaaagtcctcagcaaaacgtgccctccggagagaaccgtggtaccaggcgctgcgccttcattaccgggtaaagggagcgggtgcagtgttgccctgatgtcacacctgtccgaagacgaattagaaatccagaaactcgtcactgagcttgagtcccaactgcagcggtccaaagacacccgcggagcacctcgggagctggccgaggctgagtccgttgggagagttgaactcggtaccggaaccgaaccaccatctcagcgaaggacctgccaggcaaccgtcccacacgaagacactttcagcgcggctgatctgactcgggttggagagagcaccgctcatcgcgaaggggcagaatccgcggtagcgaccgtggaagccgtccaagggaggccaggtggtacctggccatgtcccgcttcattccatcccggacacgcagcccttctgccatgcgctcaggaggacttagttagcggcgcaccctttagcccccgaggcgcaaatttccacttccagccagtccagaaagctggagcttccaaaactggcctgtgccaggcggagggcgacagccgaccaccacaggacgtctgtttgccagaaccctctaaacaaccagggccacagctggacgcgggttccctggccaagtgttcaccagaccaagagctctcttttccgaaaaataaagaagccgcaagtagccaagaatctgaagatagccttcggctgctcccatgcgagcagcggggtggctttctgccagaaccagggaccgctgaccagccgcatcgtggggctccagctcccgaagcctttgggtcaccagccgtgcacctcgcccctgatctcgcatttcaaggtgatggtgcgccacctcttgatgctacgtggccttttggtgccagtcccagtcatgctgcccagggccattctgctggcagagcaggcggtcacttgcatcccaccgcaggtcgccctggattcgaaggtaatgaatttgccccagccggagccagcagcttgaccgcgcctcgtggtcgtgaggcttggttagtgccagttccgagtccagcttgcgtcagcaacacccacccaagtagaaggtctcaggatccagcgctctcacccccaattagacagttacaactcccaggccctggcgtcgccaaaagtaaggacggtatcttgggactgcaggagctgacaccggcagcccagtcacccccacgggtcaacccttctggcctggagggcggtacagtagaggggggtaaagtcgcttgcggccctgctcaaggctcccctgggggagtgcaggtgacgactctgcccgcagtggccggacaccagcttggcttggaagcagacgggcactggggccttctgggccaagctgagaagacgcagggccagggaactgcaaatcagctgcaaccagaaaacggagtttcgccgggtggcaccgataatcacgcatccgttaatgcttcccctaagacggccctgacagggcctaccgaaggagccgtgctgctcgagaagtgcaagggttccagggctgccatgtctctgcaagaggaagcagagcctacaccctcgcccccatcccctaatcgcgagtccctagcactcgccctcacagcggcacactcaagatcagggtctgagggacgcacccccgagagagcctcaagcccaggtttgaacaaacccctgctcgccacgggtgatagtccagccccttccgtcggggatctcgccgcatgcgctcccagccccacgtcggccgcacacatgccctgtagtcttggccctctgccccgagaggatccacttaccagtccctcccgagctcaaggagggttaggcggtcagctcccagcctctcccagctgcagggacccacctggaccacaacagctcctagcatgttctcctgcctgggctcctctggaagaagcggacggggtccaggcgaccactgacacaggagctgaggattccccagtcgcccctcctagtctgacgacttccccatgcgacccgaaagaagctctcgccggttgcctcctgcagggggagggatctccgctggaagacccgagtagctggccccctggcagcgtgtccgcagtcacttgcacacatagcggtgacacccctaaggacagcaccctgagaatccctgaagattctcgcaaggagaagctgtgggaaagcccgggacgggctactagtcccccactggctggcgctgtgtcaccgtccgtggccgtgcgggctaccggcctgtcctcgacgcctacaggcgacgaggcacaagccggtcgcggactgcccggacctgacccccagagcagaggagcccctcctcacacgaatccagatagaatgccacggggtcattcgagctattctccttccaacacggctaggttgggacatagggagggacaggccgtaacagctgtgcctacagaaccacctacactgcaaggggctggccctgatagcccagcgtgcttggaaggcgagatggggactagttctaaggagccggaggatccagggacccctgagaccggacgctccggtgccacaaagatgcctcgcgttacctgtccaagtacagggctggggctcgggagaactactgccccatcgtctactgcctctgatttccaaagcgattctccacagagccacaggaacgcgagccaccaaacccctcagggcgatccattgggaccacaagacctcaaacaacgctcccggggttacaaaaagaagcctgccagcactgaaaacgggcagtggaagggccaggctccacacgggcctgtcacctgcgaggtttgtgccgcttcgtttcggtcgggtcccggtttaagtcggcacaaggctaggaaacacagacctcatcccggagccccagccgaaccatcaccagccgcattgcctgcacagcagccactggaaccattggcacagaagtgccagccgcctcgcaagaagagtcaccgcgttagtggaaaggaaaggcccaaccactcaagaggggacccctcgcatgttacacagccgcctcccgctcaggggtccaaggaggtcctccgggctcccggttcccctcactcacaacaattgcatccgccatcaccaacagaacacgaagtggacgtgaaaacccccgctagcaaacctaggcctgaccaagccagagaggacgagctgcaccctaaacaggcagagaaaagggaaggcagacggtggagacgggagcctaccgtggacagccctagccactccgaagggaaatctaacaaaaagcgcggaaaactgcggggtaggagactgcgggaggagtccattttgcccgtctccgccgacgttataagtgacggcagaggaagccgcccatctccagccatggcctcctatgccgcatctccgagtcattgcctgagcgtggaagggggtccagaggccgatggggaacagcctcctagattagctactttgggcccaggggtcatggaaggagcagctgaaacagaccaggaagctttgtgcgccggtgagaccggagctcagaaaccccctggagaccggatgttgtgccctggcaggatggatggcgctgcgctcggggaacaaccaacaggtcagaagggtgcttccgccagggggttttggggtcctcgggagaccaaggcactcggcgtgtgtaaagaaagcggtagtgagcccgctgaggactcatctagggcccatagtcggtcggaggaaggtgtgtgggaagaaaataccccgcctctgggccctttgggttttcccgaaacgtcctcttccccagcggacagtacaactagcagctgtctccaggggctccctgacaatccggatacccaaggcggagtgcagggtccagaaggtccaacaccagacgcttctgggtcaagcgcaaaagatccacccagcctcttcgacgatgaagtttccttcagccagctgttccctccaggaggtcgcctgacacgaaaaagaaatccccatgtttatggaaagcgctgtgaaaaaccagttttaccactcccaactcagccctctttcgaagaaggtggcgacccgaccttgggtcccgcacgtttgccaacagatctttctgactccagttccttgtgtttgtgccatgaagatccctgggaggacgaggatccagccggattgccagagagtttcctgctggatggattcctgaactcccgcgtgcccggtattgacccatgggcaccgggtttatcgctttgggccctggaaccttcaagggaagccggagccgaaaaactgcctagccactgcccggaggatgatagacctgaggccattccagagttgcacatggttcccgctgcctggagaggcctggagatgccggcaccggcagacgactcatcctccagcttaggcgatgtgagtcctgaaccacccagtctggagcgagagcgatgcgatggtggcctgccaggcaatacacacctgttgccgctccgcgcaaccgatttcgaagtcttgagcactaaattcgagatgcaggatctttgctttttaggacctttcgaggacccggtgggcctgcctgggccatctttcctggacttcgagggcaccgcctcgtcacagggtccgcagtcacggcgtacagaagaggctgccggtgctgggagagcgcagggcaggggccgtccagcaaaggggaggcgcgcttcatataaatgcaaagtgtgtttccagagattcagaagtctcggtgagctggatctgcacaaactcgcacatacccctgcgccaccccctacatgctacatgtgtgtggagcgaagattcggttcacgcgagcttctgcgcggtcacctgcaagagcgccatgcccagagcaaggctggcccatgggcatgcgggatgtgccttaaggaagtggccgacgtatggatgtataacgagcatcttcgagagcacgccgtgagattcgccaggcggggtcaagcccgtaggtcattgggggacttgcctggcggacttgagggtagtagtgccgtagctcaccttctgaattccatcacagaaccggctcccaagcaccaccggggaaaacgaagcgctgggaaagctgctggtagtccaggcgatccttgggggcaggagggagaggctaaaaaggattctcctggagaacgtgccaaaccaagagcacggtccactccaagcaatccagatggcgcagccacacctgacagtgcctcagcaaccgcgttggccgacgctggttctccaggccctccccgaaccactccctccccatctccagatccttgggctggcggagaaccgctgctgcaagcgaccccagtgcacgaggcctgcaaggacccttctcgggattgtcatcactgtgggaaacgcttccctaagccctttaagctgcaacgccacctagccgtgcatagtccccagagggtttatctttgtccgaggtgcccgcgtgtttacccagaacacggcgaacttctggcccatcttggaggcgctcatggcctgttggagagacctgaacttcagcacacacccctgtacgcctgcgagctttgcgctaccgtcatgagaataatcaagaaatcttttgcctgcagttcctgtaattacacttttgctaagaaggagcaatttgatagacacatgaacaaacatctaaggggagggaggcaaccatttgctttccggggagtgcgcaggccaggagccccaggccaaaaggcccgagcgttggaggggacactgccttctaagcgcagaagggtcgcaatgccaggcagtgcacccggtcccggtgaggaccgcccacccccaagaggcagcagtccaatactttctgaagggtcactgcccgctttgttacacctgtgttccgaggtggccccaagcacaactaagggctggcccgagactttggagaggcccgtcgaccccgtcactcacccaattagggggtgcgagctgccctcgaaccatcaggaatgtcccccacctagcctgagtcctttccccgcagctctagccgatgggaggggtgattgtgcacttgatggcgcactggaaagacccgagaacgaggcttcccctgggtcgcctggtcctctattgcagcaggcccttcctttaggagccagtttgccgagacccggagccaggggacaggacgccgagggaaagcgagctccccttgtattttccggtaagaggcgcgctccgggagctcggggtaggtgcgctccggaccacttccaagaggatcaccttctccaaaaagagaaggaagtatcctctagccacatggtgtctgagggtggccctcgaggcaccttccacaagggatctgccactaagccggctggatgccagtcctcatcaaaggaccgctctgctgcctccacaccttccaaagctctgaagttcccagttcaccctcggaaagccgtgggatcactagcccctggtgaactggccagaggaactgaaaacggtatgaagcctgccaccccaaaagcgaaacccggacccagcagtcagggttcaggaagccccaggcccggaacaaagacaggcggtggctcacaaccacagccggcatctggacagcttcagtcagagaccgcaaccactccggctaaaccatcatttccctcccgcagccccgctcccgagaggctacctgcccgagcgcaggccaagtcctgtaccaaaggccctagagaagctggcgaacagggaccgcacggctctctcggccctaaagaaaagggcgagagtagtaccaagaggaagaaaggacaggtcccagggcctgctcgtagcgagtcagttggcagcttcgggagggctccaagcgcacctgataaacccccacgtactccgagaaagcaggccacacccagtcgcgtgttgcccacaaagccgaaaccgaacagtcagaataagcccagacccccaccaagtgagcaaagaaaggcagagccgggacatacgcagcgcaaagaccgccttggaaaagcatttccacaagggaggcctctgctcaggcccccaaaacgcggaaccgccgttcatggggcagagcccgcagagccgcatacacaccggacggctgaagcacagagcgatctgctgtcgcaactgtttgggcagcgcttgactggcttcaagatacccctcaaaaaagatgcttcggaataa

SEQ ID NO: 247667 - DNA, 1479 bp, synthetic construct
  misc_feature 1..1479: note = Description of Artificial Sequence: Synthetic coding sequence
  source 1..1479: mol_type = other DNA
atgctgtgtgatgaaaaagcgcaaaaacggagaaaaagaaaagcaaaggaaagtggcatggctctgccccagggccacctcacttttcgtgacgtggcgattgagttctcacaggccgagtggaaatgtctggaccccgctcagagggctctgtataaggatgtgatgctcgaaaactatagaaacctggtgtcgttgggatcctcctacgcattgggttctaacgccgaagacaaacctattaagaagcagctaggagttagcttccatctccacctctctgaattggagctttttcctgatgaacgcgtgattaacggctgcaatcaggtggagaattttataaatcactcctcttctgtttcctgcctgcaggagatgagtagtagtgtgaaaactccgattttcaacagaaacgattttgatgactcttctttccttccacaggagcagaaggtacacctgcgagagaaaccctatgaatgcaatgaacactcaaaggtgtttcgcgtatccagctccctgacaaagcaccaagtcattcacacggtggaaaaaccctataagtgcaatagctgtggcaaggtgttttcaagaaattctcacctggcagagcattgtcgaatccacaccggcgagaagccatataaatgcaacgtgtgcggcaaagtgtttagctacaatagcaactttgctcgtcaccagaggatacatacgcgcgaaaaaccatatgaatgcaatgagtgcggaaaggtgtttagtaacaatagttacctggcgcgacaccagagaatccatgccgaggaaaagccgtataagtgtaatgaatgtggaaaagggttctcacacaagagttctttagccaatcattggcggatttacacgggggagaagccctataaatgtgacgaatgtggcaaggccttctatcgtatcgcgttactggtgcgtcaccagaagatccataccggcgagaagccttacaagtgtaacgaatgcgggaaggtctttattcagaattctcatctggcccagcattggagaatacacacaggcgaaaaaccctacaagtgtaatgagtgcgggaaagtgtttaatcaattgtccaacttggccagacatagacgaatccatacgggcgaaaaaccctacaagtgtaacgagtgtggtaaagcattcagcgaatattcaggactgagcgcccatctggtgattcacactggtgagaaaccctacaaatgtagcgagtgcggtaaggcattccgccataagctttctctgaccaaccaccagcggatacatactggcgaaaggccctataaatgcaacgaatgtgggaaggttttcaataggattgcacatctggctaggcatcggaaaatccatacaggagaaaaaccatacaagtgcaacgaatgcggaaaagcttttagccggatatcttacctagcgcagcactggacaatacacatgggatag

SEQ ID NO: 247668 - DNA, 1377 bp, synthetic construct
  misc_feature 1..1377: note = Description of Artificial Sequence: Synthetic coding sequence
  source 1..1377: mol_type = other DNA
atgctcgagcagcgccgtgagccatggtccggcgaaagcgaggtgaagattgctaagaactctgatgggagggaatgcatcaagggagttaatactggatctagttacgcactgggatccaatgccgaggacaaaccaattaaaaaacagttaggcgttagctttcatctgcatctctccgagttggaactatttcctgacgagcgggtgattaatggctgtaaccaagtcgagaattttatcaatcattcttcctctgtgtcctgtctgcaagagatgagcagttccgtgaaaacgcccatttttaatagaaatgactttgatgactcttcgttcctccctcaggaacagaaagtccacctacgtgagaagccatacgaatgcaacgagcactccaaggtcttccgcgtgagcagcagtcttaccaagcaccaagttatacacactgtcgaaaagccttacaagtgcaattcctgtggaaaggtgttctctagaaacagccacttagccgagcattgccgtatccacaccggagagaaaccctacaaatgtaacgtctgtgggaaggtgttttcatacaatagcaactttgcacgtcaccagcgtatacacacacgcgaaaagccatacgagtgcaatgagtgtgggaaggttttctcaaacaattcgtacctcgcacgacatcaacggattcatgcggaggagaaaccttataagtgcaatgagtgtggtaaaggcttctcacacaagtcttccctcgctaatcattggaggatttacaccggtgaaaaaccatataagtgtgacgagtgcggcaaggcgttttaccgtatagcactgctggtgaggcatcagaaaattcacacaggggaaaaaccatacaagtgcaatgaatgtggaaaggtctttatccagaatagtcacctggctcaacattggcgaatccatacaggagagaagccttacaagtgtaatgagtgtggcaaagtgtttaaccagctctctaacctggccagacacaggaggattcacaccggcgagaagccttacaagtgtaatgaatgtggaaaagcctttagtgaatacagcggcttaagcgcccacctggtgattcacaccggagagaagccctataagtgctcagagtgcggcaaagccttcaggcataagttgtccctgactaaccatcagaggatacacaccggggagcgcccttataaatgcaatgagtgcggcaaagtctttaacagaattgcccatctggccaggcataggaagattcatactggcgaaaagccatataaatgcaacgaatgcggtaaagcattcagcagaatttcttatttggcccagcactggacaatacacatggggtag

SEQ ID NO: 247669 - DNA, 537 bp, synthetic construct
  misc_feature 1..537: note = Description of Artificial Sequence: Synthetic coding sequence
  source 1..537: mol_type = other DNA
ttcccccagacgaggaaaaggatcgcatggtcagaaggccacgcagccgctcggctgaccagtaaagaaagctgctgtgagaaggctcagaaacgcagaaaaaggaaagcaaaggaatctggcatggccctgccgcagggccatctaacctttcgcgacgttgctatcgagttttctcaagccgagtggaagtgcttagacccagcgcagcgcgctctttacaaggatgtcatgctcgaaaattatagaaatcttgtctccctcggcatctccttacccgacttgaatataaactctatgctcgaacagaggcgggagccctggtctggcgaaagcgaggtcaaaatcgctaagaattctgatgggagagagtgcatcaagggggtaaataccgggagtagttacgcacttgggtccaatgctgaagataaacctatcaaaaagcaactcggcgtcagcttccatctgcatttatctgagctggagctattccccgacgagcgggtgattaatggttgtaaccaggttgagaactag

SEQ ID NO: 247670 - DNA, 1608 bp, synthetic construct
  misc_feature 1..1608: note = Description of Artificial Sequence: Synthetic coding sequence
  source 1..1608: mol_type = other DNA
atgctgtgtgatgagaaggcacagaaacggaggaaacgaaaagccaaggaatccggcatggccctgccacagggtcacctgactttcagggatgtggctattgaattttctcaggcagaatggaagtgtcttgatccagcacaaagagccctttacaaagacgtgatgctcgagaactaccgcaatctcgtctcactggggatttctctccctgacttaaacatcaattccatgttagagcagcgacgtgaaccatggagcggggagtctgaggtgaagatagccaaaaacagcgatggaagggagtgtattaaaggcgtaaatacagggtcatcctacgcactgggtagcaacgccgaggataaaccaattaagaagcagctcggggtgtcttttcacctccatttgagtgaactggagctcttccctgatgagagagtgataaacgggtgtaatcaggttgagaacttcatcaatcattcatccagtgtgagttgcttgcaggagatgtccagttccgtgaagaccccaatcttcaacagaaacgatttcgatgactcatccttcctcccacaggagcaaaaagtacacttgcgcgagaagccctacgagtgcaacgagcactctaaagtatttagggtttctagtagtctcactaaacaccaggtgattcacacagtggaaaagccatacaagtgcaattcttgcggcaaagttttctcccggaattcgcacctggccgagcattgtcgtatccacacaggcgaaaagccatacaagtgcaacgtgtgcggtaaggtgttcagctataacagtaactttgccagacaccagagaatccacactcgggaaaagccttatgaatgcaatgaatgcggcaaggtgttctcaaataacagttaccttgcacgccatcagagaattcatgctgaggagaaaccgtacaagtgtaatgaatgcggcaaaggatttagccataaatccagcctcgctaaccactggaggatatataccggtgagaaaccatacaagtgtgacgagtgtggaaaagccttctacagaatcgcccttctcgtgcgtcatcagaagatccacactggagagaaaccctacaagtgcaatgaatgtgggaaagtgttcatacagaacagccacctagcacagcattggaggatccacacaggtgagaagccatacaaatgcaatgagtgcgggaaggtcttcaaccagctcagtaacctggctagacatagacgtattcatactggcgaaaagccatacaagtgcaatgagtgcgggaaggccttctccgagtactcaggactatccgcccacctcgtgatccacaccggcgaaaaaccatataagtgctcagagtgcggaaaagcgttcaggcataaactgtctcttacaaatcaccagagaatccacactggcgagcgcccttataagtgtaatgagtgcggaaaagtgttcaatcgcattgctcatctggcaaggcaccgcaagatacatacgggagagaaaccatacaaatgcaatgagtgtggtaaggccttttctagaatctcttaccttgctcagcactggaccattcatatgggatag

SEQ ID NO: 247671 - DNA, 1608 bp, synthetic construct
  misc_feature 1..1608: note = Description of Artificial Sequence: Synthetic coding sequence
  source 1..1608: mol_type = other DNA
atgttatgcgacgagaaagcccaaaagcgaagaaagagaaaggcaaaggagtcaggtatggcccttcctcagggtcacctcaccttccgcgatgtagctatcgaattcagtcaggctgagtggaagtgcctggatccggcacagagagccctgtataaagacgtcatgttggaaaactacagaaatttagtgtcgctcggcattagtttacctgatctaaatattaattcaatgcttgaacagagaagggaaccttggagcggcgaaagcgaagtaaagatcgccaagaattctgacggcagagagtgtatcaagggggtgaacactggtagctcgtacgccctgggctccaatgccgaggataaacctattaagaaacagcttggagtgtcttttcacctccatttgagcgaactggagcttttccctgacgagagggtaatcaacggttgtaatcaggtggaaaatttcattaaccactcaagctcagtctcctgcttacaggagatgagctcctccgtgaaaactcccatcttcaataggaatgacttcgacgacagctccttcctaccacaagaacagaaggtccatctccgtgagaaaccctatgaatgcaatgaacactccaaagtgttcagggtctcctcaagtctgactaaacaccaggtgattcataccgtggagaagccatacaagtgtaattcttgtggcaaagtgttctcccgcaactcccacctggctgagcattgtcgcatccataccggcgagaaaccatataaatgtaatgtttgtggaaaggtgttctcgtataactctaatttcgcgaggcatcaaagaatacatactcgtgaaaagccctacgagtgtaatgaatgtggcaaggtattcagcaacaattcatacttggccaggcatcaaaggatccatgctgaagaaaagccttacaaatgcaacgagtgcggcaagggattctcacacaagagttcgctcgctaatcactggcgaatctacacaggcgagaagccttacaagtgtgacgagtgcgggaaggctttctaccgcattgccctgttggtcaggcaccagaaaatccacactggcgagaaaccctacaaatgcaatgagtgcggtaaagtgtttatccagaattcccatctcgcccagcactggcgaattcacacaggcgagaaaccgtacaagtgcaatgaatgtgggaaagtcttcaaccagctgtctaacctggcccgtcacaggcgcatacataccggggaaaagccttacaagtgcaatgaatgtgggaaggccttttcggagtatagtgggttgagcgctcaccttgtgatacacacaggtgaaaaaccctacaaatgcagtgagtgcggcaaggcgttcagacataagttgagcctgactaaccatcagcgaatccatactggagagcgcccttacaaatgcaacgagtgcggcaaagtttttaaccggatcgcccatttagctcgccatcggaaaatccatactggcgaaaaaccttacaagtgtaatgagtgcggtaaggccttctcccgaatctcataccttgcgcagcattggacaattcatatgggatag

SEQ ID NO: 247672 - DNA, 1764 bp, synthetic construct
  misc_feature 1..1764: note = Description of Artificial Sequence: Synthetic coding sequence
  source 1..1764: mol_type = other DNA
atgccaaccgccttatgcccacgggtgctcgcacccaaggaatccgaggagccacgcaagatgaggagccccccaggggaaaacccttcacctcagggagagctccctagcccagaatcaagtcgcaggctattccgcaggttccgataccaggaggctgccggaccacgcgaggcgttgcagcgcctgtgggacctttgtgggggatggcttcgacctgagaggcacacgaaggaacagatcttggagctactcgtgcttgagcagttcctggcaatcctgccgagggaaattcagagttgggtgagggcccaggaacctgagtcaggcgagcaggccgtcgccgctgttgaagcacttgagcgggagcccggacgcccttggcagtggttaaagcactgtgaagaccccgttgtcattgatgacggggatagcccactggatcaggaacaggagcagctgccagttgaacctcactccgatttggccaagaatcaggatgcccagcctattacccttgcccagtgcctcggtctgccatcccggcctcccagccaacttagcggcgaccccgtacttcaggacgcattcctgcttcaggaggagaacgtgagagatactcagcaagtaaccaccttgcagcttccgccatctagggttagtcctttcaaggatatgatcctgtgcttttccgaggaagactggtccctgcttgaccctgcacagaccggcttttacggggagtttataatcggcgaggattacggagtgtctatgcctcccaacgacctggcagcccagccagacctctcccaaggcgaagagaacgaaccgagagttccagagctgcaagatctccagggtaaggaggttccacaggttagctacctcgactcaccttccctgcagcccttccaggtagaagaaaggcgtaagagggaggaactccaggtgcctgaattccaagcgtgtcctcagactgtcgtcccccagaacacttatcctgcaggaggtaaccccaggtccttagaaaattctctggacgaggaagttacaattgaaattgtcctgagttcttctggcgacgaagactctcagcacggaccatactgcacggaggagcttggctccccaaccgagaagcagaggagtttacccgcatcccaccggtctagcaccgaggcaggcggagaagtccagacgagcaagaagtcttacgtgtgccccaactgcggcaaaattttcaggtggagggtcaacttcatcagacacctgaggtcgcgcagagagcaagagaagcctcacgagtgtagcgtatgcggggagttgttcagcgattctgaagacctcgacggacatcttgagtcccacgaggcccagaaaccctacagatgcggagcttgcggaaagtccttcaggctgaatagccatctgctctcccatagacgcatccacctccagcccgatagactgcagcccgtggaaaagcgagagcaggccgcttctgaagatgctgataagggtccaaaagaacctttagaaaacggaaaggctaaactatccttccagtgttgcgagtgcggtaaggccttccagcgccatgatcacctggctaggcatcgaagccacttccacctcaaagacaaggcaaggccatttcagtgtcggtattgcgtcaaatcattcactcaaaactatgacctccttaggcacgagcggctccacatgaagagaaggagcaagcaggcactcaattcttattag

SEQ ID NO: 247673 - DNA, 1872 bp, synthetic construct
  misc_feature 1..1872: note = Description of Artificial Sequence: Synthetic coding sequence
  source 1..1872: mol_type = other DNA
atgcctactgcactttgccccagggtcctggctcctaaggagagcgaagagccccgaaaaatgagatccccaccaggcgagaacccatcaccgcagggggagttgccgtctcccgagtccagcaggcgcctgtttaggagattccgctatcaggaagcagctgggcctcgcgaggccctccagcggttgtgggacctgtgtggcggttggctgcgcccagagaggcatactaaggagcagatcctcgagctgctggttctggagcagttcctagccattctccctcgtgagattcagagttgggtaagagcccaggagcctgaaagtggagagcaggctgtagctgcagtggaggcactggagcgtgagccaggaagaccctggcagtggctgaaacactgcgaggatccggtggtcattgacgacggcgactcgccactggaccaggagcaggagcagctccctgtggaaccccatagcgatctggccaagaaccaggacgcccagccaattaccttggctcaatgcctgggacttccctcaagaccaccctcacagctgtccggggaccccgttctccaggacgcattcctgctacaggaggagaatgtgagagacacccaacaggtcacgaccttgcaactcccccctaggatttttcaatttaacaatcatcggtcgaatgggtatatccttgagatgctgggcagtggcggaaagaaggcacagatcatttcagttcttagccaaatttacgtctcccgggtttcaccattcaaagacatgatcctgtgcttcagcgaagaggactggagcctgctcgatcctgcacagaccggcttctacggcgaatttattataggcgaagactacggtgtgtcgatgcctcctaatgacctggctgcccagcctgatttaagccagggggaggaaaacgagcctcgcgtgcccgagctgcaggatcttcagggtaaggaagtccctcaggtttcttatcttgacagcccgagcctgcagccatttcaggttgaagagagacggaaaagagaggagctgcaggtacctgagtttcaggcctgtccgcagaccgtggtcccccagaacacctaccctgccggaggaaaccctcgaagtctcgaaaacagcctcgacgaggaggtcactatcgaaattgtcttgtccagctcaggcgacgaggatagccaacacggaccttactgcaccgaagaactgggttctccaaccgagaaacagcgttctctcccagcaagtcaccggtcatccaccgaggccggtggagaggtacaaacttccaaaaagagttacgtctgcccaaattgtgggaagatctttaggtggagggtgaactttatcagacatctgagatcgcgacgcgaacaggagaagccacacgaatgcagcgtgtgtggcgagctgttttcggacagtgaagatctcgacggacacctcgagagccacgaggctcagaagccgtaccggtgcggagcctgcgggaaaagttttagacttaatagtcacttactgtcacatagacgaattcacttgcagccagataggctgcagcccgtcgagaagcgcgagcaggcagcctcagaggacgccgacaagggtcccaaggaacccttggaaaatggaaaggccaagctgagttttcagtgttgcgaatgcggtaaggccttccaacggcacgaccatctcgctaggcaccggtcacacttccatttaaaagacaaagctcgacccttccaatgcagatactgtgtcaaatccttcacacagaactatgatctgttgcgacatgaacggctgcacatgaagcggagaagcaaacaagctttaaacagttactag

SEQ ID NO: 247674 - DNA, 1830 bp, synthetic construct
  misc_feature 1..1830: note = Description of Artificial Sequence: Synthetic coding sequence
  source 1..1830: mol_type = other DNA
atgtcaaccgcaccctctttatctgcgttgcgctcatcaaagcatagcggagggggaggcggaggaggcggaggcggtggagcggaccctgcttggacttcagccctctccggcaatagtagcggccctggacctggctcatctccagcaggctcaacgaagcccttcgtgcatgccgtgccaccctccgacccgctacgccaagctaacaggttgccaataaaggtattgaaaatgctgacagcccgtactggacacattctccatccagagtatctccagcccttgccctccacccccgtctccccaattgagctggacgccaaaaagagtcctttagctctactggcgcagacctgttctcagatcggaaagccagatcccagccctagtagcaagctgtctagcgtcgctagcaatggcggtggagcgggtggagccggaggtggcgctgctggtgataaagacacgaaatctggcccactgaagctctcggatataggcgtagaagataaatccagcttcaagccatactcaaagccaggctctgacaaaaaggagccgggtggcggaggcggaggtgggggtggaggcggaggaggcggaggcggagtctcatccgaaaagtctggattcagagtgccttcagctacttgccagccctttactccgcgtactggcagcccctccagttctgctagtgccgagggcggaccaacaggcctcgcccacggccgtatctcttgcggcggaggaattaacgtcgacgtcaatcagcatccggacggcggtcctgggggtaaggcgctcgggagtgactgtggcggatcaagtgggtcgtcatcaggatctggtcctagtgcgccaaccagttcatcagtgctcgggagcggactggtcgcaccggtatctccttacaagccaggccagactgtgttccccctacctcccgctggcatgacctacccaggctctctggccggtgcatatgcaggctacccccctcaatttctaccacacggcgtggctctggatccgacaaagcccggaagcttggttggagcacagcttgctgccgctgcagcaggttccttgggatgttcaaagcccgctggctcaagccctctggcaggcgcatctccaccatccgtgatgactgcatcattgtgtagggacccctattgcttatcctatcactgcgcgtctcaccttgccggtgccgctgcagcctccgcttcgtgtgctcacgaccctgctgcggcagccgctgccttgaaaagcggctatccactcgtctatcccactcaccctttacatggagttcactcctccctgacggccgctgccgcagccggagctacaccaccgtccctggccggtcacccactatacccatatgggtttatgctaccaaacgacccactgccacatatctgcaattgggtgtctgccaacggcccatgcgataaacgcttcgccaccagcgaggaactacttagccatctgcgtacgcacactgctttcccaggcacggataaactattgtcaggttacccttccagttcctccctagcatcagcagctgcggcagccatggcctgccacatgcacatccctacttccggggctcctggcagcccaggtaccctggcccttcgatcaccgcaccatgcgttgggactgtctagccggtaccatccctacagcaaatccccactgccaacacctggagcccctgttcctgtgcccgctgcaactggtccttattactctccttatgctctatatggtcagagactcaccaccgcctccgcccttggataccagtag

SEQ ID NO: 247675 - DNA, 1941 bp, synthetic construct
  misc_feature 1..1941: note = Description of Artificial Sequence: Synthetic coding sequence
  source 1..1941: mol_type = other DNA
atgtctaccgcaccctctctgagcgctctcaggtctagcaaacacagtggtggtggaggcggaggcggaggaggaggcggagcggatccagcctggaccagcgccctgagcgggaactcaagcgggcctggacctgggtcctcaccggctggtagcaccaagccattcgtacatgccgttcctcctagcgatccgctgaggcaggccaataggctgcctataaaagtgctgaagatgttaaccgctaggaccgggcacatacttcaccctgaatatttacaaccacttccctcaactccagtttcccccatcgagctggatgccaagaaaagcccgttggcgcttttggctcagacatgctcacaaatagggaagccagacccatccccttccagcaaactgagttcagtagcctcgaacggcggaggagcaggtggcgcaggaggaggcgcagcaggcgacaaagataccaaatctgggccactgaagctgtccgatatcggcgtcgaggacaagagtagcttcaagccatactcaaagcccggtagcgataagaaggagccaggcggaggcggtggagggggtggcggtgggggtggaggaggcggaggtgtctcatcagagaagagtggcttccgtgttccctctgccacatgccagccatttacaccacgaacagggtctcctagtagcagtgcttccgcttgttcaccgggtggaatgttgtcatctgccggtggggctccagagggcaaggatgataaaaaggacactgacgtgggcggtggcggtaaaggaacggggggagccagtgcagaagggggtcctacgggtttagcacacgggcgtattagctgtggaggcggaattaacgtcgatgtgaatcagcatccggacggaggccctggcggaaaagccctgggtagcgattgcggcggatcatcaggttcgagttcggggagcggcccatctgcccctacatccagcagcgtgctaggatccggactcgtcgcccctgtgagtccttacaagccaggtcagaccgtgtttccgttacctcctgccggaatgacttacccagggagcctggctggggcttacgcgggttaccccccacaattcttgccccacggcgtggctttggacccaacaaaaccagggtcgctggtcggagctcaactcgccgctgccgcagccggatctctgggatgctccaagcccgcaggttccagcccgttagccggagcaagccccccttctgtaatgaccgcttcgctgtgccgggacccatattgcctgtcctatcactgtgcctctcacctggcgggagccgctgccgcatccgcttcctgtgctcatgatccagccgctgccgctgcagcccttaaatccggctacccactggtttaccccactcacccactgcacggggtacactcctcactaacagctgcagccgctgcgggagccaccccaccctccctcgcgggtcatccgctgtacccatatggcttcatgctgcctaacgacccattgccacatatatgtaactgggtgtccgctaacggcccttgtgacaaacggttcgctacttctgaggaacttttgtcgcatctgcggacacacacagcgtttcctggaacggataagctactgagtggatacccgtcctccagtagtctggcatctgctgccgctgctgcgatggcctgtcatatgcatattcccacctctggcgcacctggctcgccaggcacgctggcactccgcagcccacaccacgccctgggcctgtctagtaggtatcacccatactccaaatcccctcttccaactccaggggctcccgtgcccgtaccggcagcaaccggcccatactactctccctatgcactttatggacagagactaactaccgccagcgctttagggtaccagtag

SEQ ID NO: 247676 - DNA, 1941 bp, synthetic construct
  misc_feature 1..1941: note = Description of Artificial Sequence: Synthetic coding sequence
  source 1..1941: mol_type = other DNA
atgagcacggccccaagtctgtccgctctgagatcttcaaaacatagcggaggcggaggaggcggtggtgggggaggcggtgctgatccagcatggacctccgccctgagcggaaactcatccgggccagggccaggatcttcacccgcaggttcaaccaagccctttgtgcacgcagtcccaccctccgacccactcaggcaggcaaatcgattgcctatcaaggtattgaaaatgctgacagccaggaccggccatatacttcaccctgagtacctgcagcctttaccttccactccagtgtcacccattgagctggacgccaagaagagccccctggctctgctagctcagacctgtagtcagatcggtaaaccagatccgtccccttcctcaaagctttccagtgttgctagcaacggcggaggagccggaggggcaggcggtggcgctgctggggacaaagatactaaatctggccctctcaaactgtccgatatcggagttgaggacaaatcctctttcaagccttactccaagccagggagcgataaaaaagagcccggaggcggaggtggtgggggaggcggaggcggaggcggaggcggaggggtcagctccgagaagtccggctttagagttccaagtgctacctgccagcctttcactcctcgcacgggtagccctagttcatctgcttccgcttgtagtccaggcggaatgctgtcatccgccggaggcgctcctgagggcaaggacgataagaaggacacagacgtgggtggtgggggtaagggaactgggggagcctctgccgaaggcggacctaccgggttagcccacggcaggatttcttgcggtgggggtataaacgtggatgtcaatcagcacccagacggtggtcccggagggaaggctctaggctctgattgtgggggatcaagcggcagctcttcggggtccggcccttccgccccaacatcaagctcagtgttgggaagcggcttggtagcccctgtttctccgtataagccaggacaaacagtatttcccctccctcctgctgggatgacctaccctggctctcttgcaggtgcctacgcaggatatccaccacagtttctgccacacggcgtggccctggatcccaccaagcccggaagcttggtcggggctcagctcgctgccgctgcggctgggagcctcggctgttccaaacctgctggctcctctccgctggcgggtgcgtctcctcctagcgtaatgacagcgagcctgtgtcgcgatccttactgtctcagctatcactgcgcgtctcacctggccggagccgcagccgcttccgcatcgtgtgcccacgatcctgcagcggcagctgcggctttgaaatccggctatccccttgtgtatcctactcacccactccacggggtacattcatctctaaccgccgctgcagccgctggcgcaactcccccttccctagcaggccatccactgtacccctacggcttcatgctgccaaacgacccattgccacacatatgtaactgggtatccgccaacggaccttgtgacaagagattcgccacctctgaagaactcctgagtcatttgaggacccacacggcgttccccggaacagataagctcttatccgggtatccaagcagctcttccttggcctcagccgcagccgctgccatggcatgtcatatgcacatccccacgtccggagcaccgggatcaccaggcactctcgcattacgcagcccacaccacgcccttggactatcaagccggtatcatccgtactccaagtcgcctctcccaactccaggtgcaccagtcccggtccccgcagccacaggaccctattattcaccttacgcactctatggtcagaggttgactacagctagtgctttgggttaccagtag

SEQ ID NO: 247677 - DNA, 1626 bp, synthetic construct
  misc_feature 1..1626: note = Description of Artificial Sequence: Synthetic coding sequence
  source 1..1626: mol_type = other DNA
atgcctcgtagaaaacagagtcatccccagccagttaaatgtgagggagttaaggttgacaccgaggacagtctcgatgaaggaccgggagccctggtgctggagtctgatttattactcggacaggatctggagtttgaggaggaagaggaagaagaggagggcgatggaaactcagatcaactcatgggctttgaacgggactccgagggcgatagtctgggtgctcgccctgggctcccctacggactgtctgacgacgagtccggcggaggtcgcgctctctctgctgagtctgaagtggaggaacctgctcgaggacccggagaggcacgtggtgaaagacccggacctgcatgtcagctgtgtggcggaccgacaggagaaggcccatgctgcggcgcaggaggaccaggagggggtcccctgctcccgcctcgcctgttgtatagttgccgattatgcacatttgtcagccactactccagccacctgaaacgccatatgcagacacactccggtgagaagccattcagatgcgggagatgcccttacgcctctgctcagctggttaatctcacccggcatactaggacacatacgggcgagaaaccctaccggtgcccacactgcccctttgcctgtagtagcctgggaaacctccggagacaccagaggacacacgctggtcctccaactcctccatgtcccacctgcgggttccggtgttgcacgccccgtccggctaggccaccgtcgccaaccgagcaagaaggggcagtcccgagacggccagaggacgcactgcttctccctgacctgtcattgcatgtgccaccgggtggagcatcttttctccccgattgcgggcagctgcggggagagggggagggactgtgcggcaccggctcagagccgctgccagagctcttgttcccatggacatgcaggggttgcggccaagagctcgaggagggggagggctctaggctcggggctgccatgtgcggaagatgtatgagaggcgaggctggtggaggtgcttcagggggaccgcaggggccatcagataaaggttttgcctgctcgttatgtcctttcgccacccattaccctaatcatctggcaagacatatgaaaacccattctggggaaaaaccttttaggtgtgcaagatgcccttatgcatctgcccaccttgacaacctaaaacgtcaccagagggtacatactggagagaagccgtacaagtgtcccctgtgcccctacgcctgcggaaacttggccaatctgaaaaggcatggacgaatccattccggagataaaccctttcggtgctcgctctgtaattacagctgtaaccagagtatgaacttgaagcgccacatgttacgtcacaccggcgagaagccattccggtgtgccacctgcgcctacacgactggtcactgggacaactacaaaaggcaccagaaagtgcacgggcatggcggtgctggcggacctggactgagcgcgtccgagggctgggcccctcctcactcgcccccatccgtactctcttcccgcggaccccctgctttaggaaccgcaggctcacgcgctgttcacactgactcaagttag

SEQ ID NO: 247678 - DNA, 1440 bp, synthetic construct
  misc_feature 1..1440: note = Description of Artificial Sequence: Synthetic coding sequence
  source 1..1440: mol_type = other DNA
atgggatttgaaagggactctgaaggcgacagcttaggtgcccgacctggcttaccctatgggctgagcgatgacgaatctggcggtggaagagcacttagtgctgaaagtgaggtagaggaacccgctcggggacctggcgaggccaggggtgagagaccgggacccgcatgtcagctgtgtgggggtcccacaggggaaggcccatgctgtggagctggcggaccaggcggtggacctcttttgcctccacgacttctctacagttgtaggctatgtacttttgtctcacactattcatcacaccttaaaagacatatgcaaactcacagtggcgaaaagccattcagatgcggcagatgtccctatgcctccgcccaactcgttaacctgactaggcatacgcgcactcataccggggagaaaccctacagatgccctcactgtcccttcgcctgttcctccttagggaatctgcggcgacaccaacggactcatgcaggccctccaacacccccttgccctacctgcggttttcgatgctgcaccccacgtccggcaaggccaccaagcccaaccgagcaggagggggcagtgccacgtagaccagaagacgcactattgttacccgacctcagtttgcatgtgcctcccggtggggctagcttcctacccgactgtggtcagctgagaggcgagggggagggattgtgtggcaccggcagcgaacctttgcctgaacttttgttcccctggacctgcaggggttgcggacaggagcttgaggagggtgagggctccagattaggggcagccatgtgcggtcgctgtatgagaggagaagccggaggaggggcttctggtggcccacaggggccatccgataaagggtttgcctgttccctttgcccttttgcaacccactaccctaaccatttggcccgacacatgaagactcacagtggcgaaaaaccgttccggtgtgctagatgcccctacgcctcagctcacctcgataatctcaaaaggcaccagcgggtccacacaggggagaaaccttataagtgtcctctgtgcccttacgcctgtggtaacttggctaatctcaagaggcatggcagaatccatagtggggataagccctttagatgtagcctttgtaattacagctgcaaccaatcgatgaacctgaaacgccacatgttgagacatactggagagaagccatttaggtgtgcaacctgcgcatacaccaccgggcactgggataactataagagacatcaaaaggtgcatgggcacggtggggctgggggaccaggattatcggcttccgagggatgggcccctcctcattcacccccaagcgtgctgtcatcccgtggcccacccgctttgggcactgcaggctcaagggctgtgcacacggactcatcctag

SEQ ID NO: 247679 - DNA, 3936 bp, synthetic construct
  misc_feature 1..3936: note = Description of Artificial Sequence: Synthetic coding sequence
  source 1..3936: mol_type = other DNA
atgagtcgacgcaagcaggccaaacccagatccctgaaagacccaaactgtaagctggaagacaagactgaagacggagaggcactagactgcaagaagcgccctgaggacggcgaggagctggaagatgaggccgtccactcatgtgatagttgtctccaggtattcgaatcattgagcgatataactgagcataagattaatcagtgccagttaactgatggggtggacgttgaggacgatcccacgtgcagctggccggcaagctcacccagctcaaaggaccagacttccccctcacatggcgagggctgcgattttggggaagaggagggcggacctggccttccttacccctgccagttttgtgataagagcttcagccggctgagctacctgaaacaccacgaacagagccatagcgataagctgccttttaaatgcacctactgttcgcgcctgttcaaacacaaaagatcaagggatcggcacatcaagctgcataccggagataaaaagtatcactgctccgaatgtgacgccgctttctcccgctccgaccaccttaagattcatctcaagacacatacgtctaataagccttataaatgtgccatctgtaggcggggttttctgtcaagttccagcctgcatggccacatgcaggtgcacgaaagaaataaagatggatcacagagtggcagtaggatggaggattggaagatgaaggacacccagaagtgcagtcaatgcgaggaaggtttcgactttcccgaagatctgcagaaacacatagccgagtgccaccctgaatgttctccgaacgaagatagggccgcactacagtgtgtttattgtcatgagctgttcgtagaagagacgtctcttatgaatcacatggagcaggtccactccggcgagaaaaagaactcatgcagcatctgctcagaaagttttcacactgtggaagaactctactcccacatggacagtcaccaacagcccgagagctgcaatcactctaatagtccttccctagtgactgtggggtacacctctgtgtccagcactacgcccgatagcaatctgagcgtggactcttctactatggtggaagcggctccaccaatccccaagtccaggggcaggaagcgcgcagcccaacagacacccgatatgacaggacccagctccaaacaggctaaagtcacatatagctgcatttactgcaataagcaactctttagcagcctggcagttctgcagattcatctcaagactatgcatttagacaaaccggagcaggcccacatatgtcagtactgtctggaggtcctcccttcactttacaacctcaacgaacacctgaaacaggtgcacgaggcccaggacccaggactgatcgtgagcgctatgcctgccattgtctaccagtgtaacttctgttcggaagtggtgaacgacctgaacacactccaggagcacatacggtgtagtcacggttttgctaaccccgctgcaaaggattcaaacgcatttttttgtccgcattgctacatgggcttcctgaccgactcatcacttgaggagcatatcagacaggttcattgcgacttaagcgggtcgcgcttcggttcacctgtcctcggaacacctaaggagcctgtggtggaagtctattcatgcagttactgcacgaattcccctattttcaacagtgtcctgaagctgaacaagcacattaaagagaaccataagaacattcctctggcacttaattatattcacaatggcaaaaagtcaagagcattgtcgcctctgagccccgtggcaatcgagcagacttccctaaagatgatgcaggccgtgggaggagcccctgcaagacctacaggcgaatacatctgcaaccagtgtggtgctaagtacactagcctggactcattccagacccatttaaagactcaccttgacacggttctgccaaagttgacctgcccacagtgtaacaaggagttccccaaccaggagtccctgctaaaacacgtgacaattcatttcatgatcacatccacctattatatctgtgagtcctgtgataaacaattcacctcagtggatgatctgcagaaacaccttctggatatgcatactttcgtgttttttaggtgtacgttgtgtcaagaagtgtttgactccaaggtcagcatccaactgcatctcgcagtgaagcattccaatgagaagaaggtctacaggtgcaccagctgtaattgggatttcaggaacgagaccgacctccagctccatgtgaagcacaaccacctcgagaatcagggaaaggttcataaatgtatcttctgtggcgaatcattcggcaccgaggtggagctgcagtgccacatcactacccattctaagaagtacaactgcaaattctgcagtaaggcttttcacgccatcatcctactcgagaagcacctgcgcgaaaagcattgtgttttcgagaccaagacaccaaactgcggcaccaacggggctagtgagcaggtccaaaaagaggaggtggaactgcagacactgctcaccaactcacaggagagtcacaactctcatgatggatctgaggaagacgtggacactagtgaacctatgtacggctgcgatatttgcggtgccgcatacacaatggaaacactactgcaaaaccatcagctgcgagatcacaatatccgacctggggaatcagctattgttaagaagaaagcagagctgattaagggtaactataagtgcaatgtctgctctcggaccttctttagtgagaatgggctaagagagcacatgcagacccaccttggcccagttaaacattatatgtgtcctatctgcggtgaacgcttcccctcattattgacactcacagaacataaagtcacacacagtaagagtcttgatactggcaattgcaggatttgcaagatgcccctgcagtctgaggaggagtttttagaacactgccagatgcatcctgatctacgaaactccctgacgggtttcaggtgtgttgtgtgtatgcagacagttaccagcacacttgagcttaagattcacggaacgttccatatgcagaagacaggaaacggcagtgctgtgcagaccaccgggcgagggcagcacgtccagaagctgtacaagtgcgcgtcctgcctgaaggaattccgcagcaagcaggatctggtgaaactagatattaatgggcttccctatggactgtgcgccggttgtgtcaacctctccaagagtgcgtcaccagggatcaacgtgcccccaggcacaaacaggccaggattgggccagaatgagaacctgtccgccatagagggtaaggggaaggtgggtggactgaaaacgaggtgctcttcttgcaatgtcaagttcgagagcgagagcgagctgcagaaccatatacagactatacaccgtgagctggtcccggattctaattccacacagcttaaaacccctcaggtgagtcctatgcctaggatttccccatctcagagcgatgagaagaagacctatcaatgtataaagtgtcagatggtgttttataacgagtgggatattcaagtccacgtcgccaatcatatgattgacgagggcctcaaccacgaatgcaaactgtgctctcaaacatttgatagcccagccaaactgcagtgtcacctgatcgaacattcatttgagggaatggggggaacatttaagtgcccagtgtgctttacggtgttcgtgcaggccaacaaattgcagcagcacatcttcagtgctcacgggcaggaggacaagatatatgattgcactcagtgtccgcagaagttctttttccagacagagttacagaaccatacgatgactcagcattcctcctag

SEQ ID NO: 247680 - DNA, 3936 bp, synthetic construct
  misc_feature 1..3936: note = Description of Artificial Sequence: Synthetic coding sequence
  source 1..3936: mol_type = other DNA
atctcacgggctcagaaagcccagacacggagattgaacgaccccaactgtaagctcgaggataagactgaggacggagaagctttagactgcaagaaacgtcctgaggatggggaagagttggaagatgaagccgtgcactcctgtgactcctgcctgcaggtgttcgagtcactgtctgacattacggaacataagatcaatcagtgtcagctgacggacggagtcgatgttgaggatgatccaacatgttcctggcccgcatcctcaccctcatcaaaggaccagactagccctagccacggggaaggctgcgacttcggagaggaggaggggggacctggactgccctatccatgccagttctgtgataagtccttttcgcgactgagctacctgaagcaccacgagcagtctcattcagacaaactgccttttaaatgcacctactgtagccgcctgttcaaacacaagaggagtcgggacaggcacattaagctccacacaggtgataagaaataccattgtagtgagtgtgacgcggcattctccagaagtgaccatttaaaaatccacctaaagacccacacgtctaacaaaccttataaatgcgctatttgtcggagagggttcttatcctccagctctttacatggccatatgcaggtgcacgagcgcaacaaggacggttcccaaagcggcagccggatggaagactggaaaatgaaggacacccagaaatgcagtcagtgcgaagaagggtttgactttcctgaagatctacagaagcatattgctgagtgtcatcccgagtgcagccctaacgaagatcgcgcagccctccaatgcgtgtactgccacgaactgtttgttgaagaaacatccctgatgaatcatatggagcaggttcattctggtgagaagaagaacagctgttcaatttgctctgagtctttccacacagtggaggaattgtattctcatatggactcccaccaacaaccggagagctgcaaccattcaaactctccttcacttgtgactgttggctacactagcgtgtccagcacaacccctgatagcaacctgtctgttgactccagcactatggtggaggctgccccacccatccctaaatctcgtggcaggaagagagcggctcagcagactcctgacatgacaggtccgtcctctaaacaggctaaggtgacatattcttgcatctactgtaacaaacagttgttttcctcactggcagtattgcaaatccatcttaagacaatgcatttggataaacccgagcaggcccacatttgccagtactgcctggaagtgctgcccagtctctacaatctcaatgaacatctgaaacaggtccatgaagcccaggaccccggtttgatcgtaagcgctatgccagctattgtttaccagtgcaacttctgtagtgaagtagtaaacgatttaaacactctccaggaacacataaggtgtagtcacggatttgctaatccagccgcaaaggactccaacgccttcttttgcccacactgttatatgggctttctgactgattcctccctagaagagcatatccgtcaggtgcattgtgacctgtctgggagtcgcttcggctcgccagtgctaggcacccccaaagaaccagtagtggaagtgtattcctgttcatactgcaccaactcacccatttttaactctgtgttgaagctgaataaacacatcaaagagaatcataagaatatcccacttgcactaaactatatacataatgggaagaaatcaagagccttatcccctctgagccccgttgccatagaacagacgtcactgaagatgatgcaggccgtggggggtgcccctgcacggcctaccggcgagtatatctgcaatcagtgtggcgcaaaatatacatcattggatagcttccaaacccatctcaagacacacctagacaccgtgctacccaaacttacatgccctcagtgtaacaaggaatttccaaatcaagagtctcttctgaagcatgtcaccatccatttcatgattacctctacgtactacatatgcgagtcatgtgacaagcagtttacttcagtggacgatttgcagaagcatctgctagacatgcatacatttgtttttttccgctgcacactgtgccaggaggtctttgacagtaaagtgtcaattcagctgcacttagccgtaaaacattctaacgaaaaaaaggtgtaccggtgtacatcttgcaactgggatttccgcaacgagacagacctgcagcttcacgtcaagcacaatcacctggagaatcaaggcaaggtgcacaaatgtatattttgtggagagtcgttcgggaccgaggtggagctgcaatgtcatatcactacacactccaagaaatacaactgcaagttctgttcaaaagcgttccacgcaattatactgctcgaaaaacatctgcgggaaaagcactgcgttttcgagactaagacacctaattgcggcactaacggagctagtgaacaggtgcaaaaggaggaagtggagcttcagacgttgctgacaaactcacaggagtcccacaactcacacgatggtagcgaagaggacgtggatacttccgagccaatgtacggctgcgacatttgcggagctgcatatacaatggagacgctgctccagaatcatcaactgagagatcataatataagacccggagagagcgcgatcgtgaaaaagaaagcggaactgatcaaaggcaattacaaatgcaatgtgtgtagccgcacctttttttcagagaacggcttgagagagcacatgcagacacatctgggccctgtaaaacactacatgtgccctatatgtggtgagcggttccccagtttactgacactcacagagcataaagttacccactcgaagagcctggataccggaaattgccggatttgcaaaatgcctcttcaatcagaagaggagtttctggagcactgccagatgcacccggacttaagaaatagtctaactggcttccgctgtgtagtatgtatgcagaccgtgacatccaccttggagctgaagatacacggaacctttcacatgcagaagacgggcaacggttccgctgtgcagacgacaggccgtggacaacacgttcagaagctttacaagtgcgcatcctgtcttaaggaattccggtcaaaacaggatttagtgaaactggacatcaacggacttccctacggcctttgcgctggatgtgtcaatttatcaaagagcgcatctccagggatcaacgtcccgcctgggacaaaccgacctggattgggtcagaacgaaaacctctctgccatcgagggaaaaggcaaggtcggagggctgaaaactcgatgctcatcctgtaacgtcaaattcgagtcagaaagtgaactacaaaaccacatccaaactatccacagagaactggtgcctgactcaaacagtactcaattgaagacgcctcaggtgagtccaatgccccgaatctctccttctcagtctgatgagaaaaagacgtaccagtgtattaaatgtcagatggtcttctacaatgaatgggatatccaagtgcatgtggccaaccacatgattgacgaggggctaaatcacgaatgtaagctttgcagccagacctttgactcacctgccaaactgcaatgtcacctgatcgaacactccttcgaagggatggggggtacctttaagtgtccggtttgctttacggtttttgtgcaagctaacaaactgcaacagcacattttttcagcacatggtcaagaagacaaaatttacgattgcacccagtgcccgcagaaattctttttccagaccgagttacaagtccacaccgccactccgagacagagctag

SEQ ID NO: 247681 - DNA, 4038 bp, synthetic construct
  misc_feature 1..4038: note = Description of Artificial Sequence: Synthetic coding sequence
  source 1..4038: mol_type = other DNA
ttcctctctgactacgtgcagtcagaatcactaagagttcgaggccctttatggagtcacccggacggatttgggggtctggcttccatctttcattactatgtcgattataggtcagactcagctgtgcaggacctcgccgatccaaattgtaaactggaagataagaccgaagatggcgaagccctggactgcaagaagcggccagaggatggtgaagaacttgaggatgaagccgtgcacagttgtgattcatgcttgcaggtgtttgaatctctgagtgatattaccgaacacaagattaaccaatgtcaactcacagatggagtcgatgtggaagatgaccctacatgctcatggccagcttccagcccctctagtaaggaccagacaagcccttcccacggcgaaggatgcgatttcggggaagaggagggcggaccaggtctgccatacccctgccagttctgtgacaagagcttctcacgcctgtcatatcttaagcaccatgagcagtcccatagcgacaagttgccatttaagtgcacctactgctcaagactattcaaacataagcgttccagggacaggcatattaagctccatacaggagataagaaataccattgcagtgaatgtgatgcggcatttagccgttccgatcacctcaagatccacctcaagacgcatacttccaataagccctataaatgcgccatatgtagaaggggcttcctctcatcttctagcctgcatgggcacatgcaggtccacgaaaggaacaaagatggcagccagtctggttccaggatggaggattggaagatgaaggacacccagaagtgttcccagtgcgaggaaggctttgactttcccgaagacctgcagaagcacatcgcagagtgccatcccgaatgttcccccaacgaggacagggccgctctgcagtgtgtctattgccatgagctgttcgtagaggagacatcattgatgaaccatatggaacaggtgcactccggagaaaaaaaaaattcctgctccatctgttcagagtcttttcacaccgttgaagagctttacagccacatggacagccaccagcagccagaatcctgcaatcattccaacagtcccagcctggtcaccgtaggctacacgagcgtgtccagcaccactcccgactccaacctcagtgttgattcttctacgatggtcgaggcagcacccccaattcctaagtctagaggcagaaaacgagctgcccagcagactcctgatatgaccgggccatcctccaaacaggcaaaagtgacctatagttgtatttactgcaataagcagctttttagctctttggcggttctccagatccatttgaaaactatgcacctggacaaacccgaacaagcgcacatttgccagtattgcctggaagtgctaccctccctgtataatctcaacgagcaccttaaacaggtgcacgaggcccaagaccccggactcattgtcagcgctatgcctgctatcgtgtatcagtgcaacttctgttccgaagttgtgaacgatcttaacacactccaagagcacatcagatgcagccatggcttcgccaatcctgccgcaaaggactctaacgcttttttttgccctcactgttacatgggcttcttgacagatagcagccttgaagagcacatcagacaggtccattgtgacttatcaggaagccggttcggaagtcccgtcctgggcaccccaaaggagcccgtcgtcgaagtgtattcatgctcttattgtaccaacagccccatatttaattccgtcctcaagctgaacaagcatataaaagaaaaccacaagaacatcccgctcgctcttaactacatccacaacggcaagaagagcagagcgctttcccccctctcacctgtggccatcgagcagacatctttgaaaatgatgcaggcagtgggaggggcaccggctagacctaccggcgagtacatctgtaaccagtgcggcgcaaaatatactagcctggattcttttcaaactcaccttaagacccaccttgatacggtactgcctaaactgacctgtcctcagtgtaacaaagagtttcccaaccaagagtcgctgctgaagcatgtgactattcactttatgataacatcaacatactacatctgtgaatcgtgcgacaaacaattcacaagtgtcgacgacctgcaaaaacatcttctggacatgcacacttttgtgtttttcaggtgcacgctgtgtcaggaagtctttgactccaaggtgtccattcagctgcatctcgctgtgaagcactcaaatgagaagaaggtgtataggtgtacctcttgcaactgggatttccggaacgaaactgatctgcagctgcacgtcaagcataatcacctggagaatcagggaaaggttcacaaatgtattttttgtggcgaatccttcggtaccgaggtggagctgcagtgtcacattactacccactcgaaaaaatacaattgtaagttctgttccaaggcctttcatgccatcatcttgctggagaagcatctgcgagagaagcattgcgtattcgagacaaagactcctaactgcggcacgaacggagcgtccgaacaggtgcaaaaggaggaagtcgagcttcaaaccctgttgaccaattctcaggaaagccacaactcccacgatggatctgaggaggacgtagacactagcgaacccatgtatggctgtgacatttgtggtgctgcgtataccatggagacattgctgcagaatcatcagcttagagatcataacatcagaccgggagagtccgctattgttaagaaaaaagccgaattgatcaaaggaaactataaatgcaatgtgtgctcacggacttttttcagcgagaacggactgcgtgaacacatgcagacccacttgggtcctgttaagcactacatgtgcccaatctgtggggaacggttccccagtctgctgactctgaccgagcacaaagtcacccactccaaaagtctggacaccggcaactgtcggatctgcaagatgccccttcagtcagaagaagagttcctcgagcattgtcagatgcatcccgacctgaggaatagtctgacaggcttccgttgtgtcgtgtgtatgcagaccgtgacttccacgctcgaattaaagattcatggaacttttcacatgcaaaagactggaaacggatcggcagtccaaacaaccggccgaggacagcatgtgcaaaaactgtataagtgcgcctcctgcttaaaggagttcagaagcaagcaggatctcgtaaagctcgacatcaatggcctgccatacggcctatgtgccggatgtgtgaacctcagcaagagcgcctctcccggaatcaacgtcccgcctggtacgaataggccaggcctgggccagaatgaaaatctttcggcgatagaggggaagggcaaagtgggtggtttgaagactagatgtagttcttgcaatgtcaaattcgaatctgaatcagagttgcaaaatcacattcagaccattcacagagaattagtgccggactcaaactctacacagctgaaaacgcctcaagtttcaccgatgccccgaatctctccaagccaatctgatgagaagaaaacctatcagtgtatcaaatgccagatggtcttttataatgagtgggatatccaggtacacgtggccaaccatatgatcgacgagggacttaatcatgagtgcaagttatgttcccagacgttcgattcacccgctaagctgcagtgtcacctgatcgaacattcgttcgagggcatgggcggtacattcaaatgtccagtgtgtttcacggtctttgtccaggcaaacaaattgcagcaacatattttcagtgcgcatggccaggaggataagatctatgactgtactcaatgcccacagaaattcttcttccagactgagttacaggttcacaccgcgactcctaggcagagttag

SEQ ID NO: 247682 - DNA, 2013 bp, synthetic construct
  misc_feature 1..2013: note = Description of Artificial Sequence: Synthetic coding sequence
  source 1..2013: mol_type = other DNA
atggccgaggtggtggctgaagtggccgaaatgccaacgcaaatgtcccccggagcggtagaaatgagcacccctatgtcggcagaaatgatggaaatgtccaccgaagtcacagaaatgacccctggggaggccctggcatcctccttgttctttcagcaccatcaattcatgtgctccgagtgtggcagcctgtacaacaccctggaagaagtattatcgcatcaggagcagcatatgctcgccgtgtccgaggaggaggccctgaccacacaaaacgtgggcctggagcccgagctggtaccaggcgctgaggggccatttcagtgtggggagtgcagccagcttatactgtccccaggcgagcttttggcccatcaggatgcccacctcagggagtctgctaatcagatacaataccagtgctgggattgtcaagaactctttccatctcccgagctttgggtggcccacagaaaagcccagcatctgagcgcaaccgttgccgagcctcctgtgccccctcccctgccccctcctactcctttacccccaccgagtcctccttctgaagtcaagatggaaccctatgagtgtcccgagtgcagcacactttgcgccaccccggaggagttccttgaacaccaggggacccatttcgacagcctggaaaaggaggaacgaaatggcctggaggaagaggaggaggatgatgaggaagatgaggaggatgacgaggagatggaagacgaagaggccatggcggaggtaggagacgatgccgttggaggggatgagagcacggctggatgggcacagggatgcggcgactgtcctcagcaccagccttctgctggggcacggaggcagcatcgtcggaccgcccacagccccgcatctgcgacacacccattccactgcagtcagtgtcagcggtccttcagctccgccaacaggctgcaagctcatggcagagcccatgtgggcggaacacatgagtgcaccacctgtagcaaggtatttaagaaggccgcaagcctcgaacagcacttgcgccttcaccgcggagaggccagatatttgtgtgttgattgtggcagaggattcgggactgagctcacgttggtggcacacaggcgcgctcacactgcaaacccccttcaccggtgccgctgcggaaaaactttctcgaacatgaccaaattcctgtaccaccgcaggacacacgcaggaaaatcaggcgctccccctacaggagcgaccgcaccacccgctcctgccgaacccactcctcctccgccaccccctgccccaccggcacagcttccctgcccgcagtgctccaagtcttttgcatccgctagtcgtctaagccggcaccggagggccgtgcacggaccacctgaacgacggcatcgctgcggggtttgtggcaaggggtttaagaaactgatacatgtgaggaatcatctgcgtactcataccggggagaggccctttcaatgtcacagttgtgggaagacgtttgcctcactggctaacttgtcgaggcatcaactgactcatactggcgcacgtccctaccagtgcttggactgtggaaaacgattcacacagagcagcaatctgcagcagcaccgtaggttacatctgcggccagtggcctttgctcgagcgccacgactgcccatcacgggcctgtacaataaaagcccgtactactgcggaacgtgcggccgttggttccgggcaatggcagggctcaggctgcaccaacgagttcacgcacgggcacgaacgttaacactacagccgcctaggtcccctagccccgcacctcccccacctccggagccgcagcagacaattatgtgcactgaactgggggaaacaattgctataattgagacatcacagccgttggcactggaagacacgctgcagttgtgtcaggcagcactgggggcatccgaagccggaggattgcttcagctggacacagcctttgtttag

SEQ ID NO: 247683 - DNA, 1581 bp, synthetic construct
  misc_feature 1..1581: note = Description of Artificial Sequence: Synthetic coding sequence
  source 1..1581: mol_type = other DNA
atggctgaagttgtagccgaggttgctgagatgcccactcagatgagccccggtgctgttgagatgagtaccccgatgtctgcagagatgatggaaatgtcaacagaggtgacggaaatgactccctcccccccaagtgaggtcaaaatggaaccttacgagtgtccggagtgctcaaccctgtgcgccactcccgaggaattccttgagcaccaaggcacccacttcgatagtctggagaaagaagagcggaacggcctggaggaggaggaggaggacgacgaggaggacgaggaggatgacgaagaaatggaagatgaagaagccatggcagaagtgggtgacgacgccgtcggaggggatgaatctaccgctggttgggctcaaggatgcggtgactgcccccaacaccagcccagcgctggggcacggagacagcacaggagaaccgcacactcacctgcttcagccacccacccctttcactgctcccagtgtcagcgatctttctcgtccgcaaaccgactccaagcccatggtagggcccatgtgggcggtactcatgaatgcactacttgctccaaagtgttcaagaaggcggcaagcttagagcagcatctaagacttcaccgcggagaggccaggtacttgtgcgtagactgtgggaggggctttggaacagagcttacacttgtggcccatcgcagggcgcatacagcgaaccccctgcacaggtgtaggtgtggaaagacattcagtaacatgacaaagttcttgtaccatcgcaggactcacgcagggaaaagcggtgctccgcctactggggctacagccccaccagcacccgctgagcctaccccccctcccccaccgccagctcctccagctcagcttccctgtccccaatgctccaaatcttttgcaagcgcttctagactgagtaggcataggagggctgtccacggccctcctgaaaggagacatcgctgcggagtgtgtggaaagggcttcaagaagctaatccatgtgcgcaatcatctgcggacgcacaccggcgagcggcctttccagtgccacagctgtggcaagacatttgctagtctagcgaaccttagtcgacatcaactgacccataccggagccaggccatatcagtgtctggactgcgggaagcgtttcacccagtcctcaaacctccaacagcatcgacgacttcacctgcggcctgttgctttcgcaagagctcccaggctgccaataacgggactgtataataaatctccctattattgcggcacatgcgggaggtggtttcgcgcaatggctgggctgcgcctgcaccagagggtgcatgctcgagctagaaccctgactcttcaacccccacggtcccccagccctgccccacctccaccccctgagccgcaacagacaattatgtgtaccgagctcggcgagaccatcgctatcattgagacttcgcagccactggcactggaggatacactccagctctgccaagccgcacttggcgctagcgaggcgggaggtctgctgcagctcgacacagccttcgtctag

SEQ ID NO: 247684 - DNA, 1983 bp, synthetic construct
  misc_feature 1..1983: note = Description of Artificial Sequence: Synthetic coding sequence
  source 1..1983: mol_type = other DNA
atggcacacgcactagtgacatttagagacgtcgctatcgacttttcacagaaggaatgggaatgccttgacaccacacagagaaaactgtaccgcgatgtaatgctggaaaattacaacaatctggtttctctcgggtacagcggtagcaaacccgatgtgattacactgttggaacaaggtaaagaaccttgtgtcgttgccagggatgtcactggccgacaatgccccggacttctttcccgtcacaagacaaagaagcttagtagcgagaaagacatccatgaaataagtctgtcaaaggaatcgatcatcgagaagtcaaagaccttgaggctgaagggaagcatcttcagaaatgaatggcagaataagtctgaattcgaggggcagcaggggctgaaggagcgaagcatatctcagaaaaagattgtgtccaagaagatgtccacggataggaaacgcccatccttcaccctcaaccagagaatccacaacagcgagaagtcatgtgacagccatctcgtacagcatggaaagatcgacagtgacgttaagcacgattgtaaggagtgtggatctactttcaacaatgtctaccagcttaccctccaccaaaagatccacaccggggaaaagtcttgtaagtgtgagaaatgcgggaaggtgttctcacattcctatcagctgacgctccatcagaggtttcataccggggagaaaccgtatgaatgccaagaatgtggtaaaacattcaccctctaccctcagttaaatagacaccagaagatccacaccggcaagaaaccctacatgtgtaagaaatgtgataaagggtttttcagcaggctggagctcacgcagcataagcggattcatactggaaaaaagtcgtatgagtgcaaagagtgcggaaaggtcttccagctgattttttacttcaaagagcatgagagaattcataccggaaaaaagccttatgagtgtaaagagtgtgggaaagcattttctgtgtgcggccagttaacaaggcatcaaaagatccacaccggtgtgaaaccttatgagtgcaaggaatgcggtaaaaccttccgcctatccttttatctgaccgagcatcgccgaacccatgcaggtaaaaaaccttatgagtgtaaggaatgcggaaagagtttcaacgtaaggggtcagctgaatcggcacaagaccattcacaccgggattaagccttttgcctgcaaagtgtgtgagaaggccttttcgtattcaggggacctgcgagtgcattcccgaatccataccggggaaaagccttatgagtgcaaggaatgtggaaaggcattcatgctgagatccgtgctgaccgaacaccagagactgcataccggagtcaagccttatgagtgcaaagagtgcggaaagacgtttcgcgtgagatcacagattagcctccataaaaagattcacactgacgtgaaaccctataaatgcgtgcggtgtggcaagacttttaggtttggcttctatcttactgagcaccagcgcatccataccggcgaaaaaccttacaagtgcaaagaatgcggaaaggctttcattcggagaggcaatctgaaggagcaccttaaaatacactctgggctgaaaccctacgattgtaaggagtgtgggaagtctttttccagacgaggccagtttaccgagcaccagaagatccatacaggtgtgaagccgtataaatgtaaggaatgtgggaaagccttctcgcgtagtgtggacctcaggattcatcagagaatccacacaggggagaaaccatacgaatgcaaacagtgcggaaaggcatttcgacttaattcacatcttactgaacaccagagaatccatacaggagagaaaccttatgaatgcaaggtttgccgcaaagccttccgacagtacagccatctctatcagcaccagaaaactcacaacgtgatttag

SEQ ID NO: 247685 - DNA, 1887 bp, synthetic construct
  misc_feature 1..1887: note = Description of Artificial Sequence: Synthetic coding sequence
  source 1..1887: mol_type = other DNA
atggcccacgccctggtgacgttccgagacgtggccatcgatttcagccagaaggaatgggaatgtcttgacacgacccaaagaaagctgtatagggacgtgatgttggaaaattacaataatctggtgtccctaggactgctgtcgagacacaagactaaaaaattgtcctctgaaaaagatatccacgagatctccttgagcaaagagagcatcatagagaagtcgaagacgttacggctaaaagggtcaattttcagaaatgaatggcagaacaaatccgagttcgagggacagcagggacttaaggagcgcagtatctcccagaagaaaatcgtgtcaaaaaagatgtctacagatagaaagcggccaagcttcaccctaaaccagcgcatccacaacagtgagaaaagctgtgactcccacttagttcagcacgggaaaatagactctgacgttaagcacgactgtaaggagtgtggatcgacattcaacaatgtctaccaattgaccctccaccagaaaatccacactggagagaagtcctgcaaatgtgaaaaatgtgggaaagtcttcagtcattcttaccagttaaccctccatcagagatttcatacaggcgaaaagccttatgaatgtcaagagtgtggaaaaacttttactctgtacccccagcttaaccggcaccagaagattcatacgggcaaaaaaccttacatgtgcaagaagtgtgacaaaggctttttcagtcggctcgaactgactcagcacaaacgtatacacactggtaagaaaagttacgaatgcaaggagtgcgggaaagtcttccagctgattttctatttcaaggagcatgagcgaatccacaccgggaaaaagccctatgaatgcaaagagtgtggtaaagccttttctgtctgcggccaactcacccgccatcaaaagatccatactggcgtgaagccctacgagtgcaaggaatgtggcaaaaccttccgtctctcattctatctgaccgaacaccggagaacccatgcaggcaaaaaaccttatgagtgcaaggagtgcggcaaatcctttaacgtgcggggacagctgaaccgtcataagaccatacataccggaatcaaaccctttgcctgcaaagtgtgtgagaaggccttctcatactccggcgatcttagggtgcactcgcgaattcacacaggcgagaaaccctatgaatgcaaggaatgcgggaaagcatttatgctccgtagtgtccttacagaacaccaaagactccacacgggagtcaagccatacgaatgcaaggagtgcggcaaaacctttcgagtaaggtcacagatttcacttcacaaaaagattcacaccgatgtaaagccctacaagtgcgtgaggtgtggtaaaacatttcgctttgggttttacttgacagagcatcaacggattcacaccggagaaaaaccttacaaatgcaaggagtgcggcaaggcgttcatccgcaggggcaatctgaaagagcatctgaaaatccattccgggctgaagccgtatgactgtaaggaatgtggaaagtccttctcccggagaggacagtttacagaacaccagaagattcatactggggtaaagccgtataaatgcaaggagtgtggaaaagccttcagccggtccgtggacctcagaatacaccagcgtatccatactggagagaagccctacgaatgcaaacagtgcggcaaagctttccgtctgaacagccatttgacagagcaccagcgtatccacactggagagaagccatatgaatgtaaggtatgcaggaaagctttcaggcagtacagccacctgtaccagcatcaaaaaactcataacgtaatctag

SEQ ID NO: 247686 - DNA, 1887 bp, synthetic construct
  misc_feature 1..1887: note = Description of Artificial Sequence: Synthetic coding sequence
  source 1..1887: mol_type = other DNA
atggctcatgccttagtcactttccgagacgtcgcaatcgatttttcacagaaagagtgggaatgcctggataccacacagcggaagctataccgcgatgtcatgttggagaactacaataacctggtgtctttagggctcctgagcagacataaaaccaagaagctctcatcagagaaggacatacatgagatttcgctcagtaaggagtccataattgagaagtctaagacgctgcgtctgaaggggtccatctttcgtaacgagtggcagaacaaatctgaatttgagggacagcaggggttgaaagaaagaagtatatcccagaagaagatcgtgtctaagaagatgtccaccgatcggaaacggcctagcttcaccctgaatcagaggatccataatagtgaaaaatcttgcgactctcatctggtccagcatgggaagatcgattcagacgtgaaacatgactgtaaagagtgcggatctacattcaataatgtctaccagctgaccctacatcagaagatacatacgggtgaaaagtcctgtaagtgtgagaaatgtgggaaagtcttttcccatagctaccagctgacgcttcaccagagattccataccggagagaaaccttatgaatgccaagagtgtggcaagactttcactctgtatccacaactcaatcggcaccaaaagatacacacaggtaagaagccttatatgtgcaagaagtgtgacaagggtttttttagtcggctggaactgacacagcataaacggatccacaccggtaagaagagctacgagtgtaaggaatgcggtaaggttttccagttaatattttactttaaagagcatgagcgtattcacacgggcaaaaagccttatgaatgtaaagagtgtggcaaggccttctcagtttgcggacagctcacgcgccatcaaaagatacatacaggcgtcaagccatacgagtgcaaggagtgcggaaagaccttccggctttccttttatctgaccgagcacaggaggacccacgcgggaaaaaaaccctacgaatgcaaggaatgcggaaagagctttaacgtgcggggtcagctgaatcgtcataagacgattcataccggcattaagcccttcgcttgcaaggtgtgcgagaaggctttcagctacagcggcgatctacgggttcacagccggattcacactggcgaaaagccatacgagtgtaaagagtgcggcaaggcctttatgctgaggagtgtcctaaccgagcaccagcggctgcacacaggtgttaagccgtacgagtgcaaggagtgtggaaaaaccttccgggtgcggtcacagatcagtctccacaaaaagatacacaccgacgtgaagccttacaaatgcgtgcgttgcgggaaaaccttccggtttgggttctacctaaccgagcatcaacggatacacaccggcgaaaagccctacaagtgtaaagagtgcggaaaagcctttatcagacggggaaatcttaaggagcacctcaagattcattcaggtctgaagccctacgactgcaaggaatgcggcaagtcgtttagcaggcgaggacagtttaccgaacatcagaaaattcacacaggcgtcaagccttataagtgtaaggaatgcggcaaggccttctcacggagcgtggaccttcggatccatcagaggatccatacaggtgaaaaaccctatgaatgtaaacagtgcggaaaggcctttcgactcaacagtcatcttaccgaacatcagaggattcacaccggtgagaagccatatgagtgcaaagtatgcagaaaagcctttcgccagtactctcacctctatcagcaccaaaagacccacaacgttatctag

SEQ ID NO: 247687 - DNA, 1983 bp, synthetic construct
  misc_feature 1..1983: note = Description of Artificial Sequence: Synthetic coding sequence
  source 1..1983: mol_type = other DNA
atggctcacgcccttgttaccttcagagatgtggcgatcgatttctcccagaaagagtgggaatgtttagatactacccagcgcaaactgtatagagacgtcatgctggagaattataacaacctagtgtcactgggttatagtggcagcaagccagacgtgatcacactgttggagcaaggtaaagagccctgtgtcgtcgcgagagatgttaccgggcgtcagtgccctggtttactgtccaggcacaagaccaagaaactgagcagcgagaaagacattcatgaaatatccctgtcaaaagagtctattattgaaaagtcgaagacgctgaggcttaagggtagcatcttccgaaacgagtggcagaataaatccgagtttgagggccaacagggcctgaaagaacgatctatcagccagaaaaaaatagtgtccaagaaaatgagcaccgacaggaagcggccatcctttactttgaatcagaggatccacaattctgagaaatcttgcgatagccaccttgtgcaacacggaaaaatcgacagtgacgtgaagcatgattgtaaggagtgcggatccacatttaacaatgtgtatcaattaactttacaccagaaaattcatacaggggaaaagtcatgcaaatgtgaaaaatgcggcaaagtgttcagccattcctaccaactgactctgcatcagagattccacactggagagaagccttacgagtgccaggaatgcggcaaaacatttacgctgtatccgcagctcaacaggcaccagaagatacacactggtaagaaaccctacatgtgcaagaaatgcgacaaaggattcttcagccgacttgaattgacccagcacaagcgcatacacacagggaaaaaaagttatgagtgtaaagagtgcggaaaggtgtttcagctgatcttttattttaaggagcacgagaggatccacacaggaaaaaagccatacgagtgcaaagaatgcggaaaggcttttagcgtctgcggccagctcacccggcatcagaaaattcacacaggagtcaagccatatgaatgtaaagaatgtgggaagacgtttaggctgagtttttacttgacagagcaccgccgaacccacgctggaaaaaagccgtacgaatgtaaggaatgtggcaagagtttcaatgtgcggggacagttaaacaggcacaagacgatccatacaggaattaaacccttcgcctgtaaggtgtgcgagaaggcctttagctattccggcgatctgcgagtgcactctcgtattcacaccggggagaagccatatgaatgtaaggaatgtggtaaagcctttatgctacggagcgtgctgacagagcaccaaaggctccacactggggtgaagccttacgagtgcaaggaatgtggaaagacctttagggtccgatcccaaatttccctgcataagaaaatccatacagacgttaaaccctacaagtgcgtgagatgtggcaagacctttaggtttgggttctatttgaccgagcatcagcgcatccatacaggcgaaaaaccttataaatgcaaggaatgcgggaaggccttcatcaggagagggaacttgaaggaacacctcaagatccactcaggattaaagccatacgattgcaaagaatgtgggaaatcctttagtcggcgaggacagttcacagaacaccaaaagatccatacgggcgtgaagccttataagtgtaaggaatgcggcaaggccttcagtcgatccgtggacctgcgcattcaccagaggattcacactggtgagaaaccatatgagtgcaaacaatgcggtaaagcattccggctgaactcccacttgactgaacatcagcggatacatacgggggagaaaccgtacgagtgtaaagtgtgccgaaaggcttttcgccagtactctcacctgtatcagcaccaaaaaactcacaatgtgatttag

SEQ ID NO: 247688 - DNA, 1500 bp, synthetic construct
  misc_feature 1..1500: note = Description of Artificial Sequence: Synthetic coding sequence
  source 1..1500: mol_type = other DNA
atggcacaagggctggtgacatttcgggacgtagccattgagttctctctcgaagagtggaagtgtttagagcctgctcaaagggacctgtatcgcgaagtcacgcttgagaacttcgggcacttggcttctttggggctgtccataagcaagccagatgtggtttcacttcttgaacaaggcaaagagccatggatgatcgccaacgatgtcactggcccttggtgcccagacttagagtcgagatgtgaaaagtttctgcagaaagacatcttcgaaatcggcgcatttaattgggagatcatggaatctttgaagtgcagcgatcttgaaggaagtgattttagggctgattgggagtgcgaaggtcagttcgagaggcaggttaatgaggaatgctacttcaaacaggtgaacgtgacatatggacacatgcccgtttttcagcaccacacctctcacaccgtaaggcagtcacgtgaaactggggagaagctgatggagtgccatgagtgtggcaaggctttttctaggggttcacatttaattcagcaccagaaaatacatacgggcgagaaaccttttggttgtaaggaatgcggtaaggcctttagccgagcttcacacctggtacagcatcagcgcattcacaccggcgagaagccatatgattgtaaagactgcggcaaggcatttggcagaaccagcgagttgatacttcaccaacgtctgcacacaggcgtaaagccatatgagtgtaaggaatgcgggaaaacattccggcagcacagccaactgattctgcaccagcggacacacacaggcgaaaagccatatgtctgtaaagactgcggaaaagccttcattagaggctcacagctgaccgtacacaggcgaatccatacaggtgcgaggccgtatgagtgtaaagaatgcggcaaggcatttaggcaacactcccagctcaccgttcaccagcggatccacaccggtgaaaagccttacgagtgtaaggagtgtggaaaaggatttatacattcatccgaagttacccggcaccagcgaatccactccggcgagaagccctacgagtgcaaagagtgtggcaaagcttttcgccaacacgcccagctgacccgacatcaaagggttcacaccggggatagaccttacgagtgcaaagactgtgggaaggccttttcaaggtccagctacctcattcagcaccagaggattcatactggagacaagccctacgaatgcaaggaatgtggtaaagcattcatccgtgtgtcgcagttaacccaccatcagcggatccacacttgcgagaaaccctatgagtgtagagagtgcgggatggcattcatcagatccagccaattaacagagcaccaaagaatccatcccggaatcaaaccttatgagtgtcgcgagtgtggccaagctttcatcctgggaagtcagctcatcgagcattacagaatccacactggatag

SEQ ID NO: 247689 - DNA, 1620 bp, synthetic construct
  misc_feature 1..1620: note = Description of Artificial Sequence: Synthetic coding sequence
  source 1..1620: mol_type = other DNA
atgcgcagaggcccatgggagcgctggagcctggctagccacagactggatgcgggattgtgcacatgcccgagggaagaatcccgggaaattagagccggacagattgtgctgaaggctatggcccagggccttgtaacctttagggatgttgcaatcgagttctcgctggaggagtggaagtgcttggagcccgctcagagggatctgtacagggaagtaacactggaaaactttggtcatttagcatcactcggactgtcaatatctaaacctgacgtcgtgtccctgctcgaacaggggaaggaaccgtggatgatcgcaaacgacgtgaccgggccatggtgccctgatctagagagccgatgtgaaaagtttctccagaaagatatattcgaaatcggcgcatttaactgggaaatcatggaaagcctcaagtgctccgatttagagggatcagactttagggccgactgggagtgcgaggggcaattcgagagacaagtgaacgaggagtgttatttcaagcaggtaaatgttacctacggccacatgccagtgttccaacaccacacaagccacacagtccggcaatccagagaaacaggagaaaaattgatggagtgtcacgaatgcggtaaggcattttctcgcggttcccatctgatccagcaccaaaagattcacacgggagagaagccatttgggtgtaaagaatgtggaaaggccttttcccgagcctctcacttagtgcaacaccaaagaatacatacgggcgagaagccatacgattgtaaggattgcggcaaagctttcggtcggacatccgaactcatcttgcatcagcgcctgcataccggggttaagccatatgaatgtaaggagtgcgggaagacctttaggcagcactctcagctgatactgcaccagcgcacccacaccggagagaaaccttatgtgtgcaaggactgcggtaaagcatttatcagaggatctcaactgaccgtccacaggaggatccacaccggcgctcgcccatacgagtgcaaggaatgcggaaaggcctttcggcaacattcccagctgacggttcaccagcgtatacacactggcgagaaaccctatgaatgcaaggagtgcggaaaaggttttatccatagcagtgaagtgactaggcatcagagaattcatagtggggaaaagccttatgagtgtaaggagtgcgggaaggccttccgacaacacgcccagctgacgcgccaccaacgcgttcacactggtgaccgaccttacgagtgcaaggattgtggcaaagccttctctcgttcttcctatctgatccagcaccagcgcattcacaccggggacaagccctacgagtgcaaagagtgcggcaaggcattcatccgcgtgtcacagcttacacatcaccaaaggattcacacctgcgagaaaccatatgaatgccgcgagtgcggtatggcgttcatcagatcctctcagttaaccgagcaccagcggatccaccccggaattaagccttacgagtgtcgagaatgcggtcaggcttttattctgggaagccagctgatagagcactatcggattcataccgggtag

SEQ ID NO: 247690 - DNA, 1500 bp, synthetic construct
  misc_feature 1..1500: note = Description of Artificial Sequence: Synthetic coding sequence
  source 1..1500: mol_type = other DNA
atggcccagggcctggttacatttagggatgtggccatcgaattttctctagaggagtggaaatgcctcgagccggctcaaagagacctgtaccgtgaggttaccctggaaaacttcggccatttggcgtctctaggcctgagtatcagcaaaccggacgtcgtgtcactgctggagcagggaaaagaaccttggatgatcgcaaatgacgtgactgggccatggtgtccagacttggagagcaggtgcgaaaaatttctacagaaagacatcttcgagattggagcgtttaactgggagatcatggagtccctaaaatgttcagacctggagggaagcgattttagagccgattgggagtgcgagggacagtttgagcgtcaagtcaacgaggagtgttacttcaagcaggtaaatgtgacatatggccacatgccagtatttcaacatcatacatcccacaccgtgcgtcagtcacgggaaactggggagaaactcatggagtgtcacgagtgcggtaaagctttctcgcgagggtctcatttgattcagcatcagaagatacatactggcgagaaaccttttgggtgcaaggagtgtgggaaagctttctcaagggcctcacatctcgtgcagcatcagagaatacataccggggagaagccttacgactgcaaggattgtgggaaggctttcgggagaacgtctgaactgattctgcatcagcgccttcacaccggggtaaagccatatgagtgtaaagagtgtggcaaaacctttcgccagcattcacagttgattctccaccaaagaactcacaccggggagaaaccgtatgtgtgtaaagattgcggaaaggccttcatccgagggtcacagctgactgtgcatcgaaggatacataccggagctagaccgtatgaatgtaaggaatgcggcaaagctttcagacagcatagtcagttgacagtccaccagaggatccacacaggcgaaaagccatacgagtgtaaggagtgtggaaaaggcttcatccattcctctgaggttaccaggcatcagcggatccacagcggcgagaagccatacgagtgtaaggagtgcggaaaagccttccggcaacacgcgcaactaacacggcaccagagggtgcacaccggggatagaccgtacgaatgcaaggactgtggtaaagccttcagtcgatcctcctacctgattcagcaccagcggatccatacgggcgacaagccctacgagtgcaaggaatgtgggaaggccttcataagggtgtctcagcttacacaccaccaaagaatccacacgtgcgaaaaaccctacgaatgtagagagtgcggcatggctttcatccgatcatctcagctgacagagcatcaacgaattcatccaggtattaagccctatgagtgtagggagtgcggtcaggcattcattctaggttctcagttgattgagcactaccggattcacactggctag

SEQ ID NO: 247691 - DNA, 2061 bp, synthetic construct
  misc_feature 1..2061: note = Description of Artificial Sequence: Synthetic coding sequence
  source 1..2061: mol_type = other DNA
atgacagagagtcagggcacagtgacttttaaggatgtggctattgactttactcaggaggagtggaaaagattggatcctgcccaacggaagctctaccggaatgtaatgctggaaaactataacaacttgatcactgtgggttaccccttcacaaaaccggatgttattttcaagctggaacaagaagaggagccttgggtcatggaggaggaggttcttcgtcggcattggcagggcgaaatttggggggtagatgagcaccagaagaaccaggataggctcttacgccaggtagaggtgaagttccagaagaccctgaccgaagagaaagggaacgagtgccaaaaaaagtttgctaacgtgttccccctgaacagcgacttttttccaagccggcacaacctgtacgagtacgacctattcgggaaatgtctggaacacaactttgattgtcataataacgttaagtgtctcatgcggaaagaacattgtgagtataatgagcccgttaaatcatacggaaatagctcaagtcacttcgttattaccccattcaagtgtaatcattgtggaaagggcttcaatcagacactggatctgatccggcacctacgcatccacacaggagagaagccatacgagtgtagcaactgccgcaaggcctttagccataaggaaaaactcatcaagcattacaagattcactcccgcgaacagtcatataaatgtaatgagtgtggtaaagcctttattaaaatgagcaacctgattcgccatcaacgcattcacactggcgagaagccctacgcatgtaaggaatgcgaaaagtcattcagccagaagtctaaccttattgaccatgaaaaaatacataccggagaaaagccttatgagtgtaacgagtgtggcaaggcatttagtcagaaacagagtcttatcgcccaccagaaagtgcacacaggcgagaagccctacgcatgcaatgagtgtggaaaagcttttcccagaatcgcgtccctagctttgcatatgcgaagtcacaccggagagaagccgtacaagtgtgataaatgtggtaaggccttttcccagttcagcatgctgatcatccacgtacggatccataccggcgaaaagccgtacgagtgtaacgagtgcggcaaagctttttcccagtccagtgctctcaccgttcatatgagaagccatacaggggagaaaccgtatgagtgtaaagagtgcagaaaagctttcagccacaaaaagaacttcatcacacatcaaaagatacatactcgcgaaaagccctatgagtgtaatgagtgtggcaaggcatttattcagatgtcaaatcttgtgagacatcagagaatccatactggtgaaaaaccatacatctgcaaggagtgtggtaaggcattcagccagaaaagtaatcttatcgcacacgagaaaattcacagtggcgaaaaaccatacgagtgtaacgagtgtggaaaggcctttagtcaaaaacagaactttatcacccatcagaaagtgcacaccggagaaaagccatacgattgcaacgaatgtggaaaggctttcagccagattgcatccctaacattacatcttcgcagtcacaccggtgagaaaccatacgagtgtgataagtgcggtaaggcttttagccagtgtagtctactgaatctccacatgagatctcacacgggggaaaaaccttacgtctgcaacgagtgtggcaaggcgttctcacagcggacatcactgatagtccacatgagaggccacacgggcgagaagccatacgaatgtaacaaatgcggcaaagctttcagccagtcaagttccctgacaatccatatcagaggacacaccggcgagaaaccattcgactgttccaaatgcggcaaggccttctcacagatcagctctcttacacttcacatgaggaagcacaccggcgaaaagccctaccactgtatcgagtgtggtaaagccttctctcagaagagccatttggtgcggcaccaaagaattcatacccactag

SEQ ID NO: 247692 - DNA, 1029 bp, synthetic construct
  misc_feature 1..1029: note = Description of Artificial Sequence: Synthetic coding sequence
  source 1..1029: mol_type = other DNA
atgaggagccatacaggagagaaaccatataaatgtgacaaatgtggcaaagccttcagtcagttttcgatgctaattatccatgtgcgcatccataccggtgaaaaaccttatgagtgcaacgagtgcgggaaagccttttcacagtccagtgcacttacagtacacatgaggtcccatacaggggagaagccgtatgagtgcaaggaatgcaggaaggccttctctcacaagaagaactttattacccaccagaagattcacacacgagaaaagccctatgagtgcaacgaatgtgggaaggcatttatccagatgagtaacctcgtgcgccatcagcggatccatactggagagaaaccatacatatgcaaagagtgcggtaaggccttttcacagaagagtaacttaatcgcacatgaaaagattcattccggggaaaaaccctacgagtgcaatgaatgcggcaaggcttttagtcagaaacagaacttcatcacacaccagaaggtgcacactggcgagaagccctacgactgcaacgagtgcggcaaggccttcagtcagattgcatcattaacattgcacttgagatcacacactggtgagaaaccctatgaatgtgataagtgcgggaaggcgttctcccaatgcagcctgctgaacctgcacatgcggagccataccggggaaaaaccgtacgtttgtaacgaatgcggtaaggctttttctcagaggacatccctaattgtacacatgagaggccacactggggagaagccttacgaatgtaataaatgcgggaaagcgtttagtcaatctagctcactgactatccacatccgcggtcataccggcgagaagccctttgattgcagcaaatgtgggaaggcattctctcaaatcagcagcctaacgctgcatatgaggaaacatacaggtgaaaaaccctatcactgtattgaatgcggcaaggccttttcgcaaaagtcccatctggtccggcaccagcgaattcatacccactag

SEQ ID NO: 247693 - DNA, 1584 bp, synthetic construct
  misc_feature 1..1584: note = Description of Artificial Sequence: Synthetic coding sequence
  source 1..1584: mol_type = other DNA
atgaggaaggagcattgcgagtacaacgagccagtaaaaagctacggcaactcatcctcacacttcgtcataactccatttaaatgcaaccactgcggcaaagggtttaatcagactttggatttgatccgtcacttgaggatccacacaggagaaaagccctatgaatgctcaaactgtcgcaaggctttcagccacaaagaaaaactgatcaagcattataagatacactcccgagaacaatcatacaaatgtaatgagtgtgggaaggcattcatcaagatgtctaacctgattcggcaccagcgcatccatacaggagagaaaccttacgcttgtaaggaatgtgagaaatcttttagccagaaatccaacctgatcgatcatgaaaaaatacatacgggtgaaaagccttatgaatgcaatgagtgcgggaaagcattcagtcagaagcagtccctgattgcccaccaaaaagtgcatacaggggaaaaaccttatgcgtgcaatgagtgtggaaaagcctttccccgaattgcatctcttgcccttcatatgaggagccataccggcgagaagccatataaatgtgataaatgtggtaaagccttttcccagttcagcatgctcatcatccatgtccgaatccacactggtgaaaaaccctatgagtgtaatgaatgcggaaaggccttctctcagtcttccgccctgacggtgcatatgcgatcacacaccggagagaagccttatgaatgcaaggaatgtcggaaggccttctctcacaaaaagaatttcataacccaccagaaaatccatacccgcgagaaaccatacgagtgcaacgaatgcggcaaggccttcatccagatgagcaacttagttagacaccagcgaatacacactggtgagaagccatacatttgtaaagaatgcggcaaagccttttctcaaaagagtaatctgattgcacacgagaaaattcactccggcgaaaagccctatgaatgtaatgagtgtggcaaggctttttcccagaagcagaatttcattacacatcaaaaggtccacacaggcgagaaaccatatgattgtaatgagtgcgggaaagccttctcccagattgcgtcactgacactacacttgagaagccataccggagaaaagccttatgaatgcgataagtgcggcaaggcgttctctcaatgttctctcctgaacctgcacatgcggtcccacacaggagagaagccttacgtttgtaatgagtgtggaaaagcattcagtcagcgaaccagcctcatcgtccacatgagaggccacacaggagaaaaaccatacgagtgcaacaaatgcggaaaagcatttagtcagagctcatcactcacgatccatatccgcggtcataccggtgaaaagccattcgattgtagtaagtgtgggaaggccttttcacaaatctcttctttgacgctgcacatgaggaaacacaccggagaaaagccctaccattgcatcgagtgtggcaaggcctttagccagaaaagccacttggtgaggcaccagcgaatccatactcattag

SEQ ID NO: 247694 - DNA, 1551 bp, synthetic construct
  misc_feature 1..1551: note = Description of Artificial Sequence: Synthetic coding sequence
  source 1..1551: mol_type = other DNA
atgttcgagcagcttaaacctatcgaacccagagactgttggcgtgaggcaagagtgaaaaagaaacccgtgacattcgaggacgttgcagtgaactttacgcaagaagaatgggactgtctggatgcatcccaacgagtactgtaccaggatgttatgtcggagacctttaagaatctgacaagtgtcgcccgaatctttctccataaaccggagctcattaccaagctcgagcaagaggaagagcaatggcgggagttcgtacacctgccgaataccgagggcctctcagaaggtaagaaaaaagagctgcgggagcagcatccttctctcagagacgaaggcacttcagatgacaaggttttcctggcttgccgcggtgccggacagtgccctctgtcggcccctgccggaacaatggaccgtacgcgcgtgcttcaagcaagtcaggcaggaccgccattcttttgttacacctgcggtaagtgcttcagccgccgatcctacttgtactctcaccagttcgtgcataatcccaaactcacaaatagctgcagccagtgcggaaagctcttccgttccccgaaaagcctgtcttaccatagacgcatgcacctgggagaacgcccattttgctgcaccctctgcgacaaaacctactgtgacgcctctggcctgtcaagacaccgacgagtgcacttagggtaccgccctcattcctgttcagtctgcggaaagagtttccgcgaccagtccgagctgaaacggcatcagaaaatccatcagaatcaggagcctgttgatgggaatcaggaatgtaccctgcgcattccaggtacccaagcggagtttcagacgccaatagcacgaagtcagcggagcatacagggcttgctcgatgtcaaccatgcccctgttgccagaagccaagaacccatattccggacagagggcccaatggcacaaaatcaggcctctgtgctgaagaaccaggctccggttacacgaacccaggctccaattactggtactctctgtcaggatgcaagatcaaatagccaccctgttaaaccgtccagactcaacgtgttctgctgtccccattgctctctaactttttcgaagaaatcctacctgagccgccaccagaaagcccacctaaccgagccgccaaattactgcttccactgctccaagtctttttcatccttcagccgactggtccggcaccaacagacgcattggaaacaaaaaagttacctctgtcccatctgtgatttgtcatttggtgaaaaggagggcttaatggaccattggaggggctacaagggcaaagatctctgccaatccagccaccataagtgtagagtgatcttagggcagtggctgggcttctcccacgatgtaccaaccatggctggggaggaatggaaacacgggggagaccaatctcctcccagaattcacacgccaaggcgccgaggcctgagagaaaaggcttgcaagggcgacaagacaaaagaagcagtgtcgatccttaaacacaagtag

SEQ ID NO: 247695 - DNA, 1551 bp, synthetic construct
  misc_feature 1..1551: note = Description of Artificial Sequence: Synthetic coding sequence
  source 1..1551: mol_type = other DNA
atgtttgagcaactgaaaccgattgaaccacgcgattgctggagggaggctcgagtgaaaaaaaagcctgtcaccttcgaggatgtggccgtcaattttacacaggaagagtgggattgtctcgacgcctcacaaagggtcttgtatcaggatgtcatgtctgaaacattcaagaacctcaccagtgtggcacgaatctttcttcataaaccagagttgatcacaaaactcgaacaggaggaagagcagtggagagaatttgtgcacctgccaaacaccgaaggcctaagcgaaggcaaaaagaaagagttacgcgagcagcacccatccctcagggacgagggaacttcagacgacaaagtcttcctcgcgtgccgaggtgctgggcagtgtcccttatccgcacccgctggaaccatggatagaacgcgcgtcctccaagcatcccaagccggtccccctttcttctgttatacgtgtgggaagtgtttcagtaggcgatcatacctgtattctcaccagttcgttcacaatccaaagctgacaaatagctgttctcagtgcgggaaattattccggtcacccaaaagcctcagctatcacaggcgcatgcatctgggagaacgcccattttgctgtaccctgtgtgataaaacctactgtgacgcctctggcctatctagacatcgacgcgttcatcttgggtacaggcctcacagttgctcggtgtgcggtaaatctttccgggatcaaagtgagctaaagagacaccaaaagatccaccagaatcaagagccagtggatgggaaccaggagtgcactctgagaattcctggaactcaagctgagtttcagacccctattgcaagaagccaacgctcgatccaggggcttcttgacgtcaatcatgccccagttgcaaggtcacaagagcctattttccgcactgagggtccgatggcacagaaccaagcttcagtcctgaagaaccaggccccagtgacgcgaacacaagcccctatcaccggcacactctgccaggatgccaggtccaactcccaccctgttaaacctagtcgcttgaacgtgttttgttgcccacactgcagccttacatttagcaagaagagttatctaagcagacaccagaaagctcacttgactgagccacccaattactgctttcactgtagtaaatcatttagcagtttcagtaggctggtgcgacaccagcagacccactggaaacagaagtcctatctctgtcccatttgcgatttgtcctttggtgaaaaagaagggttgatggatcactggcggggatataagggcaaagatctgtgccaaagctcccaccataaatgccgggtgattctcggacagtggctcggctttagccatgacgtccccactatggcaggcgaagagtggaaacacggcggagatcagtctccaccccgaattcacactccccgtagaagaggacttcgcgagaaggcctgtaaaggagacaagaccaaggaagccgtctccatcctgaagcacaaatag

SEQ ID NO: 247696 - DNA, 1551 bp, synthetic construct
  misc_feature 1..1551: note = Description of Artificial Sequence: Synthetic coding sequence
  source 1..1551: mol_type = other DNA
atgttcgagcagctcaagccaatagaaccccgagattgttggcgggaagcgagagttaaaaagaaacctgttaccttcgaggatgtcgcggtcaactttacccaagaggaatgggactgcctggatgcatctcagcgcgtgctctaccaagacgtcatgagcgagacatttaaaaacctgactagcgtggctagaatctttctgcataaacccgaattgatcacaaaactcgagcaggaggaggaacagtggcgggaattcgtccacctccctaacactgaagggctttctgaaggcaaaaagaaagagttgcgagagcagcatccctctctccgcgatgaggggacttcagacgacaaagtgttcctggcttgccggggtgccggacagtgtccgctgtctgcccctgctggcaccatggaccgtacacgtgttcttcaggcctctcaagctgggcctccctttttttgctacacatgcggtaaatgtttctccagacgttcgtatttgtacagtcaccagtttgtgcacaatcctaagcttaccaacagctgttctcaatgtgggaaacttttccgctcaccaaaatcccttagttatcacaggcgaatgcacttaggtgagcggcctttctgttgcaccctgtgcgacaagacatactgcgacgccagcggactgagcagacacaggcgggtgcatctcggctaccggcctcactcttgctctgtgtgcggcaagtcctttagagaccagagtgagctaaaacggcatcaaaaaattcaccagaaccaagaacccgtcgacgggaatcaagagtgcacactaagaattcccggaacccaggccgaattccagacaccaattgcacgcagtcagcgctcaatccagggccttttggatgttaaccatgccccagtagccaggagtcaggagcccatattccgtactgagggaccaatggcacaaaaccaggctagcgtccttaagaaccaagctcctgtcacaaggacccaggcccctatcacgggcacgctgtgtcaggatgcccgttctaatagccatccagtgaagccctcaagacttaatgtgttttgttgtccccactgctctctcaccttttctaagaaaagctacttaagtagacaccagaaggcacatctgacagagcccccaaactactgcttccattgctcgaagtcttttagtagtttttctcggctcgtgagacaccagcagacccattggaagcagaagtcttacttatgccccatctgtgatctcagtttcggagagaaggagggactgatggatcactggcggggatacaaagggaaggatttgtgccagtcatcacatcataaatgccgcgtgatattaggccagtggctgggatttagccacgatgttcccactatggccggagaagagtggaagcatggcggagaccagagtccacccagaattcacaccccccgtcgcagaggtctgagggaaaaggcatgcaaaggtgataaaaccaaagaagcggtatctattctcaagcacaaatag

SEQ ID NO: 247697 - DNA, 1551 bp, synthetic construct
  misc_feature 1..1551: note = Description of Artificial Sequence: Synthetic coding sequence
  source 1..1551: mol_type = other DNA
atgttcgaacagctgaaacctatcgagcccagggactgctggagagaagcgagggtgaaaaagaagcccgttaccttcgaggatgtggccgtgaatttcacccaggaagagtgggattgcctcgatgcgtctcagagggttttgtaccaggacgttatgtcggaaacatttaaaaatctgacgagcgtcgccagaatcttcctccataagccggaattaattaccaagcttgagcaggaggaggaacagtggcgggaattcgtgcatctcccaaataccgagggcctgagcgagggaaagaagaaggagcttcgggagcagcatccatcgctgcgggacgaaggtacttctgacgataaggtctttctcgcctgtcggggagccggacagtgtcctctatccgcacccgctgggactatggatcggactcgagtgctgcaggccagccaagctgggccacccttcttttgttacacctgcggcaaatgcttcagccggcgaagctacctctattcccatcagttcgtgcataacccgaaactgacaaattcctgctcacagtgtggaaagctgtttcgtagcccgaagagccttagctaccataggcgcatgcatttaggtgaacggcctttctgttgcacgctgtgtgacaagacatattgcgatgcatccggattaagtaggcaccgcagagttcacttggggtatagaccacactcatgctctgtctgcggcaaatccttccgcgaccagtctgaacttaaaagacaccagaaaatccatcagaatcaggagcctgtggacggaaatcaggagtgtacgctgagaattcccggaacacaggcagagtttcaaacccccatcgcacgcagtcaaaggtccatccaggggttgctggatgtgaaccacgctccagtggcccgtagccaggaacccatcttcaggaccgaggggccaatggcccaaaaccaggcttctgtattgaaaaatcaggcccctgttacaaggactcaggcccctatcacaggaacactctgccaagacgccaggagcaattcccatccagtgaaacctagccgtctcaatgtcttctgttgccctcattgttctctcaccttttcaaaaaagtcctacctttcccgccaccaaaaagctcacttgacggaacctcccaactactgctttcactgcagtaagtctttcagttcattctcaaggctggtgagacatcagcagacgcactggaaacaaaaatcatatttgtgccccatatgtgacttgtcattcggggaaaaagaggggctcatggaccattggagaggatataagggcaaggatctttgtcagtcttcacaccataaatgcagggtcatcttgggccaatggctcggcttctctcatgacgtgccaacaatggctggtgaggagtggaaacatggcggagaccaatcgccccctagaatccatacgccccgacgcagaggccttcgggagaaggcgtgtaaaggagacaagacaaaggaggcagtgtccatactcaaacacaaatag

SEQ ID NO: 247698 - DNA, 636 bp, synthetic construct
  misc_feature 1..636: note = Description of Artificial Sequence: Synthetic coding sequence
  source 1..636: mol_type = other DNA
tgagcaaggagccaggagccgatattcaggacggaaggcccaatggcccagaaccaagcatccgtgctgaagaaccaggcccctgtgactaggacccaagcacctattaccggcaccctgtgccaggacgcgaggagcaattcacatccagtaaaaccatcacggcttaatgtcttctgttgccctcactgttcactcacttttagtaagaaaagttatctgtctagacatcagaaagctcacttgaccgagccccctaattattgtttccattgtagtaaatctttctcctcgttctcaagactggttcggcatcagcagactcactggaagcaaaagtcttatttatgccctatttgcgacctgtccttcggcgaaaaagagggtctcatggaccactggcgtggatacaagggcaaagatctgtgtcaatcttcccaccacaaatgtcgtgtgatcctcgggcaatggttaggatttagtcatgacgtaccaacaatggccggtgaagagtggaagcatgggggtgaccagagtccacctcgtatccacacccctaggcggaggggactgagggaaaaggcgtgtaagggcgataaaacgaaggaggcagtgagcattctgaaacacaagtag

SEQ ID NO: 247699 - DNA, 1551 bp, synthetic construct
  misc_feature 1..1551: note = Description of Artificial Sequence: Synthetic coding sequence
  source 1..1551: mol_type = other DNA
atgtttgagcagcttaagcccattgaacctcgggattgctggcgagaggctcgagttaagaagaaacccgtgacgttcgaagatgtcgcggtcaactttactcaggaggagtgggattgccttgacgctagtcaaagggtactgtaccaggatgtgatgagcgaaacattcaagaatctgactagcgtagcacggatcttccttcataagcctgagctcataacaaaactggaacaggaagaagagcagtggcgggaattcgtccacctccccaataccgagggtctatcagagggcaagaagaaggagctgcgggaacagcacccaagtctgcgggatgagggcaccagcgatgacaaagttttcctggcctgtcgaggcgcagggcagtgtcccctgtccgcccctgccggaacaatggaccgaacgagagtgcttcaggcctcccaagctggacctccctttttctgttatacctgcggtaagtgttttagcaggagatcctacctgtactcccaccagtttgtgcataatcccaagctcaccaattcatgttctcagtgcggtaaactttttaggtccccaaaaagcctctcataccatcgcagaatgcacctgggagagcgacctttctgctgtaccttatgtgataaaacttactgcgatgcttctgggctgtctcgccatcgtcgagttcatttaggctataggcctcattcatgttctgtctgtggaaaatcctttcgcgaccagagtgaattgaaaagacaccagaagatacatcagaaccaggagcccgtggacgggaaccaggaatgcacgctgcgtattcccggtacgcaggccgaattccaaacaccgattgcgagatcacagcgatctattcagggcttgctggacgtgaatcacgctcctgtcgcccgtagccaagagccaatcttcaggacagaaggaccgatggctcagaatcaggctagtgtgcttaaaaaccaggctccagttacacggacccaggcccctatcactgggacactgtgtcaggatgctcgaagcaattctcatccagtgaaaccctcacgtttgaatgtgttttgttgcccacattgcagtctcacattcagcaaaaagtcatatctaagtaggcaccaaaaggcccacctaactgagccaccaaactactgcttccactgctccaaaagcttcagctccttttccaggctcgtgcggcatcagcagactcattggaagcaaaaaagctacctgtgtcccatatgtgacctgtctttcggcgagaaagaagggctgatggaccattggcgcggatacaaaggcaaagatctgtgtcaatcctcacaccacaaatgtcgtgtcattctgggtcaatggttgggattttcccacgacgtcccaactatggccggtgaggaatggaagcatggaggagatcagagccctccacgtattcacactcctcggaggaggggtttgagggaaaaggcttgcaagggcgataaaactaaagaggccgtaagtatcctcaaacacaaatag

SEQ ID NO: 247700 - DNA, 1551 bp, synthetic construct
  misc_feature 1..1551: note = Description of Artificial Sequence: Synthetic coding sequence
  source 1..1551: mol_type = other DNA
atgttcgaacagctgaagcccattgagccccgtgactgttggagagaggcacgagtaaagaagaaacctgtgacttttgaggatgttgctgttaacttcacacaagaggaatgggattgcttggacgcctctcagagagtcctataccaggatgttatgtcagagaccttcaaaaacctcacatcggtagctagaatcttccttcacaaacccgaactcatcaccaaactggaacaggaagaggagcaatggagagagtttgtccatcttcctaacactgaaggcctgagcgaaggcaagaaaaaggagctgagggaacaacaccctagcctcagggatgagggcacatcagacgataaagtttttctggcctgtcgtggcgcagggcagtgtccgctgtcagctcctgcaggcactatggaccgcactcgagtgttacaggcaagtcaggctggacccccattcttttgttacacttgtggtaaatgcttttctcggcgttcctatctatacagccatcaattcgttcacaatccaaagctgacgaactcttgctctcagtgtggcaaactgtttcggtcaccgaagtccctgtcttaccatcggcgaatgcacttgggcgagagaccattttgctgcaccctctgtgacaagacctattgcgatgcttccggcttgtcccgccaccgcagggtccacctgggttatagaccccactcttgcagcgtatgcggaaaatcattccgggaccagagcgaactgaaacggcatcaaaagatccaccaaaaccaagaacctgtggatggaaatcaggaatgcaccttacgtatcccgggaactcaggctgagtttcagaccccaatagcaaggagccagcggagcatccaggggctgctggatgtgaaccacgccccagtcgccagatcacaggagcccattttccgtaccgaaggcccaatggcccagaatcaggctagcgttctcaaaaatcaggcccctgtgacaagaacacaggcccctattaccggcacgctatgccaggacgcaaggtccaactcacaccctgtgaagcctagcagactgaacgtattctgttgtccccattgctccctgacattctcaaagaagagttacctctccagacaccagaaggcccacctgacggaaccgccaaattattgttttcattgttccaaatccttctcctccttctcgcggctggtccggcaccagcaaacgcattggaagcaaaaatcttatctgtgcccgatctgtgacttgagctttggagaaaaagaagggcttatggaccattggagagggtataaagggaaggatctctgtcagtccagccaccacaagtgtagagtgattttgggacagtggctaggtttctctcacgacgtgccgaccatggcgggagaggaatggaagcacgggggagaccaatccccccctcggatacacacgccgagaaggcgcggattgcgggaaaaggcctgtaaaggtgacaagacaaaagaagctgtatctatattgaagcataaatag

SEQ ID NO: 247701 - DNA, 1551 bp, synthetic construct
  misc_feature 1..1551: note = Description of Artificial Sequence: Synthetic coding sequence
  source 1..1551: mol_type = other DNA
atgttcgagcagcttaagcccatcgagccacgggactgttggcgggaggctcgggtaaagaaaaaacccgtgacctttgaagacgtagccgtaaactttacccaagaagaatgggactgtctcgacgcttcccagagagtcctttatcaagacgttatgagtgagacttttaaaaacctaacgtccgtcgccagaatatttctgcacaaaccagagctcataaccaagttggaacaagaagaagagcaatggcgtgaattcgtgcatctaccgaacaccgagggcttgtccgagggtaaaaagaaagagctgcgagagcagcacccaagcctaagggacgagggcacctctgacgacaaggtcttcctggcatgtaggggtgccggtcagtgtcccttatccgccccagccggtaccatggatcggacacgggttttacaagcgtctcaggctggacctcccttcttttgctatacttgcgggaagtgtttcagccgacgctcgtatctctacagccaccaattcgtgcacaacccaaaacttaccaatagctgcagtcagtgcggcaagctgtttcgctcacctaagtccctctcctatcatagacgcatgcatctcggcgagcgcccattttgctgcactctgtgtgacaaaacgtactgcgacgcctctggcctgtcaagacacaggcgcgtgcacttgggttaccgcccacacagctgcagcgtttgcgggaaatcattccgcgatcagtcggagctgaagaggcaccagaaaattcaccagaatcaggaaccagttgatgggaaccaggagtgcacactcaggataccgggaacacaggctgagttccagaccccaattgccagatcgcagcgcagtattcagggcctgctcgacgtaaaccatgctcctgtcgccaggagtcaggagccaatctttcgcacagagggcccaatggcacagaaccaagcttcagtgttaaagaatcaagccccagtgaccagaactcaggcccctattactggaacactatgtcaggacgccaggtcaaactcacaccctgtgaaacctagccgcctgaatgtgttttgttgcccccactgttcattgaccttcagcaaaaagagctacttgagtcgccatcaaaaggcccacctcaccgaaccccctaattattgctttcattgctcaaagagcttttcgagtttctcacgccttgttcgccaccagcagacccattggaagcaaaaatcatatctgtgtccgatttgtgatctatcttttggggaaaaggagggcctgatggaccattggagagggtacaagggtaaggatctgtgtcagagctcccaccacaaatgccgcgtgattctgggccagtggcttggattcagccatgacgtacccactatggccggtgaggagtggaagcatggaggtgatcagagccccccacggattcacacaccgaggaggagaggccttagggaaaaagcctgcaaaggcgataagacaaaagaggcagtgtccattttgaagcacaagtag

SEQ ID NO: 247702 - DNA, 1551 bp, synthetic construct
  misc_feature 1..1551: note = Description of Artificial Sequence: Synthetic coding sequence
  source 1..1551: mol_type = other DNA
atgtttgaacaactgaaacccattgagcctagggactgctggagagaagcacgagtaaagaagaaacctgtgaccttcgaggatgtagccgtaaactttacacaggaggaatgggactgccttgatgcatctcaacgcgttctgtatcaggacgtcatgtccgaaacttttaagaacctcactagcgttgcccgtatctttctgcacaagcccgagctgattacaaaacttgagcaggaagaggagcagtggcgcgagttcgtccacttgcctaataccgagggactgagcgagggaaaaaagaaagagctccgtgagcagcacccctctctccgagacgaagggacttcagatgataaggtgtttttggcctgcaggggcgctgggcagtgtccactgagcgcaccagctgggaccatggatcgcacccgcgtgctgcaggcctcccaggccggtccacccttcttttgttatacatgtggcaagtgcttcagccgtcgatcctacctttattcgcatcagtttgtgcacaaccccaagctcaccaattcttgctctcagtgtggaaaattgtttagaagcccaaagtccttgtcctatcaccgcagaatgcacctgggggagcgacccttctgttgtacgctctgtgataagacttactgtgatgccagcggactatctaggcatagaagggtgcacctcggctataggccacattcctgttccgtctgcggcaaatcctttagggaccagagcgagctgaaaaggcatcagaagatacatcagaaccaagagcccgtggacggtaatcaagagtgtaccctccgcatcccaggcactcaggccgaatttcagacccctattgccaggtcgcagcgcagtattcagggactactggacgtgaaccatgccccagtcgcacgatcccaggaacccatattcaggacagaaggccctatggcacagaatcaagcgagcgtgctgaagaaccaggctccggttactcgaacacaggctcccatcacagggactctgtgccaggatgcgcgaagtaactcccatccagtgaagccctcccggcttaacgtgttctgctgtccccactgttccctgacctttagcaagaagtcatatctgtcaaggcatcaaaaggcacatcttactgagcctccaaactattgtttccattgcagtaagtcctttagtagcttttctcggcttgtgcgccatcaacaaacccattggaagcagaagtcctacttatgccccatctgcgatctgtcattcggagagaaggagggcctaatggaccattggagagggtataagggcaaggacctgtgccagtcctcacatcacaaatgtcgcgttatcttagggcagtggctaggcttctctcatgatgtgcctactatggcaggcgaggagtggaagcatggaggggatcagagccctccacgcattcatacacccagacggaggggcctccgtgaaaaagcgtgcaagggagataaaactaaggaagccgtgtccatcctgaaacataaatag

SEQ ID NO: 247703 - DNA, 1611 bp, synthetic construct
  misc_feature 1..1611: note = Description of Artificial Sequence: Synthetic coding sequence
  source 1..1611: mol_type = other DNA
atgtttgagcagctgaagcccatcgagcccgtgcagaagacactgccttgggtcggcgaagtcgcagcaactcttcaggaggccatgaaaagggactgttggcgggaggcaagagtcaagaaaaagccagtgactttcgaagacgtagccgtgaatttcactcaagaggagtgggactgcttggatgcttcccagagggtgctgtatcaagacgttatgtccgagacttttaaaaacttaactagcgtggccagaatttttctgcataagcctgaactaatcacgaaattggagcaagaagaagagcaatggcgggagttcgtgcatctgcctaacaccgaagggctgtccgaaggtaaaaaaaaggaactccgggagcagcacccatccttgcgggatgagggcacctcagacgataaagtcttcctcgcatgccggggagcgggtcagtgtccattaagtgctccagccggaaccatggaccggacacgggtgttacaggcatcacaagctggtccaccattcttttgttatacgtgtggaaagtgttttagtcgcaggagctacctatacagtcaccagtttgtgcataatcccaagctgacaaactcttgcagtcaatgcggtaaactattccgctcgccaaaatcgctgagttaccatcgacggatgcacctcggggaacgacccttctgctgcactctgtgcgacaagacgtactgcgacgcgagtggcctgtctaggcatcggagggtgcatttaggatataggccccacagctgctccgtctgcggaaaatcttttagggaccagtccgagttaaagcggcaccagaagatccatcagaatcaagaacctgttgacggaaatcaggagtgtacgcttaggatacccggaactcaggcggaattccagactccaattgccagatcccagagaagcatccagggattgctggatgtaaaccacgcacctgtagccagaagccaggagccaatttttcggacggaaggcccaatggctcaaaatcaagcatccgtgcttaaaaaccaagccccagtcacaaggactcaggcccctattactgggacgctctgtcaggatgcacgctctaactcacaccctgtgaaacctagtcggttaaacgtattctgttgtcctcattgtagccttacattctccaaaaaatcctacctctcccggcaccaaaaagcccacttgaccgaacctcctaattattgtttccactgtagtaaaagcttctcatcctttagccgcctggttagacaccagcagacccactggaagcagaagagctacctgtgcccgatctgcgacctttccttcggggagaaggaaggtctcatggaccactggagggggtataaaggcaaggacctctgtcaatcttcacatcacaagtgtcgagtgatcctgggccagtggctgggcttcagtcatgatgtgccaaccatggccggagaggaatggaagcacggcggagatcaatctccgccacgcatccatactccaaggaggcgcggactgagagagaaggcctgtaagggtgataagacaaaagaagccgtgagtattttgaaacacaagtag

SEQ ID NO: 247704 - DNA, 1551 bp, synthetic construct
  misc_feature 1..1551: note = Description of Artificial Sequence: Synthetic coding sequence
  source 1..1551: mol_type = other DNA
atgttcgaacagttgaaacccatcgaacctagggattgctggagggaggctcgggttaaaaagaagccggtcacattcgaagacgtcgccgtgaattttacccaggaggagtgggactgcctggatgcctcacagcgagtactgtaccaagacgtcatgtctgagacgttcaagaatctgacctcagtcgcgcgaatctttctccataaacccgagctgataaccaagctcgagcaggaggaggagcaatggagggaattcgttcacctccccaacactgaaggacttagcgagggaaaaaagaaagaattacgagaacagcacccatccctgcgtgacgagggtacgagcgacgacaaagtgttcttggcatgcagaggtgcgggtcagtgccccttgtccgctccagccggaactatggaccgtactagagtacttcaagcttcgcaggcaggacctcccttcttttgttacacttgtggcaaatgtttttccaggagatcttatttgtacagccaccagtttgtgcataatcccaaactgacgaactcatgcagccagtgcggaaagctgtttcgatcgccgaagtccctctcttaccatcgccgaatgcacttgggcgaaaggcccttttgttgcactctatgcgataaaacctactgtgatgccagcgggctgagtagacaccgcagggtccatctgggatatcggccacatagttgtagcgtgtgtggcaaaagcttcagggaccagtccgagctgaaaaggcatcagaaaatccatcagaatcaggaacccgtggacgggaaccaggaatgcactctgaggatccctggaacgcaggccgaatttcagacccccattgctagatctcaacgcagtatacagggactcctggatgtgaatcacgcccctgtggctaggtcacaagagccaatctttcggacggaaggacctatggcgcagaaccaggcatccgtgctgaagaaccaagcaccagtcactcgaacacaggcaccaattacaggcacactgtgccaagacgcacgatccaattcacaccccgtgaagcctagccggctgaatgtcttctgctgccctcactgcagcctgacattttccaagaaatcctacctgagtagacaccaaaaagcccacctaactgaacctccaaactattgtttccattgtagcaagagcttctcatcctttagccggttggtgagacatcagcagacacactggaaacagaaatcctacctgtgtcctatctgtgacctgtcatttggtgagaaagagggcctgatggatcattggcggggatacaaagggaaagacttgtgtcagagtagccatcataagtgtagagtaattttaggacagtggctcggattcagtcacgacgtgcccacaatggctggggaggagtggaagcatggaggtgaccagagccccccaagaattcacacaccgcgaagacgtggcctaagggagaaggcctgcaagggcgataagaccaaagaggcagtttcgatacttaaacacaagtag

SEQ ID NO: 247705 - DNA, 1356 bp, synthetic construct
  misc_feature 1..1356: note = Description of Artificial Sequence: Synthetic coding sequence
  source 1..1356: mol_type = other DNA
gccggtggatcaccggagagcctcctgttttttcaaaagcctgttacctttgaggacgttgcagttaattttactcaggaggaatgggactgcctggatgcatcccaaagagtgctgtatcaggatgtcatgagtgaaacattcaaaaatctgacatcagttgcacggattttcctgcataaacccgagctgataacaaagttagaacaggaagaggagcagtggcgggaaacacgtgttctccaagcttcacaggctggccctcccttcttctgttatacatgcggtaaatgcttctcaaggcgatcgtacctttattcccaccaattcgtccataatcccaagctgaccaactcatgtagccagtgcggaaaactctttagatcacctaaatccctatcctatcaccggaggatgcacctaggtgaacgccctttttgctgtactctgtgcgacaagacatactgcgatgcatcaggcctaagcagacatcgaagggttcacttgggatatcgtccacattcatgcagtgtgtgcggaaagtcattccgagatcaatccgaactcaagcgccaccagaaaattcatcaaaatcaggaacccgtggacggtaaccaggaatgcactctaaggataccgggtacccaggctgagttccagaccccaattgctcgtagccagaggtccatacaaggtttactggatgtgaatcatgccccagtggctagatcccaggagcctatcttccgaaccgagggccctatggcccagaatcaagccagtgttttgaaaaatcaagcccctgtaacgaggacccaggccccaataacaggaacactgtgccaagatgcacggtcaaactcgcatcccgtgaagcccagccggctgaatgttttctgctgcccacactgctccctgaccttttctaaaaaatcttacctgtcgcgtcatcagaaagctcatctgacagaaccgccaaattactgctttcattgcagcaaatcctttagcagcttcagcaggttagtgcgtcaccagcagacgcattggaaacaaaagagttacctttgtcctatctgcgacctgtccttcggggagaaggaagggttgatggaccattggcgtggttataaaggaaaagacctctgccagagttcccaccacaagtgcagagtgatcttggggcagtggttgggcttttctcatgatgtccccacaatggctggtgaggaatggaaacacgggggtgaccagtctcccccacggatccacactccccgtcggcgaggcctgagagaaaaggcttgcaaaggtgacaagaccaaagaggccgtgagtatcctgaagcataaatag

SEQ ID NO: 247706 - DNA, 1551 bp, synthetic construct
  misc_feature 1..1551: note = Description of Artificial Sequence: Synthetic coding sequence
  source 1..1551: mol_type = other DNA
atgttcgaacagctgaaacccattgaacccagggattgctggcgagaggccagagtaaaaaagaagccagtgacctttgaggatgtcgccgtgaacttcacacaggaggaatgggactgcctagatgccagccagcgcgtcttgtatcaggacgtgatgtccgagaccttcaagaacctgacatcagtagctaggatattcttacataagccggagctcattaccaagctcgagcaggaggaagagcagtggcgcgagtttgtacacttgccaaacacagaggggctatccgaaggcaagaagaaagaactgagggagcagcatccatctctgcgagatgaaggcaccagtgacgataaagtattcttagcttgtagaggcgcaggtcaatgtccgctcagcgccccagccggaaccatggaccgcactagggtgctacaggcttcccaggccggaccgccattcttctgttatacatgcggaaagtgcttttccagaaggtcttacctttatagccatcagtttgtccacaacccaaaactgaccaacagctgttcacaatgcggcaagctcttccgatctcccaaatccctgtcttaccacaggcgtatgcacctcggcgaaaggccattctgttgcacactgtgtgataagacatactgtgatgccagtgggctctcaaggcacagaagggtccaccttggatacagaccccactcatgttcagtgtgtgggaagtctttccgagatcaatccgaactcaagcgacaccagaagattcaccagaatcaagagcctgtggacgggaatcaggaatgcaccctgcgcatccccggtacacaagccgaatttcaaacgccgattgcgcgatcgcagcgctcaattcaaggcctgctagacgttaaccatgccccagtggctcgatcacaagagccaatctttaggaccgagggtccaatggcccagaaccaggcctctgtcctgaagaatcaagccccagttactcgcacacaggctccaatcaccggaaccctctgccaggacgcccgtagcaactcacacccagtcaagccttctaggctgaatgtgttttgctgtccacattgctcactcaccttctccaagaaaagctacctcagcagacaccagaaagcccacctcacagagcctccaaactattgctttcactgttctaaaagcttcagttccttctcacgtctcgttaggcaccagcagacccattggaagcagaagtcatacttgtgccctatatgtgatctgtccttcggtgagaaagagggccttatggatcactggcggggatataagggaaaagatctgtgccaatcaagtcaccacaagtgccgcgtaatcttgggtcagtggctggggttttcccacgatgtccctactatggctggcgaagagtggaaacatggcggagatcagagcccacctcgcatccacacccctcgtcggagggggctgagggagaaagcctgcaaaggcgataaaacaaaggaggcggtctcgatcctgaaacataagtag

SEQ ID NO: 247707 - DNA, 1611 bp, synthetic construct
  misc_feature 1..1611: note = Description of Artificial Sequence: Synthetic coding sequence
  source 1..1611: mol_type = other DNA
atgtttgaacaactgaagcccatagagcccgtacagaaaacattgccttgggtgggcgaggtggccgctactctgcaggaggccatgaaaagggactgctggagagaggcaagggttaagaaaaaaccagtgacattcgaagacgtggccgtcaactttacccaggaagaatgggactgcctagatgctagtcagagagtgctctatcaggatgtgatgtctgaaactttcaagaatttgacgtccgttgctcgaattttcctgcacaaaccggagctgataaccaagctcgaacaggaagaggaacagtggagagagttcgtccacctgccaaacacagaaggcctctccgaggggaaaaagaaggaattgcgggaacagcacccttcacttcgcgatgagggcacctccgacgacaaggtgttcctcgcttgtcgaggcgctgggcagtgtccactctcagccccagctggtaccatggatcgcacccgggtgctgcaagcgtcccaggccggaccacctttcttttgttacacctgtggcaagtgcttctcccggcgtagttatctctatagccatcagtttgtccacaatcctaaactgacgaatagctgctcacagtgtggcaaactttttcgctctccaaaaagtttgtcatatcacagaaggatgcatcttggtgagagacctttctgctgcacactctgcgataaaacgtattgcgacgcttccggactgtcccgtcacaggcgcgtccacctgggatacagaccacactcttgctctgtgtgtggaaagagttttcgggatcagtccgagctgaagagacaccagaaaatccaccagaatcaagagcctgtggatgggaaccaggagtgtacactgcgtatccccggtacgcaagctgaattccagactccgatcgctcgatcccagaggagtatacagggccttctggacgtcaatcacgcccctgtggcccgatcccaggaacccatttttaggactgaggggccaatggctcagaatcaggctagcgtcttgaaaaatcaggcgcctgtgacccggactcaagcacctatcactggaacactgtgtcaggacgccaggtctaattcacacccagtaaagccatccagacttaatgtgttctgttgccctcattgctctttaacgttcagtaaaaagtcgtatctctctcgccatcaaaaagctcatcttactgagccacctaactactgctttcactgcagcaagtctttctcctcttttagccggctggtcaggcatcagcaaacacactggaaacaaaaatcctatctgtgccctatctgtgacctaagctttggtgagaaggaagggttgatggatcactggagagggtacaaaggtaaagacctgtgtcagagtagtcaccataaatgcagagtgattctcgggcagtggctggggttcagtcacgatgtcccaacaatggcgggagaagagtggaaacacgggggagatcagtcccctcccagaatccacactccccgaaggagagggctgcgcgaaaaggcttgcaagggtgataagactaaggaagccgtctctatcctgaagcacaagtag

SEQ ID NO: 247708 - DNA, 1611 bp, synthetic construct
  misc_feature 1..1611: note = Description of Artificial Sequence: Synthetic coding sequence
  source 1..1611: mol_type = other DNA
atgtttgagcaactcaaacccattgagcccgtacagaaaactttaccttgggttggtgaagtagccgcaacactccaggaagcaatgaaacgggactgctggcgggaggcacgggtgaagaagaagccagtgactttcgaggatgtcgccgttaacttcacacaggaagagtgggactgcttggacgcctcgcaaagagttttgtaccaagacgtcatgagcgagaccttcaaaaacctcacctccgtggcccgtatcttcttgcacaagcccgaactgataacaaagctggaacaggaagaggaacagtggcgggaattcgtccacctgccaaacacagagggcctgagcgaagggaagaagaaggaactccgtgagcagcatcctagcttaagggacgaaggcacttctgacgataaagtcttcctggcgtgccgaggcgctggtcagtgtcctctatctgcgcctgccggaaccatggacaggacacgcgtgctgcaggcatcccaagccggaccccctttcttctgttacacctgcgggaagtgcttcagccgtaggagttatctatactctcatcaatttgtgcataacccaaagctgactaacagctgctctcagtgtggaaaactgtttcgctcgcccaaatccttgtcctaccataggagaatgcaccttggagagagacccttttgctgtaccttgtgcgataaaacctattgcgacgcatcgggtctgagcagacaccgccgagttcacctcggctatcgaccccacagttgctctgtctgcggaaagtcgttcagagatcagagcgagttaaagagacatcagaagattcatcaaaatcaggagccagtcgatggaaatcaggaatgcaccctccgaatccccggaacccaggccgaattccaaacacctatcgccagatcacagcgcagtatccagggattgcttgacgtcaaccacgctcccgtggcacgttcccaggaacctatcttccgcaccgagggaccaatggcccagaatcaggcatccgtgttgaagaaccaggcaccagttacacgcactcaggccccaattactggaaccctatgccaggatgccagatctaatagtcatcctgtgaaaccatcacggcttaacgtattttgctgcccacactgctcattgacttttagcaaaaagtcatacctaagtcggcatcagaaggcccatctgacagagcctccgaattattgtttccactgttccaaaagttttagcagcttctctagattagtcagacaccagcagactcattggaagcagaaatcatacctgtgcccaatctgtgacctgtccttcggcgagaaagaaggactgatggatcactggcgcggatacaagggcaaagacttatgccagtcctctcaccataaatgccgcgtcattcttggccagtggttggggttttctcatgacgtccctaccatggcaggagaggagtggaaacacggaggggatcagtcccctccccgaatccatacccccagaaggcggggattgcgcgagaaggcgtgtaaaggcgataagaccaaagaggctgtgagcattctcaaacataagtag

SEQ ID NO: 247709 - DNA, 1611 bp, synthetic construct
  misc_feature 1..1611: note = Description of Artificial Sequence: Synthetic coding sequence
  source 1..1611: mol_type = other DNA
atgtttgaacagctgaagcccatcgagcccgttcagaaaacacttccatgggtgggcgaggtggccgcaacactccaggaagctatgaagagggattgttggcgcgaagcacgagtgaagaaaaaacccgtcacgttcgaagatgtcgctgttaactttacgcaagaggagtgggactgcctcgacgcgtcacagcgagtcctataccaagatgtcatgagtgaaactttcaaaaacctgaccagtgtagcgaggatattccttcacaagccagaattaattacaaagctggagcaggaagaggaacaatggagggagttcgtacacctccctaatactgagggactctccgaagggaagaagaaggagctgagagaacagcatccctccctgagggatgaggggaccagtgatgacaaggtctttctggcatgccgcggtgcagggcagtgccccctatccgcacccgcaggtactatggatcgtacccgggtgctgcaggcatctcaggcgggtccaccttttttttgttacacatgtgggaagtgctttagcaggcggagctacctgtacagccatcagtttgtccataacccaaagcttacaaacagctgcagccagtgcggcaagctgttccggagtcctaagtcactgtcataccaccggaggatgcacctgggtgagaggccattctgctgtaccctgtgcgataagacctactgtgacgcctctggactgtcacgccacaggcgagtgcatttgggataccgtccccatagctgcagcgtgtgcggcaagtcctttcgcgatcagtccgaattgaagcggcaccagaagatccatcagaatcaagaaccagtggacggcaatcaagaatgtactctaagaatccccggaactcaagccgagttccaaactccaattgctagatcccaaaggagtatccagggcttgctcgacgtaaaccatgcacccgttgctcgctcccaggagcccatcttcagaaccgaggggccaatggctcagaaccaggcgtcggtgctaaaaaatcaagcccctgttactcgcactcaggcacctatcacaggaactctttgccaggatgctcgctccaatagccaccccgtgaagccatctcgccttaacgtcttttgttgcccccactgtagccttacatttagtaaaaaatcctacctatctcggcaccagaaagctcatctgaccgaaccaccgaattattgctttcactgcagtaaatccttttcatcatttagccgtctcgttcgtcatcaacagacacactggaaacagaagtcttacctttgccccatctgcgacctcagtttcggggaaaaggagggtctgatggaccattggcgcggatacaagggcaaggacttgtgccagagcagccaccacaaatgccgagtgatccttgggcagtggttaggattctctcatgatgtgcctaccatggccggagaggagtggaaacacggcggtgatcaaagtccccctcgtatccacaccccccgtcgacgcggactaagggaaaaggcctgcaaaggtgataagaccaaagaggccgtgagcattctgaagcataagtag

SEQ ID NO: 247710 - DNA, 1611 bp, synthetic construct
  misc_feature 1..1611: note = Description of Artificial Sequence: Synthetic coding sequence
  source 1..1611: mol_type = other DNA
atgttcgagcagctcaaaccaattgagcccgtgcagaagacactcccttgggtcggagaggtggccgcaacactccaggaggccatgaagcgcgactgttggcgagaggcgagggttaagaaaaagccagtcacttttgaggacgtagctgtgaatttcacacaggaggagtgggactgcttagatgcctctcaacgggttttgtatcaagatgtgatgagcgaaaccttcaaaaatcttacctccgtcgcacggatcttcctgcataaaccagagctgatcaccaaactggaacaagaggaagaacagtggcgggagtttgtgcacttaccaaataccgaaggcctcagcgaagggaaaaaaaaggaattacgcgagcagcacccgtctctgcgggacgaaggaacatccgatgacaaagtgtttctggcttgtcggggagccggacagtgccctctgagcgccccagcgggtaccatggacagaacccgggtgctgcaagcaagccaagcaggtccgccattcttctgttacacctgcggtaagtgtttctctaggcgctcttatttgtactcccaccagttcgtgcacaaccccaagttgactaactcatgtagtcagtgcggcaaactcttcaggtccccaaagtcactcagctaccaccggagaatgcatcttggtgagagaccattctgctgcacgctctgtgacaaaacatactgcgacgcaagcgggctaagcagacacagacgagttcacctgggatataggccccatagctgctctgtgtgcggcaaatcctttagagaccaaagcgaactaaagaggcatcaaaaaattcaccagaaccaagaaccagtagatggcaatcaagagtgcacgctgagaatcccgggtacacaggcagagttccagacccctattgctcggagccagcgcagcattcagggactgctcgacgtgaaccacgcgccagtcgcaagatcacaggaacccatcttcaggactgagggcccaatggcacaaaaccaagcctcagtccttaaaaaccaggccccagtgacccggacgcaggcaccaataacaggcacgctatgtcaggatgcaaggtctaactcccacccagtgaagccctctagacttaacgttttttgctgtccgcactgttccctgaccttttcgaagaaaagttatctgagccgtcatcagaaggcccatcttacagagccgccaaactactgttttcactgtagcaaatcgttctcgtcgttttcccgtctggtgcgacaccaacagactcactggaaacaaaaaagctacctgtgtccaatttgcgacctgtcttttggagaaaaggaaggattaatggatcactggagaggctacaagggcaaagatctgtgtcagagcagtcaccataagtgtcgcgttattctgggacagtggctgggattcagtcacgacgtccccactatggctggagaggagtggaaacatgggggagaccaatctccgcctaggattcataccccgagaagacggggtctgcgtgaaaaggcctgcaagggcgacaagactaaagaagcggtgagtatattgaagcacaagtag

SEQ ID NO: 247711 - DNA, 1551 bp, synthetic construct
  misc_feature 1..1551: note = Description of Artificial Sequence: Synthetic coding sequence
  source 1..1551: mol_type = other DNA
atgttcgaacagcttaagccaatagaacccagggactgctggagagaggcccgtgtcaagaagaaacccgtgaccttcgaggacgtggctgttaatttcacccaggaggagtgggactgcctagatgcttcccaaagagtgctgtaccaggacgtaatgagcgagactttcaaaaatctgacatctgttgcgaggatatttctgcacaaaccagaattaattactaaactcgagcaagaggaagagcagtggagagagtttgtgcacctgcctaatacagagggcctgtctgaagggaagaagaaagaactgagagagcagcacccgagcctcagggacgaaggcacctcagacgacaaggtgttcctcgcatgccgcggtgcgggacagtgccccctctccgcacccgctggtaccatggatagaacacgcgttttgcaagcatcccaagcaggtccaccctttttttgttatacgtgcggaaagtgttttagccgacggagctatctgtatagccatcagtttgtgcacaatcctaagctcacgaattcatgcagccaatgcggaaagttgttccgatctcccaagtctctgagctaccataggagaatgcacctgggggagaggccgttttgctgtaccctatgtgataagacctactgtgacgcttccggtctatcaaggcacagacgagtgcacctgggctataggccacatagctgtagcgtgtgcggtaagtcatttagggatcagtctgagttgaagagacaccagaaaatacaccagaaccaggagccagtcgatggtaaccaggaatgcactttgcggatccccggaacacaggctgagtttcagacccccatcgccaggagtcagcggtccatccaaggccttctggacgtgaaccacgcccctgtagccaggagccaggagcccatcttccggaccgagggccctatggcgcaaaatcaagccagcgtgctgaaaaatcaggccccagtgaccaggacacaagcaccaatcaccggaactttgtgtcaggacgccaggagtaattcccatcccgttaaaccaagcaggcttaatgtcttctgctgtcctcattgctccctgactttttccaaaaagtcatacctctctcgacatcagaaagcccacctgaccgagcccccaaactactgtttccactgttctaaaagctttagcagcttcagtagactggtgcgacaccagcagacacattggaagcagaagtcatacctctgtccgatatgcgacttgagtttcggagagaaggagggtctgatggatcactggcggggatacaagggaaaagacctgtgccagtcttcccatcacaagtgccgcgtgatattgggccagtggctcggcttctcacatgacgtacccactatggccggagaggaatggaaacatggtggcgaccaatcaccgcctcgcatccacactcctcggagacgtggactgagggaaaaggcgtgcaagggcgacaagacgaaggaggcagtgagtatcctcaaacataaatag

SEQ ID NO: 247712 - DNA, 1551 bp, synthetic construct
  misc_feature 1..1551: note = Description of Artificial Sequence: Synthetic coding sequence
  source 1..1551: mol_type = other DNA
atgtttgagcaattgaaaccaatcgagccacgcgattgctggcgggaggctcgggtgaagaagaagccagtgaccttcgaagacgttgctgtcaacttcacacaagaggaatgggattgcctggacgcctctcaacgggtgttataccaggatgtaatgtcggaaacatttaaaaacttgacctctgtggccagaatcttcctacacaaaccagagcttataaccaaactggaacaggaagaggagcaatggcgggaatttgtgcacctaccgaacaccgagggtctctcagaaggtaagaagaaggagctcagagagcagcacccttccctgcgtgacgagggcaccagtgatgacaaggtattcctcgcctgtcgaggcgcaggccagtgtccactcagcgcccctgcgggaacaatggatcgtacccgagtacttcaggcttcacaagcagggccaccgttcttttgttacacatgcggaaagtgttttagccgcaggagttacctctactcccaccagtttgtccacaatcctaaactgaccaacagttgtagtcagtgtggcaagcttttccggagtccaaaatctctgtcataccatcgacgaatgcatctgggagagagaccgttctgctgtactctgtgcgataagacgtattgtgatgctagcggactatcccgtcatagacgagtgcacctgggataccgaccccattcctgctctgtgtgcggtaagtccttccgggatcagtccgaattaaagcgtcaccagaaaatccatcaaaatcaggagcccgtggatggcaaccaagaatgcactttgcgtatccctggcacccaggccgagtttcaaactccaatcgccagatcccagaggtctatccaggggctcctggatgtgaaccatgcacccgttgccaggtcgcaggagccgatatttcgcactgagggtcccatggcacagaatcaggcttccgtgctaaaaaaccaggcgccagtgactcggacccaagctccgatcactgggacattatgccaagatgctaggtcgaactctcaccctgtgaagccatctcgtcttaatgtgttttgctgtccccactgcagtttgacttttagcaaaaaatcttacttatctaggcaccagaaggcgcacctgactgagccgccaaactactgttttcattgcagtaagagcttctcttcgttctcccgcttagttaggcaccaacagacccactggaagcagaagagctacctttgccccatctgcgacctgtcttttggcgaaaaggaaggcctgatggatcattggaggggatacaaagggaaggacctgtgccaatcatctcatcataaatgtcgagtcattcttggccagtggttgggctttagccacgatgtccctacaatggccggagaagaatggaagcacggaggcgaccagtcaccacccaggatacataccccacgcaggcgaggactgcgcgaaaaggcttgtaagggcgataaaactaaggaggcggtatccattctgaagcataaatag

SEQ ID NO: 247713 - DNA, 1611 bp, synthetic construct
  misc_feature 1..1611: note = Description of Artificial Sequence: Synthetic coding sequence
  source 1..1611: mol_type = other DNA
atgttcgaacagctgaaaccgatagaaccggttcagaagactctcccctgggtcggtgaagttgctgcaaccctccaggaggccatgaaaagagattgctggcgagaggcacgagttaagaaaaaacctgtgacattcgaggacgtggctgtgaacttcacgcaggaggagtgggactgtctcgatgccagtcagcgtgttctctaccaggatgtcatgtccgaaactttcaaaaatcttacttcggtggcaagaatctttcttcacaaaccggagttgataactaagctcgagcaggaggaggaacagtggcgggagttcgttcatcttccgaatacggagggactgtccgaggggaaaaagaaggagcttcgagaacagcacccaagcctgcgtgatgaaggtacaagcgacgacaaagtgttcctggcttgtaggggcgcaggacaatgtccactcagtgccccagccggtaccatggaccgcactagagtgctacaggcctcccaggcaggcccaccttttttttgttacacctgtgggaagtgttttagccggcgatcttatctttactcccatcagttcgtccataaccctaaattgactaacagctgttcacaatgtggtaagcttttcagatccccaaagagtctttcctaccacaggcggatgcatctgggggagcggccattttgttgcacattgtgtgataaaacctactgcgatgcgagcggtctgagccgccaccggagggtgcatctaggatatcgaccacactcctgcagcgtctgtggcaaatcttttagggaccagtccgagcttaagcggcaccagaagattcaccagaaccaggagcctgtggatggaaatcaggagtgtacgcttcggatccctggcacacaggccgagtttcaaacgccaatcgcacggtctcagcgcagcatccagggactgctggatgtgaatcacgcccctgtggcgaggagccaagaacccattttcaggacagagggacccatggctcagaatcaggcctccgtgctgaagaatcaggccccagtgactcggactcaggcaccaataacgggcactctgtgccaagacgctagatccaactcccaccccgtgaagccctcacggttgaacgtcttctgttgcccacactgcagcctgaccttctctaaaaagagctacctctccagacaccagaaagcccatctgaccgaaccgcctaactactgttttcactgttccaaaagtttctctagcttctcacgcctggtgcggcaccagcagacgcattggaaacagaagagctatctgtgcccgatttgcgacctgtcattcggtgaaaaggaagggctgatggaccattggcgcggttacaaagggaaggacctctgccaatcatctcaccataaatgtcgggtgattctcggccagtggctgggcttctcccatgatgttcctacaatggccggagaagaatggaaacacgggggagatcagtccccgcctagaattcacactccaaggcggcgaggattgcgcgagaaagcatgcaagggcgacaagactaaggaagctgtgagcattctgaaacacaaatag

SEQ ID NO: 247714 - DNA, 1551 bp, synthetic construct
  misc_feature 1..1551: note = Description of Artificial Sequence: Synthetic coding sequence
  source 1..1551: mol_type = other DNA
atgtttgagcagttgaaacccatcgagccgagggactgctggagggaggcaagagtgaagaaaaagccggtgactttcgaagatgttgctgtaaactttacgcaggaggagtgggactgcttggacgcatcacagcgcgtgctgtaccaggacgttatgtccgagacctttaaaaacctgaccagtgtcgctcggatttttctccataaaccagagctcatcacaaaactggaacaagaagaagagcagtggagggaatttgttcacttgccgaatacggaaggattgtccgaggggaaaaaaaaagagctgcgcgagcagcatccttctctccgggacgaagggactagcgacgacaaagtgtttcttgcctgtcggggagcgggtcagtgccccctcagcgccccagctggcacgatggatcggactcgcgttctgcaggcttcacaggcaggcccaccattcttttgctacacatgtggcaagtgcttcagtcgacgctcatatctctactctcaccagtttgttcacaacccaaagttgacgaattcctgttcacagtgcggcaaactgtttcgatcccccaaatcattgtcctaccacagacgcatgcacctgggtgagcgccctttttgctgcacgctgtgcgataagacatactgtgacgcaagcgggctgtctcggcatcggagggtccatcttggttacagacctcacagctgcagcgtctgtggcaaaagttttcgagaccagtctgagctcaagcgccaccagaaaatacaccagaatcaggagccggttgatggcaaccaggaatgcacacttaggattcctgggacccaggctgaatttcagacccccatcgcacgaagtcagaggagtattcaaggactcctcgatgtcaaccatgctccagtggctcgttctcaggagccgatattcagaactgagggtcctatggcgcagaaccaagcatctgtgctcaagaatcaggcgcctgtgacgaggacccaggcccctatcacggggactctgtgtcaggacgccagatcaaatagtcaccctgtcaagccatcccggctcaatgtgttttgctgcccccactgctctctcactttctcgaaaaagtcatatctgtcacggcaccaaaaggcgcaccttacagagccacctaactattgctttcattgcagcaagtcatttagtagcttcagcagactcgtgaggcaccaacagacacactggaagcagaagtcctatttgtgccctatttgtgacctgtcgttcggcgagaaggaaggcttaatggatcactggcggggttacaaagggaaggacctatgccagtcatcacatcacaagtgccgcgttatactcggccaatggttggggttctctcatgacgtcccaacaatggccggagaagaatggaaacacggcggagatcagagccctccgcgtatccatacaccaaggagaagagggcttagagaaaaagcctgcaagggcgacaaaactaaggaagctgtgagcatccttaaacacaagtag

SEQ ID NO: 247715 - DNA, 1551 bp, synthetic construct
  misc_feature 1..1551: note = Description of Artificial Sequence: Synthetic coding sequence
  source 1..1551: mol_type = other DNA
atgttcgaacagctgaagcccatcgaaccacgcgattgctggcgcgaggccagagtaaaaaaaaagcctgttacctttgaggacgttgccgtgaactttacccaggaagagtgggattgtctggacgcaagccagcgcgtactgtatcaggatgtcatgtctgagacatttaagaatctcacatccgtggcccgaatctttttacacaagcccgagctcattactaaactggagcaagaggaggagcagtggagagaattcgtgcatttgcctaatactgaagggctgtcggaaggtaagaagaaggagttgcgcgagcagcatccctctctgcgtgacgagggcacctctgatgataaagtgttcctcgcttgccgcggagccggtcagtgtcctctgagtgccccagccggaacaatggaccgcacacgcgtgctgcaggccagccaggcgggtccaccctttttctgctacacctgtgggaaatgcttctccaggcggtcttatctgtattcacatcagttcgtccacaatcccaaacttactaacagctgttcacaatgtgggaagctatttaggtcccctaagagcctttcctaccatcggaggatgcacttgggtgaaagaccgttttgctgtaccctctgtgacaaaacttattgcgacgctagcggattgtctcgacacaggagggttcatctggggtatcgaccccattcttgtagtgtttgcggaaaatcattcagggaccaatctgagcttaagcggcaccagaagatccatcagaatcaggaacctgtcgacggcaatcaggaatgtactttaagaatccctgggacccaggcagaattccagaccccaatcgcccgatctcagaggagtatccagggtcttctagatgtaaatcacgccccagtggcaaggtctcaagaacccatatttcgaaccgagggccctatggcccaaaatcaggccagcgtcctaaagaatcaagcccctgtgacgagaactcaggcccctataactggaaccctgtgccaggatgctaggtctaacagtcacccagtgaagccatctaggctcaatgtattctgctgccctcactgctcactcaccttttcgaaaaagagctacctgtcccgacaccaaaaggcacatctaactgaacctccaaattattgttttcactgtagcaagtctttctcttccttctcacggctggttaggcatcagcagactcactggaagcagaagagctacctgtgtcccatctgcgacctgagttttggggaaaaagagggtctcatggaccattggaggggctataagggcaaagacctgtgccagagttcacatcataagtgtagggttatattgggtcaatggttggggttctcgcacgatgtgcctactatggccggagaggaatggaagcacggtggcgatcagtcacctcccaggattcacacccccaggcggagaggcctgcgcgagaaagcttgtaagggggataagacaaaggaggcagtgagcatccttaagcataaatag

SEQ ID NO: 247716 - DNA, 1611 bp, synthetic construct
  misc_feature 1..1611: note = Description of Artificial Sequence: Synthetic coding sequence
  source 1..1611: mol_type = other DNA
atgttcgagcagttaaaacccattgagccggtacagaaaacgttgccatgggtcggtgaggtggcagccacgctgcaagaagccatgaaaagggactgttggagagaagctcgagtaaaaaagaaacctgtcacttttgaggacgtggctgtcaactttacccaagaggagtgggattgcttagatgcctcacagagagtgctataccaagacgtaatgtccgaaaccttcaagaatctcaccagcgtggccaggatcttcctgcataaacccgagttgatcaccaaactggagcaggaggaagaacagtggcgggaattcgtgcatttgccaaacacagaggggctatccgaggggaagaagaaggaattacgagaacaacatccgagcttaagagacgaaggtacttcagacgacaaggtgttcttagcctgtcgaggggcaggacagtgccctctatcagctcccgctggcaccatggatagaacccgagtgcttcaggcctcccaagcaggaccgcctttcttctgttacacctgtggaaagtgttttagccgaagatcctacctgtattcccaccagttcgttcacaatcccaaactcacaaactcctgcagccagtgcggaaaacttttccgctctcctaagtctcttagctatcaccggcgtatgcatctgggtgaacggcctttttgttgcacactgtgcgacaaaacatattgcgatgctagcggactttccaggcacagacgtgttcacctgggatacagaccacattcctgcagcgtgtgcggcaaatcatttagggatcagtctgagcttaaaagacaccagaagattcaccagaaccaggagcccgtagacggcaaccaagagtgtactctccggatccccggtacacaggcagagttccagacccctatcgctcgctctcagcgcagcattcaggggctgttggatgtgaaccacgcgcctgttgctcggtcccaggagcctatcttccgtaccgaggggccaatggcccaaaatcaggcaagtgtcctcaagaatcaagccccagtaacacggacccaggcccctataacgggtacactgtgccaggatgctaggagcaattctcaccccgttaaacctagcaggcttaacgtcttttgttgcccccactgctcactgaccttttcaaaaaagagttacttatcccgtcatcagaaggcccacctgaccgagccacccaactattgtttccattgctcaaagtccttttctagcttttctcgtttggtcaggcaccagcagacgcactggaagcagaaatcatacctctgtcctatctgcgatctctccttcggcgagaaagagggattaatggaccactggcggggatacaagggcaaagatctttgtcagagcagccatcacaagtgccgggtgattttaggccagtggcttggattttcacacgatgtacccactatggcaggtgaagaatggaaacacggaggagatcagtcgccccctagaatccacacaccccgtaggcgcggattgagagagaaagcttgcaagggcgataaaactaaggaggccgtgtccatcctgaagcacaaatag

SEQ ID NO: 247717 - DNA, 1725 bp, synthetic construct
  misc_feature 1..1725: note = Description of Artificial Sequence: Synthetic coding sequence
  source 1..1725: mol_type = other DNA
atggccgctgcagtgcccagaagacccacgcagggcacggtgactttcgaagatgtcgcggttaatttctcccaggaagaatggtgtcttctgtccgaggcccaacgctgtctttacagagacgttatgctggagaacttggccctgatttcatcactggggtgttggtgtggatcaaaggatgaggaggcaccatgtaagcagcgaatcagcgtccaacgcgagtctcagagtaggacccctcgggcaggggtgagccccaagaaagctcacccctgcgagatgtgtggcctaattctggaagatgtgtttcactttgctgaccatcaggagacacatcacaagcagaagctgaacaggtcaggcgcttgcggcaagaacctcgacgataccgcctatctccatcaacaccagaagcagcacatcggcgagaaattctaccggaaaagcgtgagggaagcctcctttgtgaagaagcggaagctgagagtctctcaggagcccttcgtgttcagagagtttgggaaggacgtactaccttccagcgggctctgccaggaagaagccgcagtcgaaaagacggattcggagaccatgcatggacccccatttcaggagggtaaaacgaattacagttgtgggaaacgcacgaaagcctttagtacaaaacattccgtcattccccatcagaagctttttacacgcgatggctgttatgtttgtagcgactgcggaaagagttttagtcgttacgtctctttctctaaccaccagagggaccacactgcgaagggtccatatgattgtggagagtgtggaaaaagctactccaggaagtcctccctcatacaacaccagcgggtgcacaccggacagaccgcttacccgtgtgaagaatgcggcaagagtttctcccagaaaggaagtttgatctcacatcaactggtccacacaggtgaaggcccttatgaatgcagagagtgcggcaagagcttcgggcagaaggggaatctgatccagcaccagcagggacacacaggtgagagagcgtaccactgtggcgaatgcggtaagagtttccggcagaaattctgtttcatcaaccaccagcgggtgcacaccggcgaacgaccgtataagtgcggcgagtgcggaaagtctttcggccagaaggggaaccttgtgcaccaccagagaggccacactggggagcggccatacgaatgcaaagaatgcggtaaaagctttcgctatcggagccatctgacagaacatcagcggcttcacaccggcgaacgcccttataactgccgggaatgtgggaagctgttcaaccgcaagtatcacctgctggtgcacgagagggtgcacactggcgagaggccatatgcatgcgaagtttgcggcaagctttttggcaataagcattctgtcaccattcaccagcgaatccatactggtgagcggccttatgagtgtagcgaatgcgggaagtcctttcttagcagttccgccctgcacgtgcataaaagggtacatagtggacaaaagccctataaatgttcagagtgtggcaagtccttttcagagtgttcttccctgattaaacacaggcggatccatacaggggagaggccatatgagtgtaccaaatgtgggaaaacgttccagaggtcgagtacgctgctgcatcaccagagttctcataggaggaaagcactgtag

SEQ ID NO: 247718 - DNA, 3804 bp, synthetic construct
  misc_feature 1..3804: note = Description of Artificial Sequence: Synthetic coding sequence
  source 1..3804: mol_type = other DNA
atgggcgatatgaaaacacctgacttcgacgatttgttggccgctttcgatattcccgacccaacttcactggacgcgaaagaggcgatccaaacccctagcgaagagaacgaaagcccactcaagccccctggtatttgcatggatgaaagcgtgtccctgagtcatagcggttcagcaccggacgtcccggcagtgagtgtgatcgtgaagaacaccagtagacaggaaagctttgaagccgagaaggaccacattactccgtcactcttgcataatggtttcaggggctctgacttgccccctgacccacataactgcggaaagttcgactccactttcatgaacggtgactccgcaagaagcttccccggaaaactggagccaccaaaaagcgagccactgccaacttttaatcaatttagcccgatcagtagcccagagccagaggaccccattaaggataatggatttggcattaagcccaagcactctgacagctactttcctcctccattggggtgtggagccgttgggggacctgtcttggaagcgctggctaaatttccggtgcctgagctgcatatgttcgatcacttctgtaaaaaggaacccaaacccgagccattaccacttggatcccagcaggagcatgaacagagcggacagaataccgtagaaccccacaaagaccctgatgctactaggttctttggggaggccttagaattcaactcccacccatccaactccatcggggaatctaagggtctcgcccgtgaactggggacctgctcatccgtgcccccacgacaacggcttaaacctgcgcacagcaaactgagtagctgtgttgcggctctagtggcactgcaggcgaagagagttgcctccgtcaccaaagaagatcaacccggacataccaaggacctgtctggccctacaaaggaaagttccaaaggaagccctaaaatgccaaagagtcctaaaagtcccagaagcccgctggaggccacacgcaagtctatcaaaccttcagacagtccacgttccatctgctctgattccagttctaagggctcacccagtgtggccgcatctagcccacccgctattcctaaggtcaggataaaaaccatcaaaacaagctctggtgagataaagcggaccgtgactaggattctcccagacccagatgacccctcgaagagccccgtcggatctcccctcggcagcgccatcgcagaggcaccaagtgaaatgccgggagatgaagtaccagtggaggaacactttccagaggcaggcacaaactccggctccccgcagggagcgcgaaaaggagatgaaagcatgacaaaggcctccgactcctcaagcccctcttgttcctccggtcccagagtgcctaagggcgctgcgccagggtcccagacaggcaagaagcaacagagcactgcactgcaggcatctacactcgctccggctaatttgctgccgaaggcagtgcacttagctaacttgaatttagtgccccattccgtagcagctagcgtgaccgccaagagttcagtacagcggagaagccagcctcagctgactcagatgtccgtgcctctcgtgcatcaggtcaaaaaggctgctccattaatcgtggaagtgtttaacaaagtcctgcactcaagtaatcccgtgccgttgtatgctcctaacctctcccctcccgctgatagcagaattcacgtaccagcctccggatattgttgcctggagtgtggtgatgccttcgcgctggagaaatccctgtctcagcattatgggaggcgaagcgtccatatcgaagtcttgtgcaccctctgctcgaagacgttactcttctttaacaagtgttctctcttgagacatgcacgagaccacaaatctaagggcctggtcatgcagtgtagtcaattgttggtaaagccaatctccgccgaccagatgttcgtcagcgccccagtaaacagcactgcccctgccgctcccgcaccgtcttcttcccccaagcacgggctgacgagcgggtcagcttctccacctcctccggcactgcctctatatcccgaccccgttcggttgattaggtactcaattaagtgtctcgagtgccacaagcagatgagagactacatggtgctggccgcacactttcaaagaaccacagaggagactgaggggctgacttgccaagtctgccaaatgctcctgcccaaccagtgtagcttctgcgcgcaccagcgcatccacgcccataagagtccatattgttgtcccgaatgcggagttctgtgccggtctgcatatttccagacacacgtcaaggaaaactgcctccactatgcccgaaaagtcggctatcggtgtattcattgcggggtggtgcacttgaccctagccctgcttaaaagccacatccaagagaggcactgtcaggtgtttcacaagtgtgccttttgccctatggccttcaaaaccgccagcagtaccgcagatcactcagccacgcagcatccaacacaaccccaccggccttctcagttgatttacaaatgctcctgtgagatggtgttcaataaaaagcgtcacatccagcagcacttttaccagaacgtctctaagactcaggtcggagtattcaaatgtcccgaatgcccactgttattcgtccagaagcccgagctgatgcagcatgtgaaaagcacccacggagttcctcgtaatgttgatgaactttcatcacttcagtcttcagctgatacttcgagtagcaggccagggtccagggtgccaactgaacctcctgctacatcggtggccgctcgaagctcttctcttccctctggacgatggggacgaccggaagctcacaggcgggttgaagccagaccgagattaagaaacaccggttggacatgccaggagtgtcaggagtgggtgccagatcgggaatcatatgtctcccacatgaaaaagtcacatggacgcactctgaaaaggtacccatgtcgccagtgtgagcagtctttccatactccaaattcgctgcggaagcacatccggaataatcacgacactgtgaagaagttctacacttgcggatactgcacggaggattctcctagcttcccacgccctagcttgctggagagtcacatatccttgatgcacgggattcggaatcctgatcttagtcagacaagtaaagtcaaacctccgggtggccactctcctcaggttaatcatttgaagcgaccagtgtcgggcgtcggagacgcacctggaacttccaatggcgctacggtcagtagcacgaagcgccataagagtctattccaatgcgcgaaatgttcttttgccacagattccgggcttgagtttcagtcccatatcccgcagcaccaggtggattcatccacagcccagtgcttactgtgcgggttgtgttatacgagtgcctcctcattgagccggcacctgttcatagttcataaggtaagagatcaggaggaagaagaggaggaggaagcggcagccgcagagatggcagtggaagttgccgagcccgaagaagggagtggcgaggaagtgcctatggagacgagagagaatgggctcgaggagtgtgccggtgaacctctgtcggccgacccagaggctagacgccttctgggaccagcaccagaggacgatggcggacacaacgaccacagtcagccccaagcgtcacaagatcaagatagtcataccctttcgccccaggtctag

SEQ ID NO: 247719 - DNA, 3804 bp, synthetic construct
  misc_feature 1..3804: note = Description of Artificial Sequence: Synthetic coding sequence
  source 1..3804: mol_type = other DNA
atgggggatatgaagacacctgattttgacgacctgctggccgcttttgacatacctgaccctacctcactcgatgccaaagaggcaatccaaaccccttcagaagaaaacgagagtccccttaaacccccaggcatatgcatggacgagagcgtatccttgtcacacagtggcagcgctcctgacgtgcccgctgtgagcgtcatcgtcaaaaataccagccggcaggagagtttcgaagctgaaaaagatcacatcacaccgagcctactgcacaatggctttcggggttcggacctgcctccggatccacacaactgtggcaagttcgactcaaccttcatgaacggggacagcgccaggtctttccctggcaagctcgaaccacccaaatccgagcctctcccaacctttaaccagttctcaccaatttcctctcctgagcctgaggaccccattaaggataacggctttggtatcaaacccaaacactccgattcttatttcccacccccactgggatgcggggctgtaggtggtcctgtactggaggcgctggctaaattccccgtgcctgagctgcacatgtttgatcacttctgtaaaaaagagcccaaacctgagccgctcccactgggcagccagcaggaacatgaacagtccgggcaaaacacagtggagcctcataaggatccagatgctacccggtttttcggagaagccttggagtttaatagccatccctccaatagcattggtgagtctaagggcctcgctcgggagctggggacttgcagtagtgtgcctcctcggcagaggttaaagcctgcacattccaagcttagcagttgcgtggccgctctggtggccttacaggccaaaagagtggctagcgtaaccaaggaggatcagcctggacacaccaaagatctgtccggtcctaccaaggaatccagcaagggctctccaaaaatgccaaagagccctaagtcccctagatcaccactggaggccacgaggaagagcataaagccctcggactctcccagatccatctgctccgactcatcctcaaagggatcaccctctgtggcagctagttctccccctgccatccctaaggtgagaattaaaactatcaagacatcatcaggcgagatcaaaagaaccgtgacccggatcttgccagaccctgatgaccctagcaagtccccagtgggcagccccctcgggagcgcaatcgccgaggcaccctcggagatgcctggcgacgaggtcccagtagaagagcactttcctgaggctgggaccaattctggatccccgcagggagccaggaagggcgacgagagcatgacaaaggcaagcgattcgtcctccccttcttgcagcagtggcccacgtgttcccaaaggagccgcacctggttctcagaccggaaaaaaacagcagtccacagcacttcaggcttctactctcgctcccgcaaatttgctccccaaggctgtgcacctggcaaatttgaacctggtccctcatagtgtagccgcaagtgtgactgcgaaaagttctgtccagcgtagatcccaaccgcaacttacccaaatgagcgtccctctggtgcatcaggtgaagaaggcagcaccattaatcgtcgaggtgtttaataaggtgctgcatagcagtaacccagtgcctttgtacgctccgaatctaagtcctcccgcagatagcagaatacacgtgcccgcttcagggtactgctgcttggaatgcggtgatgcctttgccctggaaaaaagtctgtcccagcactacggacggcgaagcgttcatatcgaagttctttgtacgttatgttccaagacactcctcttcttcaacaaatgttcgcttctacggcatgcacgagatcacaaatcaaaagggctcgtaatgcagtgttcacagctgcttgtgaagcccatctccgcagaccagatgttcgtgtcagcccctgtgaactccactgcccctgctgcaccggcaccgagtagcagcccgaaacatggcctgacgagtgggagcgcttcccctccccctccggctctcccgttataccctgacccagttcgactcattcggtattcaataaagtgcctcgaatgccataaacagatgcgcgactacatggtgctcgctgctcacttccagcgcaccacagaagagactgagggtctaacctgccaggtgtgccagatgctccttcctaaccaatgttccttttgcgcccatcagaggatacacgctcacaagtcaccatactgttgccccgagtgtggagtgttatgcagaagcgcttacttccagactcacgtcaaagaaaactgtctacactacgctaggaaagtcggatacagatgtattcactgtggtgtggtgcatctcacactggcacttctaaagtcacatattcaagagagacactgccaagtatttcacaagtgcgccttttgtccaatggcgttcaagaccgcgagcagcactgctgaccacagcgcaacacagcaccctacccaacctcacaggccctctcagctaatctacaaatgtagttgcgagatggtcttcaacaaaaagaggcacatacaacaacatttctaccaaaacgtcagcaaaacccaggtcggggttttcaagtgccccgagtgccccttgctgttcgtgcagaagccggaattaatgcagcacgtaaaatccactcacggagtgccaaggaacgtggatgagttatccagcctgcagagctccgcagacacaagcagctcccgcccagggtccagagtgccaaccgagcctcccgcaacaagcgttgcagctcggagctcctctttgccgtccggccgatggggtaggccagaagcccatagaagagtggaagcccgaccgagactaaggaatactggatggacctgccaggagtgccaggagtgggttcctgaccgagagagctatgtgtcacacatgaagaaatcacatggccgaacactcaagcgttacccttgccggcagtgtgagcagtcttttcatacccccaactccctcaggaaacatattcgtaataatcacgatacggtaaagaagttctatacctgcggatactgtaccgaggactcaccatctttcccgcgacccagcctcttagagtcgcacatctcactaatgcacggcatccgcaatccagacctgtcccaaaccagcaaagtgaaacccccaggcggacactctccacaggtcaaccatctcaagcggccagtaagcggggtgggcgacgctcctgggacatctaatggagcgaccgtctcgtctactaagcgtcataagagcctgttccagtgcgcgaagtgttcttttgccacagactcaggtcttgagttccagagccacatccctcagcatcaggtcgatagttcaactgctcagtgtctcctgtgcggtctctgttacacttcggcctctagtctttcaaggcatctgtttattgtccacaaagtgcgcgatcaggaagaggaggaggaggaggaagccgcagcagcagagatggcagtcgaggtggcagagccagaagaaggctctggcgaggaggtgccaatggagactagagaaaacggactggaagaatgcgccggagagcccctttcagctgatcctgaggcgagacgcctgcttggccctgccccagaggatgacggaggacacaatgaccattctcagccccaggccagccaggaccaagatagtcacaccctaagcccccaagtgtag

SEQ ID NO: 247720 - DNA, 2379 bp, synthetic construct
  misc_feature 1..2379: note = Description of Artificial Sequence: Synthetic coding sequence
  source 1..2379: mol_type = other DNA
atggcagcgattaacccttgggccagctggggcgctctgaccgaccaatcatggggcatgacagcagtcgacccttgggcttcgtgggccctctgccctcaatatccagcatggcatgtggagggcagtctggaggagggccgtagggccactgggctccccgcagcccaggtgcaggaaccagtgacttttaaagatgtggcggtggactttactcaagaggagtggggccagttggatttggtccagcggacgctgtaccgcgacgtgatgctcgagacctacggccatttgctgtccgtcggcaaccaaatcgcgaaaccagaggtgatctctttgttggagcaaggcgaggagccatggtccgttgagcaggcctgcccccaaagaacctgccctgagtgggtaagaaacctggaatccaaggccttgataccagcccagtcaattttcgaagaggagcagtctcacggcatgaagttggagagatatatttgggacgatccgtggttcagcaggcttgaggttctggggtgcaaggaccagctagagatgtaccacatgaaccagtcaacagccatgaggcagatggtcttcatgcagaaacaggtcctgagccaacgttcctctgagttctgcgggcttggtgcagaatttagccagaatctgaatttcgttccatctcagcgtgttagtcagatcgagcatttctacaagcccgatactcacgcccagagctggcgatgcgacagcgctattatgtacgccgacaaagtgacctgcgagaacaacgactacgacaaaacagtataccagagcatccaacctatctaccccgctcggatccagaccggggacaatctgttcaagtgtaccgatgctgtcaagagttttaaccacattattcactttggcgatcataagggcatccacaccggcgagaagctctatgagtacaaagagtgtcaccaaatctttaatcaatcaccatcattcaacgaacatccacggctgcacgtcggagagaaccaatacaactataaggaatacgagaacatcttctattttagcagttttatggagcatcagaagattggtaccgtggaaaaggcctataagtacaatgagtgggagaaagttttcggctatgattccttcctaacgcagcacactagcacttacacagccgaaaagccttatgactataatgaatgcggaacttcatttatttggtctagctacctgatccaacataaaaagacccacaccggggagaagccttacgaatgcgataaatgtggcaaagtgtttaggaataggagcgccctcaccaaacacgaacgcacccatacagggattaaaccctacgagtgcaataaatgtggcaaggccttctcatggaactcccatctcatcgtacacaaaaggattcacacaggagaaaaaccttacgtctgcaacgagtgtgggaagtcctttaactggaactcccacttgatcgggcatcaaagaactcatactggagaaaagccttttgaatgcactgagtgcggcaagtctttcagctggtccagtcacctgatcgcccatatgcggatgcacactggggagaagccgtttaaatgtgatgagtgtgaaaaggccttcagggattactccgcattgagtaagcacgagaggacacacagtggggctaaaccctacaagtgcacagaatgtggaaagtctttctcatggtcatcccacctgatagctcaccagcgcacgcataccggagagaagccatacaactgtcaagaatgcggtaaagctttcagagagcgttccgccctcactaagcacgagatcatccactccgggatcaagccttatgaatgcaataagtgcggaaagtcatgctcccagatggcccatttggttagacaccagagaacccatactggagaaaagccctatgagtgtaataagtgtgggaaatctttttcccagtcctgtcacctggtggcccatcgccgaattcataccggagagaaaccatacaagtgtaaccagtgtgagagatcgtttaactgctcgtcacacctaattgcccataggcgcacacacaccggcgagaagccttacagatgtaatgaatgcgggaaggcatttaacgagtcttcgagcctcatcgtgcacctgaggaaccatacgggagaaaaaccctataagtgtaaccactgcgaaaaggccttttgcaagaatagtagccttattattcaccagcggatgcactctggtgaaaagagatttatatgctcggagtgtgggaaggctttttccggtcactcagctctattgcagcaccagagaaatcactcagaggaaaagcttaactag

SEQ ID NO: 247721 - DNA, 2109 bp, synthetic construct
  misc_feature 1..2109: note = Description of Artificial Sequence: Synthetic coding sequence
  source 1..2109: mol_type = other DNA
atgctggagacatacggccatctcctatccgttggaaaccagatcgccaaacccgaagtgatctcactcctcgagcagggtgaggagccgtggagcgtggaacaggcatgtccacagcgaacttgtcccgagtgggttcgtaacctcgagagcaaagccctgatcccggctcagtcgatcttcgaggaggaacagtcccacgggatgaaactggaacgctacatttgggacgatccatggtttagtaggctggaggtcctgggctgtaaggaccagctggagatgtatcatatgaatcaatcaactgccatgaggcagatggttttcatgcagaagcaggtattatcccagcgttcttctgaattctgtggcttaggcgctgaattttcacagaatctcaacttcgtaccgtctcagagagtctctcagatagaacacttctataaaccggatacccacgcgcagtcctggcgctgcgattccgccatcatgtacgccgacaaagttacctgtgaaaacaacgactacgataagacggtgtaccagtcaatccagcccatctaccctgccagaatccagaccggtgataacttgtttaagtgcacagatgccgttaagagttttaaccacatcattcacttcggtgaccacaagggtatccacacaggagaaaagttatacgagtacaaagagtgtcatcagatatttaaccaatcaccaagcttcaatgaacatccaagactgcacgttggagaaaaccaatacaattacaaggaatacgagaacattttttacttcagtagtttcatggaacaccaaaaaatagggaccgtggaaaaggcgtataaatacaacgaatgggaaaaggtgttcgggtatgattcatttttgactcagcacacttctacctacaccgctgagaagccgtatgactacaatgagtgtggcacaagcttcatatggagttcataccttatccagcacaagaagacacacactggcgagaagccttacgagtgtgacaaatgcggcaaagtttttcgaaatcggagtgccctcactaaacatgagaggacccatactggaatcaaaccatatgagtgcaataaatgcggaaaggcctttagctggaattcccacctcatagttcacaaaagaattcacactggggagaaaccctacgtgtgcaacgaatgtgggaaaagttttaattggaatagtcaccttatcgggcaccagcgcacccataccggcgagaaaccttttgagtgtacggaatgtggtaaaagcttctcttggagctcccatcttattgcacatatgcggatgcatactggcgagaaaccgttcaaatgtgacgagtgcgaaaaggcgttccgagactacagtgctctgtccaagcacgagcgcacccatagtggcgctaagccctataaatgtactgagtgcggaaaaagtttcagttggtcgtctcacctcattgcccaccaaagaacacacaccggcgaaaaaccttacaattgtcaagagtgtggtaaagctttcagagaaaggtccgcgctgacaaagcatgaaataattcactcaggcattaagccctacgaatgtaataaatgcgggaagtcgtgctctcagatggctcacctggtgcggcatcaacgtacccatacgggtgagaaaccttatgaatgcaacaagtgcggtaagagctttagccagagctgccacctcgtagcccaccgcagaatccataccggcgaaaaaccatacaagtgtaaccagtgcgaaaggtcttttaattgtagctcacatctgatagctcataggagaacgcatacaggggagaagccttaccgttgcaatgaatgcggcaaagcttttaatgagagctcgagcctcatcgtgcaccttcgcaaccacaccggagagaagccttataaatgtaaccactgtgagaaggccttctgcaagaattcatctctgatcatccaccagcgcatgcattctggtgaaaagagatttatatgcagcgagtgcggtaaagccttctccggccattctgccctcctccagcatcagagaaatcattctgaggagaagctgaactag

SEQ ID NO: 247722 - DNA, 1527 bp, synthetic construct
  misc_feature 1..1527: note = Description of Artificial Sequence: Synthetic coding sequence
  source 1..1527: mol_type = other DNA
atggccgctattaatccttgggcctcatggggcgctttgaccgaccaaagctggggcatgaccgcagtggatccgtgggcctcatgggcactgtgtccccagtaccctgcttggcacgtggaagggagccttgaggagggacgcagggccactggtcttcctgctgcacaggttcaggagcctgtgaccttcaaggatgtggcagtcgatttcacccaagaggagtggggccaattagatttggtgcaacgtaccctgtatcgcgacgtcatgctcgaaacgtacgggcacctgctgtctgtgggcaatcagattgcaaagcccgaagttatatccttgctggagcagggggaggagccgtggtctgttgaacaggcttgcccacagagaacatgtcctgagtgggtgcgcaatttagaatccaaggcattaattcccgctcagtctatcttcgaggaagaacagtcccatgggatgaagctggagcgctatatctgggatgacccttggttttctaggttggaggtcctgggctgtaaagaccagcttgaaatgtaccatatgaatcagtctactgccatgagacaaatggtgtttatgcagaagcaggttcttagtcagcgctcgtccgaattttgcgggctgggggcagagtttagtcagaatttaaacttcgtaccatctcagcgcgtctcccaaatcgagcatttctacaaacccgacacccacgcacagtcatggagatgtgacagcgccatcatgtatgcagacaaagttacctgcgagaataacgattatgacaagactgtttatcagtccattcaaccaatttaccctgcacgtatccaaactggggacaacctcttcaagtgtaccgacgccgtaaaatcatttaatcatatcatacattttggcgaccataagggaatccacacaggcgaaaagctatacgagtataaggagtgccatcaaatcttcaatcaaagtcccagtttcaacgagcatcctcgcctccatgtgggcgaaaaccagtacaattataaggaatacgaaaacatcttttacttcagctcttttatggaacatcagaagataggaaccgtggagaaagcctataagtacaacgagtgggagaaagtttttgggtacgactccttcctaacccagcacacctccacctacacagccgaaaagccttacgactacaatgaatgtgggacttcctttatctggtcatcttaccttattcagcacaaaaagactcataccggagagaagccctacgagtgtgacaaatgtggaaaagtcttccggaacagatccgcactcactaaacatgagagaacacacaccgggattaagccttatgagtgcaataagtgtggaaaagcctttagctggaacagtcatctgatcgtacataaacggatacacacaggtgaaaaaccctacgtatgtaacgagtgtggcaaatcatttaattggaactctcatttgatcggacaccaaagaacgcacactgggtag

SEQ ID NO: 247723 - DNA, 2523 bp, synthetic construct
  misc_feature 1..2523: note = Description of Artificial Sequence: Synthetic coding sequence
  source 1..2523: mol_type = other DNA
atgaaagaggataaatcctccatacgagaggcaatctctaaagcaaaatcaaccgccaatattaagaccgaacaggagggagaggcttcagaaaagtcactccacctaagcccacagcacatcacacaccagactatgccaatcggacagcggggttccgagcagggtaagcgggtagagaacattaacgggactagttatccaagcctgcagcaaaaaaccaacgccgtgaaaaaactgcataagtgcgatgaatgcggaaaatccttcaagtacaactctaggctcgtccagcataagatcatgcacacaggggaaaaaagatacgaatgcgacgactgcgggggtacctttcgctcttctagcagtctgcgggtgcataagcgaatccacacaggcgaaaaaccatacaagtgcgaggagtgtggtaaggcatacatgtcgtactcctcactcatcaatcataagtctacgcacagcggcgagaagaactgcaaatgcgacgaatgtggcaaaagtttcaactattcatccgtgttggatcaacataaacgcatccacaccggcgaaaagccatatgaatgcggagaatgcggtaaggcatttcgcaattcttccgggcttagagtgcacaaacgcatacacacaggcgaaaaaccatatgaatgtgacatctgtgggaaaaccttcagtaacagttcaggactgagagtgcacaaaagaatccacaccggggaaaagccatatgaatgcgacgagtgcggcaaggcattcatcacatgtaggaccttactgaatcacaagagcattcactttggcgacaaaccctacaagtgtgacgaatgtgaaaagagtttcaactactccagtttgctgatccagcataaagtcatacacactggcgaaaaaccttacgaatgtgatgagtgcggtaaagcatttaggaattcatctggcctgattgtccataagcgtattcacaccggtgaaaagccttataagtgtgatgtctgcgggaaagccttctcttacagctccggcttggctgttcataagtcaattcacccaggcaaaaaggctcatgagtgcaaggaatgtggcaagagtttttcctataattccctgctgctgcagcaccggaccatacataccggcgagcgcccatatgtgtgtgatgtctgtggcaagactttccgtaataatgcaggcctgaaggtccaccgcagactccacacaggcgagaagccatacaaatgtgacgtttgcggcaaagcttatatttcccggagtagcctgaaaaaccataaaggcatacacctgggtgagaagccctataagtgctcgtactgcgagaagtcctttaactactcatcagctctggaacagcacaaaagaattcacacacgcgagaaaccatttggatgcgacgaatgtgggaaggctttccgcaataattctggtctgaaggtgcataaacgaatacacacaggcgagagaccctacaaatgcgaggaatgtggtaaagcttacatttccctttcatccctaattaaccacaagtccgtgcaccccggagaaaaaccctttaaatgcgacgagtgtgagaaggctttcatcacctatcgcacattgacaaaccataaaaaggtgcacctaggagaaaaaccatataagtgcgacgtatgtgaaaaatctttcaattatacatcactcctatctcagcacagacgcgtgcacactcgcgagaaaccctatgaatgtgatcgctgtgagaaagtgtttagaaataactcctccctcaaggtgcacaagaggatccacaccggcgaaaggccatatgaatgtgatgtctgcggaaaagcgtatatctctcatagtagtctaattaatcataagtccacccaccccggacgcacccctcatacgtgcgacgagtgcggcaaggcgtttttttcttctcgaacattaataagccacaagagagtgcacctgggcgagaagccgtttaagtgtgtggagtgcgggaaaagtttcagttattcctccctactgagtcagcacaagcgtattcacacaggagaaaaaccttacgtctgtgatcggtgtggaaaagcttttcgcaattcttctggcctaaccgtccacaaaagaatccacacaggggaaaaaccatacgaatgtgacgaatgcggcaaggcatacatctcgcactcttctctcataaaccataagtccgtgcatcagggcaaacaaccctacaattgcgaatgtggtaagagttttaactataggtctgtgctagatcagcataaaaggatccatacaggcaaaaagccctacaggtgcaacgaatgtgggaaagctttcaacatccgcagtaatctgacaaaacacaaaaggacccacacaggggaagagagcctgaacgtgatctacgtgggatcctactccggaacctctcagaaaagaacctatgagggcggaaatgctcttgacggtgggagaatgaggatgcccttatag

SEQ ID NO: 247724 - DNA, 1497 bp, synthetic construct
  misc_feature 1..1497: note = Description of Artificial Sequence: Synthetic coding sequence
  source 1..1497: mol_type = other DNA
atgtcatactcctctctgatcaatcacaagtccactcatagcggcgaaaaaaattgcaaatgtgatgaatgtggcaagtccttcaactactcatcagtccttgatcagcacaaacgtatccatacgggagaaaaaccttacgaatgcggggagtgtggtaaagcgtttcgcaacagttccgggctgcgggtacataagcgcatacataccggtgaaaagccatatgagtgtgacatctgtggcaaaacattctcaaattcgtccggattgcgggtgcacaaacggatccatacgggtgagaagccatatgaatgcgacgaatgcggaaaagctttcattacgtgtagaaccctcttgaatcataaatcgattcacttcggggataagccctacaaatgtgatgagtgcgggaaggcatttagaaataactctgggctgaaggtccataagcgcatccacactggcgagagaccttataagtgcgaggagtgtggcaaggcctatatatctctgtctagtctgattaatcacaagtctgtgcaccctggcgagaaacctttcaaatgtgatgagtgcgagaaagcatttataacataccgcactctaacgaatcacaagaaagtgcatctcggcgagaagccttacaaatgtgatgtgtgtgagaaatcatttaactacaccagtcttctgtcccagcacagaagggtacacacccgggaaaaaccctatgagtgtgatcgctgtgagaaggtgttccgcaacaattcaagcctcaaggttcacaaaaggattcacacgggggagaggccatacgaatgtgacgtgtgtggcaaggcctacatctctcattcatccctcattaaccataaaagtacgcatccaggcagaaccccccacacttgcgacgagtgcggcaaagcattcttctcctcgaggactctgatatcacacaagagggtgcatctcggggagaaacctttcaaatgcgtcgaatgtggaaaatcattcagttatagttcactgctctctcagcacaaaaggatccacacaggcgaaaagccctacgtgtgtgacaggtgcggtaaagcattccgcaacagctctggtttgacagttcataagcggatccacactggtgagaaaccatacgagtgcgatgaatgcggaaaggcttatatctcacattcctcactcataaaccataagagcgttcaccaggggaagcagccatacaattgcgaatgtggaaagtcgttcaactaccggtcagtactcgaccagcacaaacgcattcacactggcaagaaaccttaccggtgcaatgagtgtggtaaggccttcaatattaggagtaatcttacaaagcataaacggacacataccggagaggagtccctaaatgttatctacgtgggctcttattccggtacatcccagaagaggacatacgagggcggtaatgcccttgatgggggacggatgcggatgcccctctag

SEQ ID NO: 247725 - DNA, 2703 bp, synthetic construct
  misc_feature 1..2703: note = Description of Artificial Sequence: Synthetic coding sequence
  source 1..2703: mol_type = other DNA
atgtcacacctgaagacaagtacagaggacgaggagcccaccgaagaatacgagaacgtgggcaatgctgcatccaaatggcctaaagttgaggacccaatgcccgaatccaaagttggggatacttgtgtgtgggactcgaaggtggaaaaccagcagaagaaacccgtcgaaaacaggatgaaagaggacaagagcagcataagggaggcaatatccaaagctaaatcgaccgccaatatcaaaaccgaacaggaaggcgaggccagcgagaaaagcctgcatctcagtccacagcacattacccatcagaccatgcctatcggtcaacggggttccgagcaaggtaagagagtggagaatatcaatggcaccagttatccgagcctgcagcagaaaacaaacgcggtgaagaagctgcataagtgtgatgagtgtgggaaatcctttaagtacaactcccggcttgtgcagcacaagatcatgcatactggcgagaagaggtatgagtgtgacgactgcggagggacatttagatcttctagcagtctccgcgtccacaagcggatccataccggcgaaaagccctacaaatgcgaggaatgtggaaaggcttatatgagctacagttccttgatcaatcacaagagtactcactcaggcgagaagaattgtaagtgcgacgagtgcggcaaaagtttcaattattcctcggtgctcgaccagcataagagaattcacacgggtgagaagccctacgaatgtggagagtgcggaaaagcgttcaggaactcttcgggtctgagggtccacaagagaattcacacaggggagaaaccctatgaatgcgatatctgtgggaaaaccttctccaacagctccgggcttagggttcacaagcgtatccacacaggggaaaagccatatgagtgcgatgagtgcggaaaagcattcatcacgtgccgtaccctcctgaaccacaagtctatccactttggggacaagccctacaagtgcgatgagtgtgaaaaatccttcaactatagttccctgctgatccagcataaggtcatccacaccggtgagaaaccttacgagtgcgacgagtgcggcaaagctttccgaaattcatctggattgattgtgcacaagagaattcataccggagaaaaaccttacaaatgtgatgtgtgtggcaaagcctttagctactcttcaggactggccgtacacaaaagcatccaccctgggaaaaaggcccatgagtgcaaagaatgcgggaaatccttcagttataacagcttgttgctgcagcacaggacaatacataccggcgaaaggccctacgtgtgcgatgtttgtgggaagaccttccgcaacaacgcagggttaaaggtacaccgtcgcttgcacacgggggaaaagccatataagtgtgacgtttgtggaaaggcttacatctccaggtcttctttgaagaaccataagggtatccatctcggggagaagccttataagtgctcttattgcgaaaaatcttttaattattcctccgctctggagcagcataagaggatccacactcgagagaaaccatttggatgcgacgaatgtggtaaggcattcaggaacaactcgggtctcaaggtccacaagcgaatccatacaggagagcgcccatataagtgcgaagaatgtggaaaggcgtacatcagcctcagtagcctgattaatcataagtctgtgcaccctggagagaagccgttcaaatgcgacgaatgcgaaaaagcctttattacttatcgcactttaacaaatcacaaaaaagtgcatttgggggagaagccgtacaagtgcgatgtttgcgaaaagagctttaactacacatcactgcttagccaacataggagagtccacacgagagaaaaaccttacgagtgcgataggtgtgagaaggtgttccgtaacaattcatcccttaaggttcacaagaggattcacaccggggagagaccctacgaatgtgacgtctgtggcaaagcttacatcagtcactcttccttaatcaatcacaaaagcacccatcccggtagaacaccccatacctgtgatgagtgcggaaaagcctttttcagttctaggactctcattagccataaacgagtgcatttgggcgagaagcctttcaagtgtgttgagtgcggaaagagcttttcctatagtagccttttgtcgcagcataagaggatccacactggagagaagccttatgtttgcgatcggtgcggcaaggccttcaggaattccagtgggttaactgtgcacaagaggatccacactggggagaaaccttacgaatgcgacgaatgcggcaaggcttacatctcgcattcctctctcatcaaccacaagagcgtacaccagggtaagcaaccctacaattgtgaatgcggtaagagcttcaactataggagtgtcctggaccagcacaaaaggattcacactggcaagaaaccatacagatgcaacgaatgtgggaaagccttcaatatccgcagcaatctgaccaaacacaaacggacccacactggcgaagaatctcttaatgtgatttatgtgggctcatacagtgggacatctcagaaacgcacttacgaaggcggtaacgccctggatggcggaaggatgagaatgcctctgtag

SEQ ID NO: 247726 - DNA, 483 bp, synthetic construct
  misc_feature 1..483: note = Description of Artificial Sequence: Synthetic coding sequence
  source 1..483: mol_type = other DNA
atgcctgaaagcaaggttggggatacatgtgtgtgggattcaaaagtggaaaatcagcaaaagaagcctgttgagaacaggatgaaagaagacaagtcttccatacgggaagctattagtaaagccaaatctacagcgaacataaagaccgagcaggagggtgaggccagcgaaaagtctctgcacctgtctccacagcatatcacacaccagaccatgcctattggtcagagagggagtgaacagggcaagcgtgtggaaaacattaatgggacctcatacccgtctttgcagcagaagacaaacgccgttaagaagctccataagtgcgacgaatgcggtaagtcatttaaatataattctagactggttcagcacaaaatcatgcatacgggcgaaaagcggtacgagtgtgacgattgtggaggcacctttagatccagctcaagtcttagggtgcacaaacgtattcatactgggtag

SEQ ID NO: 247727 - DNA, 315 bp, synthetic construct
  misc_feature 1..315: note = Description of Artificial Sequence: Synthetic coding sequence
  source 1..315: mol_type = other DNA
atgcctgaatctaaagtaggagatacctgtgtgtgggactccaaggtagagaatcaacagaagaagcctgtggaaaatagaatgaaggaagacaagtctagcattagggaagcgatctccaaagctaagtccacagctaatattaagaccgagcaggaaggggaggcatcagagaagtcccttcacctctccccccaacatatcacccatcagaccatgcccattgggcagcgcggatctgagcagggtaaaagggttgaaaacattaatggtactagttatccatcactacagcagaaaaccaacgccgtgtag

SEQ ID NO: 247728 - DNA, 237 bp, synthetic construct
  misc_feature 1..237: note = Description of Artificial Sequence: Synthetic coding sequence
  source 1..237: mol_type = other DNA
atgccggagtctaaggtaggagatacatgcgtctgggatagcaaagtggaaaaccaacagaaaaaacctgttgaaaacaggatgaaagaagataaatctagtattcgagaagccatctctaaggctaagagcacagccaacatcaaaactgagcaggaaggcgaggcctccgaaaaaagtctgcacttgtcaccccaacatatcacgcaccagactatgcctatcgggcagcggtag

SEQ ID NO: 247729 - DNA, 2604 bp, synthetic construct
  misc_feature 1..2604: note = Description of Artificial Sequence: Synthetic coding sequence
  source 1..2604: mol_type = other DNA
atgccagaaagcaaggtcggggacacctgcgtgtgggactctaaggttgagaaccaacagaaaaaaccggtggagaacagaatgaaagaagataagagcagcattagagaggccataagcaaggcaaaatccactgcaaatatcaagaccgagcaggaaggtgaggcctcagaaaagagtctgcacctgtcacctcagcacattacccaccagactatgccaatcggccagcgtggaagtgagcagggaaaaagagtggaaaatattaatggtacctcttatccatccctgcagcagaagaccaatgcggtgaagaagttacacaagtgtgacgagtgtggcaaatccttcaagtataactcacggctcgttcagcataagattatgcacacgggggagaaaaggtacgagtgcgatgattgtgggggaacctttcgctcctcttcatctctgcgcgtccataaaagaatacacaccggcgagaagccatacaaatgcgaggaatgcggcaaagcctatatgagctactcctccctcatcaaccacaagagcacgcatagcggggagaagaactgtaaatgcgacgagtgtggtaaatcctttaactattcatcagttctcgatcagcacaagaggattcacacaggcgagaagccttacgagtgtggcgagtgtggaaaggccttccgcaactcttccggactcagggtgcataagagaattcatacgggagagaaaccctacgaatgcgacatatgcggtaagaccttcagcaattcatccggcctgagagtgcacaagcgcatccataccggggagaaaccgtatgaatgcgacgagtgtggtaaagcttttatcacctgtaggacactcctgaatcacaaatccatccacttcggagacaaaccttataagtgtgacgagtgtgaaaaaagcttcaattatagcagcctgctgattcaacacaaggtcattcatacaggggaaaaaccctatgagtgtgatgaatgcgggaaggcttttcgcaacagctctggtctgatcgtacataagaggattcatactggagaaaaaccatacaagtgtgatgtctgcggtaaggccttttcttactcgtccgggcttgctgtgcacaagagtatccatccaggtaaaaaggcccacgagtgcaaagaatgcggcaagtccttctcttataattccctactcctgcagcaccggactatacacactggcgaaagaccatacgtgtgtgacgtatgtggcaaaaccttccggaacaacgcaggcttgaaagtgcaccgaagacttcatacaggtgagaagccgtataagtgtgacgtgtgcggaaaggcttacatctcacggtcttccctcaagaaccataagggaatccatctgggcgaaaaaccttataaatgctcctattgtgaaaaatccttcaactatagttcagccctggaacaacacaaacgtatccacacccgcgaaaaaccctttggttgcgatgagtgtggcaaagccttcaggaataactccggcctcaaggtgcacaaaaggattcacacaggagaacggccttataagtgcgaagagtgcggaaaagcctacatttcacttagctcacttatcaaccacaaatccgtgcatcctggggagaagccattcaaatgcgacgagtgtgagaaagccttcataacgtatcgcacgctgacaaatcacaagaaggttcacctgggagagaaaccctacaagtgcgacgtttgcgagaagtccttcaactatacctccctgttatcgcagcaccggagggtccatacccgcgaaaagccttacgaatgcgatcggtgtgagaaagtgtttcgaaacaactccagtctcaaggtgcataagaggattcataccggggagaggccatatgaatgcgatgtttgcggcaaagcctacatcagtcactcctccttaatcaatcataaatctactcaccctggccgaacgcctcatacatgcgatgaatgcggcaaagcattcttttctagtagaacactgatttcgcacaagcgggttcacttgggggaaaagccctttaagtgtgtggagtgcgggaagagcttctcatattcttctttgctgtcacagcacaaaaggatacacacaggtgaaaagccctatgtgtgtgacagatgtggtaaggcgttcaggaactcgagcgggttaaccgttcataagagaattcacaccggtgaaaaaccctacgagtgtgatgagtgtggtaaggcttatataagtcactctagtctcattaaccacaagagtgtgcatcagggcaaacagccatacaactgcgaatgcggcaaaagcttcaattacagatccgtgctcgaccagcataaaaggatccacacagggaaaaaaccttatcgctgtaatgagtgtgggaaggcttttaatatccgttcaaacctcacaaagcacaagagaacacacaccggagaagagtctctgaatgttatatacgtgggcagttactcggggacctcccaaaagaggacatacgagggcggtaatgcattggatgggggacggatgcgcatgcctttgtag

SEQ ID NO: 247730 - DNA, 1386 bp, synthetic construct
  misc_feature 1..1386: note = Description of Artificial Sequence: Synthetic coding sequence
  source 1..1386: mol_type = other DNA
atggacagcgtggcatttgaagacgtcgccgtgaactttactctggaggagtgggccctccttgaccccagtcagaaaaacctctacagggacgttatgagagaaactttccggaatctggcgagcgtggggaagcaatgggaggaccagaacatcgaagaccctttcaagatcccccgaagaaatatttcccatatccctgaaaggttgtgtgagtccaaggaaggtggccagggagaggagacattctcccagatccctgatggaatcttgaataaaaagacccccggagtgaagccgtgtgaaagctccgtctgcggggaggtgggcatggggcctagtagtctgaatcgacatatccgcgaccacaccggcagggagcccaatgagtaccaggagtatggcaagaagagctacaccagaaatcaatgtggcagggccctgagctatcacaggagcttccctgtacgcgagagaacccatcctgggggaaagccgtacgactgtaaggagtgcggagaaacatttatcagtctcgtgtctatcagaaggcatatgctgactcacaggggcggtgttccctacaagtgtaaggtgtgtgggaaggcctttgattatccctcattattcagaatacacgagcggtcacacacaggtgaaaagccctatgaatgtaagcagtgtgggaaggcatttagctgtagctcttacatccggattcacgagagaacacacacaggagataagccttacgagtgcaagcagtgtggaaaagctttcagctgttctaaatacattcgcattcacgaacgcacacatacaggcgagaagccatatgaatgcaagcaatgtgggaaggctttccggtgcgcttcctcggtgcggtctcacgaacggacccatacaggggagaaactgttcgaatgcaaggagtgtggaaaagcactgacctgtctggcatccgtaagacgacacatgattaaacatacaggtaacggcccttacaagtgcaaggtgtgcgggaaagcctttgatttcccgtcaagctttaggattcatgaacgcacccacaccggggaaaagccctacgattgcaagcagtgcggaaaggcgttttcttgcagctctagctttaggaaacatgagaggattcacactggagagaagccctataagtgtacgaagtgtgggaaagctttttccaggtcatcatactttcgcattcacgaacggacacacacgggggaaaaaccctatgagtgtaagcagtgtgggaaagcattctctcgaagcacctatttccgcgtacatgaaaagatccacactggcgagaagccatatgaaaatcccaatccgaacgcgtcggtcgtaccagtcctgtcatag

SEQ ID NO: 247731 - DNA, 3168 bp, synthetic construct
  misc_feature 1..3168: note = Description of Artificial Sequence: Synthetic coding sequence
  source 1..3168: mol_type = other DNA
atggtcgggagccacgcagacatggcccctgcctccaccgccgagggggctggggagaagccaggcccagccgctcctgcccctgccgcacagtacgaatgcggtgaatgcggaaaatctttcagatggagttcgcgcttgctgcaccaccagcgtactcatactggagaacggccatacaaatgtcccgactgtccaaaggccttcaaggggtcatccgctctcctgtatcaccagcggggtcacactggcgagcgcccttatcagtgtcccgattgccccaaggctttcaagaggagcagccttctgcagatccaccgatccgttcacaccggactcagggctttcatctgtggccaatgcggactggcctttaagtggtcgtcccattatcaatatcaccttcggcagcacaccggggagagaccttacccatgtccggattgccctaaggcctttaagaactcaagtagcctaagaaggcatcgccacgtgcatactggggagcgaccatacacgtgtggggtctgcgggaagagcttcacacagtccaccaatctgaggcaacatcagagagtccatacaggggagagaccattccgatgccctttgtgcccaaaaacttttactcacagctctaatttactcttgcatcagcgaacgcacggcgctgcgccagcccctgggacggcctctgccgcaccgccaccccagagtagggaacccggtaaagtgttcgtttgtgatgcctacctacaacgccaccttcagccccatagtcctcctgcaccacccgcaccacctccaccaccacctcccgtggtgccggagctcttccttgcagctgcagaaacaactgttgagctggtgtacaggtgcgacgggtgcgagcagggcttttctagcgaagaactactgttggagcaccaaccctgcccgggtcctgacgcggctccacagccgcaggaggctcccgcagaggcgccaaaagcggatcaacccccaagccctctaccccaacccccaccaccggcagctgctcctgcaccaggattcgcctgtttgccctgtggcaaatcattccgaacagtcgctggactgtcccgccaccagcactcccacggggcagccggtggtcaggcatttcggtgcgggtcctgtgacggtagcttcccccagctcgcctctctgctagcacaccagcagtgccacgttgaggaggcagccgctggcagaccaccaccccaagctgaggcggctgaagtcacatgtccccaggagcccttggctcctgctgccccagtccctccgccacccccatcagctcctgccagcgccgagcggccatataaatgcgctgagtgtggaaagagttttaagggatcatctggtctgagataccacctaagggatcacacaggagaacgaccataccaatgtggggagtgcgggaaggcattcaaaagatccagcctgctggcaatccaccagcgcgttcatacaggactccgggcttttacatgtggacaatgcggacttacgtttaaatggtctagccactaccagtatcacctgcggctccatagtggagagcggccatacgcctgcggcgaatgcggtaaagcttttcgaaatacatcgtgtctgaggaggcaccggcacgtgcacaccggcgagcggccacacgcttgtggcgtgtgcggcaagtcatttgcccaaacctccaatcttagacagcaccaaagagtccatacaggcgagaggccattcaggtgtccactctgtccaaagactttcactcattcctccaatttgttgctccatcagcgcacgcattcagcagagcggccattcacatgccctatttgtgggagaggctttgtgatggccgcatacctacagcggcatcttcgcacacacgcccctgcaaacaccccaccttctaccacggcaccggctgccggaccacaacctcctgcgcctttggctgccgctcgcgcacctcccgctacgcaggatgtccacgtgttgccacacctccaggccactttatcccttgaggtggctgggggaactgcccaggcccctagcctggggcctgcagcccctaactcccagacattcctgctcgtgcaaaccgctcaaggccttcaactaatccctagcagtgtgcagcctcccacacctccgcctcctccagctcccccaaaactgatcctgcttccttctagtagtgcgggtgccggaggtggtcgggcacggcagggcccaagggccgtcggaaaggccggtcaaggagccggtgtggtgtggttaccgggtcctggaggtctcggtgttcagggagctgcatctgccggagctagcggtaccggccagagcctgattgtgctgcaaaatgtgggcggtggcgaggctggaccccaggaaatgtccggggtgcagctccaaccacttaggccagcccctgaggttaccactgtgcagttacagcctgcccaggaggtgaccaccgtgcaactgcaaccagcccaagaggtgactacagtccagctgcagcctgctcaggaggtgaccacagtgcagctacagcccgtggcgggtcagctgtccaacagctccggcggagctgtggcaactgaagcccctaatcttctggtcgtacaatccggcgctgcagaagaactcctgactggacccggtcctggggaggcaggagatggagaggctagtactggcgtcgttcaagatgtgctttttgaaaccctccaaaccgacgaaggattacagagtgtgttggtcctttctggagctgacggggaacagacgcggctgtgtgtccaagaggtggaaactctcccacccggactgactgaacccccagccacggggcctcccggacagaagcttctgattataagatctgctccagcaaccgaactgttggactcttcaaacaccggagggggaacagctaccttacagctcctggcccctcccccaagcgggcctgctagtgggcctgctggtctcccgggtgccccagcgagtcaaatggttcaggtggtccccgctggcgctggtcctggggtgatgacaccacagggccttccatcgattcagattgtccagactcttcccgctgttcagctcgttcacacattttag

SEQ ID NO: 247732 - DNA, 1602 bp, synthetic construct
  misc_feature 1..1602: note = Description of Artificial Sequence: Synthetic coding sequence
  source 1..1602: mol_type = other DNA
atggatagataccagggaaaccaagatagagtgctccggcaggtgactgtcatatctagagaaactctaacagacgagatggggagtaagtattccgcattcgggaaaatgttcaaccgctgcaccgaccttgcccctctgtcccagaaattccataaattcgacagttgcgaaaatagtctaaaatccaacagtgacctgctgaactataaccgaagctatgcacgcaaaaacccaacgaagcgctttaggtgtggacgcccacccaagtataacgcgtcatgcagcgtgccagagaaagagggattcatccacaccggaatggagccctacggcgattcacagtgtgagaaagtactgtctcataagcaggcacatgtccagtataaaaaatttcaggcccgagagaaaccgaatgtttgtagcatgtgtggaaaggcctttatcaaaaaaagtcaactgatcatccatcagaggattcataccggtgagaagccctacgtctgcggggactgcagaaaagccttctccgaaaagagccacctgattgttcaccagcggatccacacaggagaaaaaccctacgaatgtacgaaatatgggagagcgttttcccgcaagagccccttcactgttcatcagagagttcacaccggcgaaaaaccctacgaatgtttcgagtgccccaaggcattctcccagaagtcccaccttatcatacatcagcgggtacatactcgcgaaaagcctttcgaatgtagtgagtgcaggaaagcattctgtgagatgagtcacctgttcatccaccagatcacacataccggcaagaaaccttacgaatgcaccgagtgtggaaagacttttccccgaaaaacccagttgatcatccaccaacgtactcataccggagagaaaccttacaaatgtggcgaatgtggcaagactttttgccagcagtcacacttgatcggacaccagaggattcatacaggtgagaagccgtacgtttgtactgattgcggcaaggccttctcgcagaagagccacctcactggccatcaaaggttgcacacaggagaaaagccgtatatgtgcactgagtgcggcaaatccttcagccaaaaatcgcctttgatcatacaccagaggatccatactggggaaaagccctaccagtgtggcgagtgcggcaaaacctttagtcaaaagtcactgctgatcatccacttacgagttcacacaggtgaaaagccttatgagtgcaccgagtgtggtcgtgcattttctctcaagtctcatctaattctgcaccagcgcggacataccggggagaagccttatgagtgttctgaatgcggcaaagctttttgcgggaagagcccccttatcattcatcagaagactcaccccagagagaagacccccgagtgcgcagaatcaggtatgacgttcttttggaagagtcagatgattacctaccagcgccgtcacaccggagagaagcctagtaggtgtagcgactgcggcaaagccttctgccaacacgtgtatttcacggggcatcagaatccctaccgcaaggacactctctacatttgctag

SEQ ID NO: 247733 - DNA, 1974 bp, synthetic construct
  misc_feature 1..1974: note = Description of Artificial Sequence: Synthetic coding sequence
  source 1..1974: mol_type = other DNA
atgattgagtcacaagaaccagtgacattcgaagatgtggccgtggatttcacccaagaagaatggcagcagcttaaccctgcacagaagacgttacaccgcgacgtgatgctggagacgtataatcacctcgtgtctgtcggctgtagtggcataaaacccgatgtaatattcaagctcgagcacggcaaggacccttggatcatcgagagcgagctcagtcggtggatctaccccgacagggtgaaggggcttgaatctagtcagcaaataatcagtggtgagttgctcttccagagggagattctcgagagggcacccaaagataattccctgtattcggtcctgaagatttggcacattgacaaccaaatggaccggtaccaggggaatcaagaccgggttctccggcaggtgaccgttatcagtcgcgagacactgactgacgagatggggtccaagtacagcgcctttggaaagatgtttaaccgatgcactgatctggcgccactgtcccagaaattccacaagtttgatagttgtgaaaactctctgaagagtaactcggacttgctaaattataataggtcctatgctagaaagaacccaacaaagagattccgttgtggaaggcccccaaagtataacgcgagctgctctgtgccagagaaggagggattcatccacaccggcatggagccatatggggacagtcagtgtgaaaaggtgctctcccataagcaggcacacgtgcagtataagaagtttcaggccagagaaaagccaaacgtctgcagtatgtgcgggaaggccttcattaagaagtctcagcttatcattcatcaaagaattcatacgggagagaagccttacgtgtgcggcgattgccggaaggccttttccgagaagtcacatttgattgtgcaccagcgcattcataccggcgagaaaccttatgagtgcacaaagtatgggcgagccttcagcaggaagtcacctttcaccgtgcaccagagagtgcacacaggcgaaaaaccttacgagtgcttcgaatgtccaaaggcctttagccagaagtctcatctcatcatccaccagagggtgcatacccgcgaaaaaccattcgagtgtagcgagtgcaggaaggctttctgcgagatgtcccacctttttatacaccagatcacccacacagggaagaaaccctacgagtgcacagagtgtggaaagacattcccacggaaaacacagctgataattcatcagcgcacccacactggtgagaagccctataaatgcggggagtgcgggaagacattctgccagcaatcccacttgataggccatcagcgaatacacacgggggagaagccgtacgtgtgtactgactgtggcaaggctttctcacagaagtctcatttgactggtcaccagcggcttcataccggggaaaaaccatatatgtgtaccgagtgcggcaaatctttcagccaaaagagccctctgatcatccaccagcggatccacacaggagagaaaccgtaccagtgcggggaatgcgggaagacattctctcaaaaatctctcttgatcattcacctgagggtgcacacaggggaaaaaccatacgagtgcaccgaatgcgggagggccttcagtttgaagagccacctcatcctgcaccagagagggcacacaggcgaaaaaccctacgaatgctctgagtgcgggaaggccttctgcggcaaatcccctctgatcattcaccaaaaaactcatccgcgagagaaaacgccggaatgtgctgaaagtggtatgacctttttctggaagagccagatgattacctatcagcgcagacacactggtgagaaacctagcaggtgttccgactgtggaaaggccttttgccagcatgtgtatttcacaggtcatcagaacccttataggaaggacacgttgtatatttgttag

SEQ ID NO: 247734 - DNA, 645 bp, synthetic construct
  misc_feature 1..645: note = Description of Artificial Sequence: Synthetic coding sequence
  source 1..645: mol_type = other DNA
atgattgaatctcaggagcccgtgacctttgaagatgtcgccgtggacttcacccaggaagaatggcaacagctcaaccccgcacagaaaacactgcaccgggatgtgatgctcgagacatataatcatctggtcagtgtggggtgttcaggcattaagccagatgttatcttcaaactagagcacgggaaggacccttggatcatcgaatctgagctgagcagatggatctaccccgaccgggttaaagggcttgaatccagccagcagatcataagcggagaactgctatttcagcgtgagattctcgagagagccccaaaagacaactctctttatagtgtgctgaagatctggcacatagataatcagatggaccgataccagggcaatcaggatagagtgcttcgacaagtcactgtcatttcccgggagaccttgaccgacgaaatgggatctaagtactctgctttcggaaaaatgttcaatcgatgtactgacctcgcccctctttctcagaaattccataagttcgatagttgcgagaactcactgaaatccaactctgatcttctgaactacaacagaagctatgctagaaaaaaccccacgaagaggttcagatgtggccgtccccctaaatag

SEQ ID NO: 247735 - DNA, 1932 bp, synthetic construct
  misc_feature 1..1932: note = Description of Artificial Sequence: Synthetic coding sequence
  source 1..1932: mol_type = other DNA
atgatagagagtcaagaggagtggcagcagcttaatccagcccagaagaccctgcatagagacgtgatgctggaaacttacaatcatctggtgtccgttggatgcagtggaatcaaacccgatgtaatcttcaaactggagcacggaaaagacccttggattatcgagagcgagctttctaggtggatctatcctgatagggtgaagggcctggagagcagccagcagattatttctggagagcttctgtttcagcgtgaaatcttggaaagggccccaaaggacaattcgctgtactctgttctgaagatctggcatatcgataaccagatggatcgttatcaagggaatcaggacagggttctcaggcaggtcacagtgatctcaagggagactctgacagacgaaatggggtcaaagtattccgcgttcggtaaaatgtttaatcggtgtactgatcttgctccccttagtcagaaattccataagtttgatagctgtgagaatagcctgaaatcaaactccgacttactgaactataaccggtcgtatgcgaggaaaaaccctactaaacgctttcgatgtggccgtccacctaagtataacgccagctgctccgtacccgagaaggaaggcttcattcacaccgggatggaaccgtatggcgactcccagtgcgagaaagtgctgagccacaagcaagcgcatgtgcagtacaagaagttccaagctcgagagaagccaaatgtgtgctccatgtgtggaaaggcctttatcaagaagtctcaacttataatccatcaaaggatccatacaggcgaaaagccttacgtctgtggtgactgcaggaaagcgttctccgagaaatcacatctgatcgttcaccagcgcattcacacgggcgagaagccatacgagtgtaccaaatatggtcgtgcgtttagtaggaaaagtccattcaccgtgcatcagcgtgtccatacgggagaaaagccctacgagtgcttcgaatgccctaaggcattcagtcaaaaatcgcatctcatcatacatcagcgtgtgcacacacgagaaaaaccattcgaatgcagcgaatgccgcaaggccttctgcgaaatgtctcatctgttcattcaccagatcacacacaccggaaaaaagccttatgagtgtacagagtgcggtaaaaccttcccccgtaagacccaactaatcatccatcagaggacgcatacgggcgaaaaaccctacaagtgtggcgaatgcgggaaaacattttgccaacaatctcacctgattggccaccaaagaatccataccggggaaaaaccgtatgtgtgtacagactgcgggaaagcattcagccaaaaaagccacctcactggccatcagagacttcacaccggcgagaaaccttacatgtgcacagagtgtggcaagtcctttagtcaaaagagcccattaatcattcatcaaaggattcacactggggaaaaaccttaccaatgcggtgaatgcggaaagacattttcgcagaaatctctgctgatcatccatcttcgggtgcatacaggggagaagccttacgagtgcacagagtgtggacgcgctttcagcttgaagagccacctaatcctccaccagcgcggacatacaggggagaagccctatgagtgttctgaatgtgggaaggctttttgtggtaagagccctctgatcatccaccagaagacccaccctcgggaaaagacaccagagtgcgctgagtccggcatgacatttttctggaagtcccagatgattacatatcaacgaagacatacaggagaaaagccttccagatgttctgactgcgggaaagccttttgtcaacacgtttattttacaggacaccagaacccctatcggaaggacacgttatacatttgttag

SEQ ID NO: 247736 - DNA, 5936 bp, synthetic construct
  misc_feature 1..5936: note = Description of Artificial Sequence: Synthetic coding sequence
  source 1..5936: mol_type = other DNA
atgagcaggccacgatttaacccccgaggagacttcccacttcagagacccagggctcctaacccgtctggaatgcggccacctggaccttttatgcgcccaggtagcatgggcctcccccgattttacccagcgggaagggcgagagggataccccacagattcgcaggccatgagtcgtatcagaatatgggaccgcagagaatgaacgtccaagtgactcagcaccgtacggaccccagactgaccaaagaaaagctggattttcacgaagcccaacaaaagaagggaaagcctcacggctctcggtgggacgatgaaccacacatcagcgcctccgtggcggttaaacagtccagtgtcacgcaagtcactgagcagagccccaaagtccagagccggtacactaaggagtctgcctcgtccattctggcgagcttcgggctcagcaatgaagaccttgaggaactgagcaggtatcccgatgaacagctgacgccagagaacatgccactaatcctgagagacatcaggatgcgcaagatggggcgaagattaccgaacttaccctcacagtcaaggaacaaagagaccctggggtctgaagctgtctcttccaatgtgattgactacggccacgcctccaagtacgggtataccgaggacccactcgaggttagaatctatgaccctgaaatcccgaccgacgaggtggagaatgagttccagagccagcagaatatcagcgctagtgtccctaacccaaatgtgatatgtaactctatgttccctgtggaagacgtctttaggcagatggactttcccggagagtcttcgaataaccgaagcttcttttccgtcgaatcaggaacaaaaatgagcgggctgcatatttccggcggacagagtgtgctcgagcccatcaagtcagtcaatcagtccatcaatcagaccgtgagccaaacaatgtctcagtctcttatcccacccagtatgaatcagcagcccttttcctctgagcttatctcctccgtaagccagcaggagaggatcccgcacgaacccgtgattaattccagcaatgtgcatgttggctcacgaggatccaagaaaaactaccagtcccaagctgacatacccatccggagtccgtttggaattgtcaaggccagttggttgccgaagttttctcatgcagatgcccaaaagatgaaaaggctgcccactcctagtatgatgaacgattattacgcagcaagcccccgtattttcccacatctatgctctctctgcaacgtagaatgttctcacctgaaagactggatccagcaccagaacacttccactcacatcgagtcctgtcgacagctgagacaacaatatccggactggaaccccgaaattttgccatccagacgcaatgagggtaaccggaaagagaatgagactccacgcagaagatctcacagcccatccccacggagatctagacggagtagttccagccacagatttaggcgctccagaagtccaatgcactacatgtacagacctaggtcaaggtctccaaggatctgtcacagattcatcagtcgctatcgaagtcgcagccgctcccgcagcccatatagaataaggaatcccttcagaggcagtcctaagtgttttcgctccgtctccccagaacgcatgtctcgtaggtcggtgaggtcgtctgacaggaaaaaggccttggaggacgtggtccaacgcagcggccatggaacggaatttaataagcagaagcatctggaggccgctgataaaggtcactcgcctgcccagaaacctaaaacaagctccggcaccaagccctccgttaaacctaccagtgctaccaaatcagactcgaatcttggtggacacagcatacgctgtaaaagtaagaatctggaggatgacactctaagcgagtgtaaacaggtcagtgataaggccgtatcgctccagcggaaactccggaaagagcagtctctacattacgggagtgtgttgctgatcaccgaactccctgaagacggatgcactgaggaagacgttaggaaactttttcagccgttcgggaaagtcaatgacgtgctgattgtgccgtaccgcaaggaagcttatcttgagatggaatttaaggaagctatcactgccatcatgaagtacatcgaaactacaccactcaccattaagggcaaatccgtcaaaatctgcgtcccagggaaaaaaaaggcccagaacaaagaagtcaagaaaaaaaccctcgaaagcaagaaagtcagtgcaagcaccctgaaaagagacgctgatgccagtaaagcagtggaaattgttacatccactagtgctgctaaaacaggccaggccaaagcatctgtggccaaagtcaataagagcactggcaagagcgcgtcctcagttaaaagcgtcgtcactgtggctgtaaaaggtaataaggcaagcatcaagactgcaaagtcgggcggtaaaaaaagtttagaagctaagaagacaggtaacgtgaaaaacaaagacagcaataagcccgttactatcccagagaattccgagataaaaactagcatcgaggtgaaagccactgagaattgtgccaaggaggccatctctgatgcagccttagaagccaccgaaaatgagcccttaaacaaagagaccgaagagatgtgtgtgatgctggtaagcaatctgccaaacaaggggtacagcgtcgaggaggtgtatgacctcgctaagccatttggtggccttaaggatatcctgattctcagtagccataagaaagcctacatcgaaataaaccgcaaggctgctgagagcatggtgaagttctacacttgttttccagtgcttatggatgggaaccagctgtctatatctatggctcctgagaatatgaacattaaagacgaggaggccatcttcatcactcttgtgaaggaaaacgatccagaggccaatatcgatactatttacgatagatttgtgcatcttgataatcttcccgaggatggcctgcaatgtgtgctgtgcgttggtctccagttcggcaaggtcgatcatcacgtcttcatctcaaaccgcaacaaagccattctgcagctggattcgccagagtccgcccagtcaatgtatagtttcttaaagcagaacccgcaaaacatcggtgaccatatgttaacgtgttcactcagccccaagatagacctgcccgaggttcagatcgagcacgatccagagctggagaaggaatcaccgggattaaagaattccccaattgacgagtcagaggtacagactgctactgactctccctccgttaagcccaacgagctagaggaggagtccacacccagtatccagacagaaaccctggtgcaacaggaagagccttgtgaagaggaggccgaaaaagctacttgcgactcagattttgccgtcgagacactggagctggaaacacagggggaggaggtcaaggaagaaatcccgctcgttgccagcgctagtgtgagcattgagcagtttactgaaaacgctgaggaatgtgccttgaatcagcagatgtttaactccgatctggaaaagaagggcgcagaaattatcaaccctaaaaccgcacttctgccctcagactccgtgttcgctgaggaacgaaaccttaaaggcatcttagaagagtctccgtctgaggcagaggattttatcagcggcatcactcaaaccatggtggaagctgtagcagaggtggagaaaaacgaaactgtgtctgaaattttgccaagtacatgcattgtgactctcgtgcccggtattcccacaggcgacgagaaaactgtcgataaaaagaacatatcagaaaagaaggggaacatggacgagaaagaggaaaaggaattcaacacaaaagaaactcgaatggacttgcagattggcaccgagaaagcagaaaagaatgaaggtagaatggacgcagaaaaggtggagaagatggccgctatgaaggaaaagcctgctgaaaatacactctttaaggcttaccccaataaaggggtgggacaggcaaacaaacccgatgagacctctaaaacctccatactggctgtttctgacgtctcttctagcaaaccctctataaaagctgttatcgtgtcctcacccaaggctaaggctaccgttagtaaaacagaaaatcaaaagtctttccctaagtccgttcccagagaccaaatcaatgccgagaaaaaactctccgccaaggagttcggccttctgaagccgaccagtgctcgatctggcctcgccgagtcatccagcaagtttaagccaactcaatccagcctgacccgtggagggagcggccgaatttccgctctgcaggggaagctctccaagctggattatagagacatcaccaagcagtcacaggaaacagaagctaggcctagtatcatgaagcgagatgattccaataacaagaccctcgctgagcaaaacactaaaaaccccaagtcaacgaccggaagaagttctaagagtaaggaggaacctttgtttccctttaaccttgatgaatttgtcactgtggatgaggttatcgaggaggtgaacccgtcccaggcgaaacagaatccactgaagggtaaacggaaagagaccctaaagaatgtacccttttccgagctcaacctgaaaaagaaaaaggggaagacgtctactccccgtggcgtggaaggggaactgtcatttgttacactggatgaaatcggcgaggaagaagacgcagccgctcatctcgcacaggccctggtgaccgtcgacgaagtgattgacgaggaagagctgaatatggaggagatggtgaaaaatagtaatagtttgttcaccctcgacgagctgatagaccaggacgattgtatcagtcattccgaacccaaagacgtcacggttctgtctgtggccgaagaacaggatttactaaaacaagaacgccttgtgacggtggatgagataggagaggtcgaagagctccccctgaatgagagcgctgacattacatttgcaaccttgaatactaaggggaacgagggcgataccgtacgcgattctataggcttcatttctagtcaggtgcctgaggacccctcaactctcgtcacagtggatgagatccaggatgactcaagtgatctgcacctggtgaccctggatgaagtcactgaggaggatgaagactcattggcagactttaataacctcaaagaagaacttaattttgtgactgtggacgaagtaggggaggaagaagacggcgataacgacttgaaagtggaactggctcagagcaaaaatgatcatcctacggacaagaagggcaatagaaagaagagagcagttgataccaagaaaaccaaactggaatcgctgtctcaggttgggcctgtgaacgaaaacgtcatggaagaggacctgaaaaccatgattgaaagacatttaactgccaagaccccgaccaaacgtgtgcggattgggaaaaccttaccttccgagaaagccgtggtgaccgagccagccaagggagaagaggccttccaaatgtccgaagtcgacgaagagagcggactgaaagatagcgagcctgaacggaagcgtaaaaagacggaagactcttcctcggggaagagcgtcgcttcagacgttcccgaggaactggactttctggtgcctaaggccggttttttttgccctatttgtagtctcttctacagtggggagaaagctatgactaatcattgtaaatcaactaggcacaaacagaacaccgagaagtttatggctaagcagcgcaaggaaaaggagcagaatgaggctgaggaacgttctagcagata

SEQ ID NO: 247737 - DNA, 3420 bp, synthetic construct
  misc_feature 1..3420: note = Description of Artificial Sequence: Synthetic coding sequence
  source 1..3420: mol_type = other DNA
atgtcccgccctaggtttaatcccagaggcgacttccccttgcagcgtccacgggcacctaatccgagtggcatgaggcctcccggtcctttcatgaggccgggatccatgggactgccccgattctatcccgcaggaagggctcggggaattccccaccggtttgcaggccacgaatcataccagaacatgggtccacagagaatgaacgtccaagtgacccagcataggaccgatcccaggcttacaaaagaaaaactggacttccatgaagcacagcaaaaaaaggggaagcctcacgggtccagatgggatgacgagccgcacatctcagcttcagtggccgtaaagcagtcctccgtaacccaggtgacagagcagagccctaaagtgcagtctcgctacacaaaggagtcagcttcatctatcttggcatcatttgggctgtcaaacgaagatctggaagagttgtccagatacccagatgagcagttgacacccgaaaacatgccattgatccttcgcgatatccgtatgcgaaaaatgggtagacgactccccaacttgccttctcagagccggaacaaggagacactgggatctgaagctgtgtcttccaatgttattgattatggacacgcaagcaagtacggatacacagaggaccccctggaggtccggatttatgaccctgagattcccactgacgaggtggagaatgaatttcagtctcagcaaaacatttcagcgagtgttcccaaccccaacgttatatgtaactcgatgtttccagtcgaagacgtttttagacagatggatttcccaggcgaatcctccaacaaccggtctttcttcagcgtagagagcggcacaaaaatgtccggcctgcatattagcgggggacagagcgtgctggagccaatcaaaagcgtaaatcagtccataaaccagactgtgtcacaaactatgtctcagagcctgatccccccatccatgaatcagcaacctttttcaagcgaactaattagctctgtgtctcagcaggagcgcatcccccacgagcctgtaataaattcctctaatgtccacgtgggcagccgaggctccaagaaaaactatcagtcccaggcggacataccgatacgctcccctttcggaattgtgaaagctagctggcttcccaaattttcacacgctgacgctcaaaagatgaagcgcttgccaaccccctccatgatgaacgattactatgccgctagcccacgtatctttcctcatctctgcagcttgtgtaacgtggaatgttctcatctgaaggattggatacagcatcagaatacctccacccatattgagtcctgtcggcagctcagacaacagtaccctgactggaatccagagatcctgccaagccggaggaatgaggggaataggaaagagaacgaaacccctcgccgacgttctcactccccctctcctcgaagatcgagacggagctcctctagccaccgatttaggagatccaggtcgcctatgcattacatgtaccggccacggtcacgttccccccgaatttgccaccgctttatcagcagatatagatccagatcacgctctcgctctccgtacaggatcaggaaccctttccgcggatccccaaagtgctttaggagtgtatcaccagagaggatgagcagacggagcgtccgatcctccgatagaaagaaggctctcgaagatgtcgtgcagcggagcggccatggaaccgaatttaacaaacagaagcatctcgaggcagccgacaaaggacactctcctgctcagaaaccaaagaccagcagtggtactaagcctagtgtgaagcccactagcgcgaccaaatccgattcaaatttagggggacatagcatccgatgtaaatctaagaatctagaagatgacacactttccgagtgtaagcaggtgagtgacaaagccgtatctttacaaaggaagttacgcaaggagcaaagtttgcactatggctcagtcctcctgataacagaattgcccgaagacgggtgcacagaggaagatgttagaaagctattccagcccttcgggaaggttaacgacgttctgatcgtaccgtatcgcaaggaagcatacctggagatggagttcaaggaggccattactgccattatgaagtatatcgagacaacacctctcacaatcaaggggaaatcagtcaagatctgcgtacctggtaaaaagaaagctcaaaacaaagaggtcaagaaaaagactttggagtcaaaaaaggtgtctgcatcgacactaaaaagagatgcagatgcaagtaaggcagttgaaattgtcacttctacctccgccgctaaaaccggccaagcgaaggccagcgtcgctaaagtgaataagagtacaggaaagtcggctagttccgtgaagagtgtggtgacagttgctgtgaaaggtaataaggcctccatcaaaaccgcaaagtccggtgggaagaagtccctcgaagcaaaaaagacaggcaatgtgaaaaataaagactccaataagccagtaaccattcccgaaaatagcgagatcaagacaagtattgaggtgaaggctaccgagaactgcgccaaggaggctatcagcgacgccgcactggaggcaaccgagaatgaacccctgaacaaggaaaccgaggagatgtgcgtaatgctggtcagcaatcttccgaataaagggtacagcgtcgaggaggtgtatgacctggccaagccctttgggggactgaaagacatcttaatcttgtcatcgcacaagaaggcttacattgaaattaacagaaaagcagctgagagcatggtgaaattctatacctgttttccggtcctcatggacgggaatcaactctccatcagtatggccccagagaacatgaatattaaggacgaggaagccatattcatcactcttgttaaggagaatgatcccgaggcaaacattgatactatttatgatcgcttcgtgcaccttgataatctacccgaagatggcctccagtgtgtactatgtgttggcctccagtttggcaaggtcgaccatcacgtattcatatccaatcggaataaagccatcctgcagctggattcaccagagtctgcccagtctatgtattccttcctgaagcagaacccccagaacataggagatcacatgcttacctgttccctgtcacccaaaatagatcttcccgaagtccagattgagcacgatccagagctcgagaaagaacgtttgtggctgtcgaagacccttagaattcttaaggcactattggtagaagtgcctaacttgaaacgctctcattacttccacctgatctggatgaatctgctcttatggatgagactctag

SEQ ID NO: 247738 - DNA, 2445 bp, synthetic construct
  misc_feature 1..2445: note = Description of Artificial Sequence: Synthetic coding sequence
  source 1..2445: mol_type = other DNA
atgagtcgacctagatttaaccctagaggagactttccgctgcagaggccacgcgctcctaacccaagcggcatgcggcctcctggaccgttcatgaggccaggcagtatgggactgccacgattttacccagccggacgggctaggggcataccacataggtttgcgggacatgagtcttatcagaatatgggccctcaacggatgaatgtgcaggttacacagcacaggactgatccgcgtctgactaaagaaaagctggacttccatgaagctcagcagaagaaaggcaaacctcacggtagtcggtgggacgatgagcctcacatctcagcatctgtggctgtcaaacagtcatcagttacacaggtcaccgaacagagtcccaaagttcagtcacggtacactaaagagagtgcctctagcattctggccagtttcgggctgtcgaacgaagacttggaggagctgtcacggtaccctgacgaacagcttacgcctgaaaatatgcctctcatacttcgagacatccgaatgcgaaaaatgggtaggaggcttccaaatctgccatctcagagcaggaacaaagaaactcttggctccgaggcggtttctagcaacgtcatagattacggtcacgcaagcaagtacgggtacacagaggatcccttagaagtccggatttatgacccggaaattcctaccgatgaggtcgagaatgagtttcagtcccagcagaacatatccgcctctgttcctaatccgaacgtcatctgcaactcaatgttcccagtggaagacgtctttaggcaaatggacttccccggagaaagttccaacaatcggtctttctttagtgtagagtccggcactaagatgagcggcttgcatatatccggtggacagtctgtgttggagcccattaaatcagtcaaccagagtataaatcaaacagtatctcaaacgatgtcgcagagcctcatccctccttccatgaatcagcagcctttctccagcgaactgataagcagtgtgagccagcaagagagaataccacatgaacccgttattaatagctcgaacgtgcatgtaggcagccgcggatctaaaaaaaactaccagtcccaggccgacataccaatcagaagtccctttggcatagtgaaggcatcctggctcccaaagttttcgcacgccgatgctcagaaaatgaagcgcttgcctacaccatccatgatgaatgactactatgcggcatcgccccgtatcttccctcacctatgttctctctgcaacgttgaatgttcccacttaaaggattggatccaacatcagaacacctcgacgcacattgagtcttgcaggcagctgagacaacagtatcctgactggaatccagagatcttgccaagcagacgtaatgaaggtaatagaaaagagaatgagacaccccgacggaggtctcattccccttccccgagacgatccaggcgcagcagctccagccatcgattccggaggtcgcgctctcccatgcattatatgtatcgccctagatcacggtcccctcggatctgccaccggtttatcagcagatatagaagtcgctcccggagccgcagcccgtataggatcagaaatccttttcgcggatcaccgaagtgtttcaggtcagttagtccagagaggatgtcccgacgcagtgtgagatcatcggataggaaaaaggccttggaggacgtagtccagaggtctggccacggaacagagtttaataagcaaaaacacctcgaggctgccgataagggtcactcaccggcacagaaacccaaaaccagctctggtaccaaaccttctgtcaagccaactagcgcaacaaagagcgattccaatctggggggtcactctatccgctgtaagagtaagaacctggaagacgacaccctgtctgagtgtaaacaagtgtctgataaagctgtttccctgcagaggaagctgcgaaaagagcagtctctccattacggatccgtgctcctcatcactgaactgcccgaggacgggtgtacggaagaagacgtgcgaaaactgttccaaccttttggtaaggtgaacgacgtcctaatcgtcccctatcgcaaggaagcttacctagaaatggagttcaaagaagccatcactgcgattatgaaatatatagagactacccctctgacaattaaaggcaaaagcgtgaagatatgcgttccaggcaagaagaaagcacaaaacaaggaggtgaaaaagaagacattggagtcgaagaaagtgtcggctagcaccctcaagagagatgctgacgcaagcaaagctgtggagattgtcacatctacctctgccggtctgcttccaaccgggggaggcaacaactacccccagattgtcctagctcctggtctgtgtcattag

SEQ ID NO: 247739 - DNA, 2643 bp, synthetic construct
  misc_feature 1..2643: note = Description of Artificial Sequence: Synthetic coding sequence
  source 1..2643: mol_type = other DNA
atgccgagagatggtgtcccagccggaaacacaaccccagccgcagcccaagctgcagctcagtcccccgatagcgctaccgccggtgcacctcaagtcctggactctctcaaaaggtaccccgactggaaccccgagattctgcctagtcggaggaatgaggggaatcgtaaggagaatgaaacgccccgaaggagaagccattcccctagtcccaggcgctcacggagatcctcgagctctcatagatttcgcaggagcaggagtcctatgcactatatgtatagaccgcgaagcaggagcccaagaatttgtcacagatttatctcgcggtaccgcagtagatcccggagtcgatccccctacaggatccgtaatccgtttagaggctccccaaagtgcttccgctccgtctctccggagcggatgtctcgccgatctgtgcgcagctcagatcgaaaaaaggcactcgaagatgtcgtgcagcgctctggccatggcacagagttcaataaacagaagcatctggaggctgccgacaaagggcacagtcccgctcagaaaccaaaaacctccagcgggacgaaaccaagcgtcaagcctacgagtgccaccaaatctgactctaatctcgggggacacagcatcagatgcaagagtaagaatctggaggacgataccctgagtgagtgtaaacaggtctccgacaaggccgtctctcttcagagaaagttgagaaaggaacagtctttgcactatggatctgtgctgctgattaccgaactgcctgaggatggttgtactgaggaagatgtgaggaaactgtttcagccttttgggaaggttaacgatgtgctaattgtcccctaccgcaaggaagcctacctggagatggaatttaaggaagccatcaccgcaatcatgaaatacatcgagaccacacctcttacaattaagggcaagagcgtcaagatctgcgtgccaggaaaaaagaaagctcaaaacaaggaagtcaagaaaaagactctcgagtcaaaaaaggtgtctgccagtaccctaaaacgtgacgctgatgcttctaaggccgtagagatagtcacaagcacctcagctgccaagactggacaggcaaaagccagcgtcgccaaggtgaataaaagcacaggaaagagtgcctcttccgtcaagtcagtggtaactgtcgctgtgaagggaaacaaggcatcaatcaaaaccgcgaagtcaggaggcaaaaaaagcttggaagccaagaagactggcaatgtgaaaaacaaagattctaataagcccgtgaccattccagagaattcagagataaagacgtcaattgaggtcaaagccacagaaaattgcgcaaaggaggcaatttctgacgcagctctggaggccaccgagaatgaacccctgaataaggagacggaggagatgtgcgtgatgctcgtgtcaaatcttcctaacaaaggatattccgtggaggaggtctatgatctcgctaaacccttcggcggactaaaagatatcctgattttgtccagccacaaaaaagcgtatatcgaaatcaaccgcaaggccgcagaaagtatggtgaaattctacacttgttttcctgtgttaatggatggaaaccagctgtctatcagtatggctccagagaatatgaacataaaggatgaggaggccatttttataacacttgtaaaggaaaatgatccagaggcaaatatcgatacaatttacgacaggttcgtgcaccttgacaacttgccagaagacgggctgcagtgtgtcttgtgcgtgggcctccagttcggcaaagtagatcatcacgttttcatttctaaccggaataaagctatcctgcagcttgactccccggaaagtgctcagtcgatgtattcgtttctcaagcaaaaccctcagaatataggagaccacatgttgacatgctcgcttagccccaaaatcgacttacctgaggtccagattgaacatgatccagagctggagaaggaatccccaggactgaaaaatagccctatcgacgagtcggaagtgcaaacagcaactgactcaccatctgtaaagcccaatgaactcgaagaagaatccacaccaagtatacagactgagactctggtgcaacaggaagagccgtgcgaagaggaggctgaaaaagccacgtgtgattccgattttgccgtggaaaccttagagttagaaactcaaggagaggaagtgaaggaagagatcccactggtcgcgtccgcctcagtgtccatcgagcagtttactgagaatgctgaggaatgtgctctcaaccagcaaatgttcaattccgatcttgagaaaaagggggctgaaattatcaacccaaaaaccgccctccttccaagtgacagcgtttttgctgaggaaagaaaccttaaaggcattctggaagagtccccttctgaggcggaagactttatcagtggcattacccaaacaatggtagaggcagtggcagaagtggaaaagaacgagactgtgtccgagattctaccctcaacctgcattgtgaccctcgtaccgggaattcctaccggggatgagaagaccgtggataaaaaaaatatcagctag

SEQ ID NO: 247740 - DNA, 2757 bp, synthetic construct
  misc_feature 1..2757: note = Description of Artificial Sequence: Synthetic coding sequence
  source 1..2757: mol_type = other DNA
atggattcccctccattgaaggctcttaactctaatagcatctatttcttactgttgttccactgcatgctcatctccgaggtacagatcgagcatgaccctgagctggaaaaagagagtcctggccttaaaaactctcccatcgatgaatctgaggttcagaccgccaccgatagtccttcagtcaagcctaacgaactcgaggaggagagtactcccagtatccagactgaaaccctcgttcagcaggaagaaccatgcgaggaagaggccgagaaagccacttgcgactctgacttcgctgtggagaccctggagctggagacacaaggcgaggaggtgaaagaagagattcctctggttgcctcagcttctgtgtccattgagcagttcacagaaaatgctgaagagtgtgctctgaaccagcagatgttcaactctgatctggagaaaaagggagcggaaataatcaatccaaagaccgcactattgccttcagactctgtgtttgcagaagagaggaatctgaaggggatcttagaagagagtccaagcgaggcagaggatttcattagcggaattacacaaaccatggtggaggcggttgccgaagtggagaaaaacgagaccgtgtcggagattctgccttccacttgcattgtgacacttgtccccggaatcccaactggcgacgagaaaacagttgacaagaaaaatatcagcgagaaaaaaggaaatatggacgaaaaagaagagaaagaattcaatactaaggagacgcggatggatcttcagatcgggaccgagaaagcggaaaagaacgaaggacgcatggatgccgagaaggtggagaagatggcagccatgaaagagaaaccagcggagaatacactgttcaaggcttacccgaataaaggtgtgggccaggccaacaaacccgatgagacgagcaaaacctctatcttagcagtgagtgatgtgagtagctcaaaaccgtccatcaaggccgtgatagtctcctcaccaaaagctaaggccaccgtgagcaagacagaaaatcagaagagcttccccaagtcagtgcctagagatcagataaacgctgagaagaagctctccgctaaggagtttggactcctcaagcccacaagcgctcggtccggcctcgcagagtcgagttcaaagtttaaacccactcagagttcacttacacgcggaggttctgggagaatcagcgctcttcaggggaaactgtcaaagttggattaccgcgatattactaagcagtcgcaagagactgaggccagaccctccattatgaaaagggacgatagcaacaacaaaacactagctgaacagaacacgaagaatcccaaatcgactaccggtaggtcctcaaaaagcaaggaagaacctctgtttcccttcaatctggatgagtttgttactgtcgacgaggtgatcgaggaagtcaacccttcacaggccaagcaaaacccccttaagggcaagagaaaggagaccttaaagaatgttcccttctctgagttgaatctaaagaaaaaaaaaggcaaaacgagcacccccaggggagtcgaaggggagctgtcgttcgttacacttgatgagatcggcgaagaggaagatgctgcagcacaccttgcccaagccttagtgacagttgatgaagtgatcgacgaggaggaattgaacatggaagaaatggtaaaaaattcaaattctttgtttactctcgatgaattaattgaccaggacgactgcatatctcatagcgaacctaaggacgtgacggttctcagtgtcgcagaggagcaggatctacttaagcaggagaggttagtaactgtggacgagattggagaagttgaggagttgcctttgaatgagagcgcagatatcacgtttgcaaccctgaacaccaaggggaacgaaggggacacggtcagggattctatcggctttatctcttctcaggtgcccgaggatccctcgactctggtgaccgtggacgaaatccaagacgactcatccgatctgcacctcgtgacgctcgacgaggtgactgaagaggacgaggactccctcgctgacttcaataatctgaaagaggagctgaattttgtgacggtcgatgaagttggtgaggaggaggacggcgataacgatttaaaagtcgaattggcccagtctaaaaatgaccatccaactgataaaaaagggaatcgcaaaaaaagagctgtggataccaaaaaaaccaaacttgagagtttgagtcaggtaggtcccgtgaatgagaatgtgatggaggaggatttaaagacgatgattgagagacatttgactgcaaagacccccactaaacgggtaaggatcggcaaaaccttgccttcggaaaaggccgtagtcaccgagccagccaagggcgaagaagctttccagatgagcgaagttgatgaggagtctggactcaaagacagtgaacccgagcggaaaaggaaaaagactgaagattcgagcagcgggaagagtgtggcaagcgatgtgccggaagaacttgattttttagtccctaaagcgggatttttctgcccgatttgttccttgttttactctggtgaaaaggctatgactaaccattgcaagtccacacgacacaaacaaaacacagagaagttcatggccaaacagcgaaaagaaaaagagcagaacgaagccgaagagcgctccagccggtag

SEQ ID NO: 247741 - DNA, 5936 bp, synthetic construct
  misc_feature 1..5936: note = Description of Artificial Sequence: Synthetic coding sequence
  source 1..5936: mol_type = other DNA
atgtctcgacctcggttcaatccaaggggtgactttcccctgcagagacctagggcccctaacccgtcagggatgaggccgccagggccatttatgcgcccaggatcaatggggctgcctcgtttctaccctgccggaagagctagagggatcccacatcggtttgctggtcatgaaagctaccagaatatggggccacaacgcatgaatgttcaggtgacacagcacaggaccgaccctagactgacaaaggagaagttggatttccacgaagctcagcagaagaagggaaagcctcatggctcccggtgggacgacgaaccccacatttccgctagtgtagctgtcaagcagagctcggtgacacaggtgactgagcagtcgcccaaggtccagtcccgctacaccaaagagtcagcgtccagtattttagcctctttcggcctgagtaacgaggatctagaggagctgtcccgctaccctgatgagcagctgactcccgaaaacatgcccctgattttgagggatatccgcatgaggaagatggggcgtagactgcccaacctgccatcgcagagtcgcaataaagaaacgctggggtcagaggccgtttccagcaatgtcattgattatgggcatgcgtctaaatacgggtatacagaggaccctcttgaggtccgcatttacgatcctgagatccctacagacgaagttgagaacgagtttcagtcacagcagaacatttctgcctctgtgccaaaccctaatgtgatctgcaatagtatgtttcctgttgaggatgtcttccgtcagatggacttccctggggagagttcgaacaatcggtctttcttctcagttgaatcagggaccaagatgtctggacttcacatctcaggcggacagtccgtgctcgaacctataaaaagtgtgaatcagtctatcaaccagacagtgagccagaccatgtcccagtctctcattcccccaagcatgaaccagcagcctttcagctctgaactgattagtagcgtctctcagcaggagagaataccgcacgaaccagttattaattcatctaacgttcacgttggcagtcggggaagcaagaagaactaccagtcccaggccgacataccaattcggtcaccattcggtattgtgaaagcgtcctggctccctaagttctctcacgccgatgcccagaaaatgaagagactgcctacgccatccatgatgaacgattattacgccgcttccccccgtatcttcccccatttgtgctctttgtgcaacgtcgagtgcagccacctcaaggactggatccagcaccaaaatacctccacgcacatcgaaagctgccgccaacttagacagcagtacccagactggaaccctgagattttgccctccagacggaacgagggaaatcggaaagagaatgagacacccagaaggcgttcgcactcccccagccctaggcgaagccgcaggtcctcgagtagtcaccggtttcggaggtcacggtcccctatgcattacatgtatcgtcctaggtcccggtcaccaagaatctgccacagattcatatctcggtaccggtctcggtcccggtctcggtccccctaccgcatcaggaatccgttcagaggctcgccaaaatgtttccgctctgtctcccctgagagaatgagccgtcgtagtgtgaggagcagcgatagaaagaaagcccttgaggatgtagttcagcggagcgggcacggcaccgaatttaacaagcaaaagcatctcgaggctgcagacaaggggcactctccggcacagaaaccgaagaccagcagcggaacgaaaccatccgtgaagccgacttctgctaccaaaagtgattccaatctggggggacactcaatacgctgcaagagcaaaaatttggaagatgacactctgtccgaatgtaagcaggtctcagataaagctgtgagtctgcagcgcaaactgagaaaggagcagtctcttcactacggcagcgttcttctcatcacggagcttccagaggacggatgtacagaagaagacgtccgcaagctctttcagccattcggcaaagtcaacgacgtgcttatcgttccctaccgcaaagaggcttacctggagatggagtttaaagaagccattactgctattatgaaatatatcgagacaactccgctcactatcaaggggaagagtgtgaaaatctgcgtgcccggaaagaaaaaggctcagaacaaggaagtcaagaagaaaaccctggaaagcaaaaaggtgagtgcctctacattaaagcgggacgctgatgcgtcaaaggcagtagaaatagttaccagtacgtctgcagcaaaaaccggacaagcgaaagcgtccgtggcaaaagttaacaagtctaccggcaaatccgcttcgtcggtcaaatcggttgtaactgtcgccgtgaaaggcaataaagcatccattaagactgcgaaatctggaggcaaaaaatctctcgaagccaaaaaaaccgggaacgtaaaaaataaagattccaataagcctgttaccatccccgagaactcggagatcaagacttctattgaggtgaaggccactgagaattgcgcgaaggaagctatcagcgatgccgctctggaagcaactgaaaatgaaccactgaacaaggagaccgaggaaatgtgtgtcatgttggtcagcaacctcccaaataaggggtacagcgtggaggaagtgtacgatctggcaaaaccgttcgggggattgaaggatattttaatcctcagcagccacaagaaagcctacatcgagattaataggaaggcagccgagagcatggttaagttttatacatgtttccccgttttaatggacggcaatcagctgagcatctctatggcacctgagaacatgaatattaaggatgaggaagcgatattcatcaccctggtgaaggaaaatgacccagaggctaatatcgacaccatttatgacagatttgtgcatctggataacctgcctgaagatggcctgcagtgcgtcctgtgtgtcggcctgcaatttgggaaggtggatcaccacgtattcatttccaatagaaataaggctatccttcagcttgactcacccgaatcagcacagtcaatgtactcatttctgaaacagaatccgcaaaacatcggggaccatatgctgacttgctccttgtcccctaaaatcgatctgcccgaagtgcagattgaacatgatccagaactggagaaggagtcccccggattgaaaaattcacccatcgatgagtctgaggtgcagaccgctaccgattctccctcggtcaagccaaatgaactggaggaggaatctacccctagtattcaaacagagactctcgtccaacaggaagagccatgcgaggaggaagccgagaaagcaacctgcgatagcgacttcgctgtcgagaccctggagctggaaacacagggagaggaggtcaaagaggagattcctctcgttgccagcgcatccgtgagcatcgagcagttcactgaaaacgccgaggaatgtgccttaaaccagcagatgttcaattccgacctggaaaaaaagggggctgagatcatcaaccctaagaccgcgctgctgccaagtgattctgtcttcgccgaagagcggaacctcaaaggtattttggaagagagcccctctgaagcggaagacttcatcagtggaattacccaaacgatggtcgaggccgtcgctgaggtggagaagaatgagaccgttagcgagatcttgccatccacttgtatcgtcaccttggtgcctggaatccctacaggagacgagaaaactgtggataagaagaacatcagtgagaaaaaggggaatatggatgagaaggaagagaaggaatttaacaccaaagagactcgaatggacttgcagattgggactgaaaaggctgaaaaaaatgagggaagaatggatgcagaaaaggttgaaaagatggccgctatgaaagagaagccagccgagaatacactcttcaaagcttaccccaacaaaggggtgggacaagcaaataaacccgacgagacctccaagacaagtatcctcgccgtaagtgacgtgagcagcagcaagcccagtataaaagccgtcattgtgtccagcccaaaggcgaaggcaaccgtaagcaaaactgagaaccagaaatccttcccaaaatccgtgcccagagatcagatcaacgctgaaaagaagctcagtgccaaggaattcggcttactcaagccgacttcggctcggtccggattggcagagtcgtcatctaaattcaagcccacccagtcgtctttaaccaggggcggttccggacgcatctctgcattgcaggggaaactgagtaagctggattacagagatatcacaaagcagtcccaggaaactgaggcaagaccctcaatcatgaagcgcgatgacagcaataataagacccttgctgagcagaacacaaaaaatcctaagagcaccactgggaggtcgtctaaaagcaaagaagaacccttgttccctttcaacttggatgagtttgtcaccgtcgatgaggtcatcgaggaagtgaacccatcccaggcaaaacagaaccctctcaaaggcaaacggaaagagacacttaagaacgtgccctttagcgagctgaacctgaaaaaaaagaagggtaaaacctccacacccagaggagttgagggcgaactgagcttcgtgacacttgacgagatcggcgaagaggaggacgcggcagctcacctggcccaggccttggtgactgttgatgaggtgatagatgaagaggagctgaacatggaggagatggttaagaactctaattctctgttcacgctggacgagcttattgatcaggatgactgcattagccatagtgaaccgaaggatgtgaccgtactcagcgtcgcggaggaacaggacctgttgaaacaagaacgcctcgttacggtcgacgagattggagaggtcgaagagttaccgctcaacgaaagcgccgatataaccttcgccaccctaaatactaagggcaatgaaggggacaccgttcgggacagcattggattcattagtagccaggtccccgaggacccatcaacgctcgtgaccgtggacgagattcaggatgatagttccgatctgcacctcgtcacactggacgaggtaacagaggaggacgaggactctctggctgatttcaacaatcttaaggaggagttaaattttgtgaccgtggatgaagtgggagaggaagaagacggcgataacgatttgaaggtggagctggcccagtctaaaaacgatcatccaaccgataaaaaggggaatcgcaaaaaacgggcagtggataccaaaaaaacaaaactagaatcgctaagtcaggtgggcccagtgaacgagaatgtgatggaggaagacctcaaaaccatgatcgaacgacatctaaccgctaaaaccccaactaaaagagttagaataggtaaaaccttgccatctgagaaggctgtcgtgactgaacctgctaagggcgaagaggcatttcagatgagtgaagtcgacgaggagtcgggactcaaggattcagagcctgagaggaaacgcaaaaaaaccgaagacagctcatcaggcaagagcgttgccagtgatgtacccgaagaactggactttctcgtgcccaaagccggtttcttctgcccaatttgtagtctattctactctggggagaaggcaatgactaaccactgcaagagtacaaggcacaagcagaatactgaaaaattcatggctaaacagcgcaaggaaaaagagcagaacgaggctgaagaacgctcttcccgata

SEQ ID NO: 247742 - DNA, 90 bp, synthetic construct
  misc_feature 1..90: note = Description of Artificial Sequence: Synthetic coding sequence
  source 1..90: mol_type = other DNA
atgagtaggccaagattcaatcccaggggagactttcccctccagaggccacgggcacctaatcccagcggaatgcgtccacccggttag

SEQ ID NO: 247743 - DNA, 594 bp, synthetic construct
  misc_feature 1..594: note = Description of Artificial Sequence: Synthetic coding sequence
  source 1..594: mol_type = other DNA
atgtcccggccaaggttcaatccgcgtggcgatttccctctccaaagacctagggctcccaacccaagcggaatgcggccacccggacccttcatgagaccgggatctatgggtttgcctcggttttatcccgcaggtcgagctcgcggaattccacaccgttttgccggacacgagtcctaccagaacatgggaccacagcgaatgaacgtccaagtcacccagcaccggacagatccacggctcacaaaagagaaactagactttcacgaggcccagcaaaagaaaggtaagcctcatggctcaagatgggacgatgagcctcacatatctgcatctgtggccgtgaaacaaagttccgttacccaggtcaccgaacagagtcctaaggtgcagtcccgatacaccaaggagtctgcctcctcaattcttgcgagcttcggcctttcaaacgaggacctggaagagctgagccgttacccagacgaacagttgactccagagaacatgcccctaattctgcgagatatccgtatgaggaagatgggcagacgattaccaaacctgccaagccagtcccgcaataaggagtag

SEQ ID NO: 247744 - DNA, 111 bp, synthetic construct
  misc_feature 1..111: note = Description of Artificial Sequence: Synthetic coding sequence
  source 1..111: mol_type = other DNA
atgtcacgccctcggttcaatcctaggggagattttcctcttcagcgacctcgagcacctaacccatcgggtatgcgaccgcctggaccatttatgcgtcccggttcttag

SEQ ID NO: 247745 - DNA, 189 bp, synthetic construct
  misc_feature 1..189: note = Description of Artificial Sequence: Synthetic coding sequence
  source 1..189: mol_type = other DNA
atgagcagaccaaggttcaatccccgtggagactttccgctccaaagacccagggcccctaacccgagcgggatgcgacccccagggccttttatgcgaccgggttcaatgggtctgccacggttttatcctgccggacgcgcacgtggcattccccatagatttgcgggacacgaaagctaccagtag

SEQ ID NO: 247746 - DNA, 189 bp, synthetic construct
  misc_feature 1..189: note = Description of Artificial Sequence: Synthetic coding sequence
  source 1..189: mol_type = other DNA
atgtccagaccgcgtttcaacccgaggggggattttcccctccaaagacccagggctccgaatccgtcaggcatgagaccacccggaccctttatgcgtcctggatctatgggactgcccagattttatcccgctgggcgtgcaaggggaatcccccatcggttcgcaggccatgaatcttaccagtag

SEQ ID NO: 247747 - DNA, 1758 bp, synthetic construct
  misc_feature 1..1758: note = Description of Artificial Sequence: Synthetic coding sequence
  source 1..1758: mol_type = other DNA
atggatagcccacctctgaaagcactcaatagcaacagtatttactttctgctgctgtttcattgtatgctgatcagtgaagtgcagatagaacatgatcctgagctcgaaaaagaatccccaggtctaaagaatagtcccatcgacgagtctgaagtgcaaactgctaccgattctcctagtgttaagcctaatgagttagaggaggagagcaccccctctatacagaccgagacactggtacagcaggaggaaccttgtgaggaggaagctgagaaggccacatgcgactccgatttcgccgtggaaactctggagctagaaacacagggcgaagaggtcaaagaggaaattccgttggtggcaagtgcttctgtgtcaatcgagcagtttacggagaacgccgaggagtgcgcgctaaatcaacagatgtttaattccgatcttgagaaaaagggcgcagaaatcattaacccaaaaacagctctgttgcccagtgattccgtgtttgccgaagagcggaacctgaaaggtatcctggaagagagtccatccgaggccgaagattttatcagcggcattacccaaaccatggtagaggctgtggcagaggttgaaaaaaatgaaaccgtgtccgaaatcctgccttcgacatgtatcgtgaccctggtgccagggatccctaccggagacgagaagaccgtcgacaagaaaaacatctcagagaagaagggcaatatggacgaaaaggaagagaaggaattcaatactaaagagacaagaatggacctgcagataggtaccgagaaagcggagaagaacgagggtaggatggacgcagaaaaagttgaaaaaatggccgcaatgaaagaaaaaccagcagagaacactttgtttaaggcctatcctaacaagggagtgggccaggcaaataaacccgacgagaccagtaagacatccatactggccgtgtctgacgtgagttctagcaaaccgtcgattaaagcagttatagtttctagcccaaaagcaaaggccaccgttagcaaaacggagaaccagaaatcctttccaaaatcagttccgagagatcaaatcaacgcagagaaaaagctgtctgctaaagagttcggcctgctgaagcctaccagcgccagatcgggcctggctgaaagctcctcaaaatttaaacccacccagtcaagcttgactaggggcggatctggtagaatctccgctctgcagggcaagctgtccaaattagactatagggatatcacaaaacagagtcaggagacagaggcgagacccagcattatgaagcgtgatgatagcaacaataaaactctggcggagcagaacactaagaaccctaagagcaccactggccgatcttctaaatcaaaggaggaacccctctttcccttcaacctggacgagttcgtgactgtagacgaggttattgaagaggtgaatcctagccaggccaagcaaaaccccttgaaagggaaacgaaaagagaccctgaaaaatgtgcccttcagtgagctgaacttgaaaaagaagaaaggtaaaacatccaccccaagaggggttgaaggtgagctctcattcgtcacacttgacgagattggggaggaagaggacgctgccgcacacctcgcccaggctcttgttactgtcgacgaagtgattgatgaagaggaactcaatatggaagagatggtcaaatttaaatttacgttctatatcagatag

SEQ ID NO: 247748 - DNA, 3075 bp, synthetic construct
  misc_feature 1..3075: note = Description of Artificial Sequence: Synthetic coding sequence
  source 1..3075: mol_type = other DNA
atgcctagggatggggttccggcaggtaacactacacccgctgcagcccaggccgcagcacaaagtcctgactctgccaccgcaggggctccacaggttctggatagcctcaaacgctttgtgctttttctcgagaacttcgcccctttggtgaatagcttgaaccttggaatcgcgaacccccttctcctaggaccttcacccttgcattttgcgcagataaagacccagttggccctgcagcaactgaacgctgttgcctcgcacgggagcacgcccccatacacgttactgaaccaagcctttttaaaaatagccatgagtcgtcctcgcttcaatccaagaggggacttccccttgcagcggcctcgtgccccaaacccgtccggaatgcggccacccggaccctttatgaggccaggaagtatggggctccccaggttttacccagccggacgggctcgcggaatcccacatcggtttgccggtcacgaaagctatcagaacatgggccctcagagaatgaatgtacaggttactcaacaccgaaccgacccaagactcactaaggagaaacttgacttccatgaggcccagcaaaaaaaagggaagccgcatgggagccggtgggatgatgaacctcacatctctgcttccgttgccgttaagcaatcttccgtcacacaggtgacagagcagtctcccaaggtgcagtcacgctataccaaggaaagcgctagctccatcctggcctccttcgggctgtctaatgaagatctcgaggaacttagcaggtatccggatgagcaattgacaccagagaacatgcctttaattcttcgggatattagaatgcggaaaatgggtagacgcttgccaaatttaccctcacagagtcgcaataaggagaccctcgggtctgaagccgtcagctctaacgtgatcgattacggccatgcgtctaagtacggatacactgaagaccctctcgaagtgcgtatctatgatccagagatcccgactgatgaggttgagaatgaattccagagtcagcagaatatttcagcttcagtgccgaacccgaatgtgatttgcaattctatgtttcctgttgaggacgtctttcgacaaatggactttcctggggagagttcaaataaccgctctttcttttccgtggagtctgggaccaagatgtctgggttgcatatttctgggggacagagcgtcctggagcctattaagagtgtcaatcagtccatcaatcagacagtttcacagacaatgagccagagtctgatccctccttctatgaaccagcaaccattctcttctgaactaatttccagcgtaagtcagcaagagcgcatcccacatgaaccagtgatcaattcgtccaacgtccatgtcggatctcgtggaagcaaaaaaaactaccaatcacaggctgatattcccatcagatctccatttggaatcgtaaaggcctcttggttgccaaagttttcacacgccgatgcgcagaagatgaagagactgccaactccctctatgatgaacgactattacgccgctagcccgcgtatcttcccccacttatgtagcctgtgcaacgtggagtgctcacacctgaaagactggatccagcatcagaatacaagtactcacatcgaatcatgcagacagctcaggcagcagtacccggattggaatccagaaatcctacctagccgtagaaatgagggcaatcgaaaagaaaacgaaacaccacgcagacgaagccactccccctcccctaggcgctcccgaagatccagtagcagtcatcgtttccgccgtagtcggagtcctatgcactatatgtacaggcctcgctccagaagcccacggatttgccacaggttcattagcaggtacagaagccgcagtcggagtcggtccccgtaccgaatccgtaatcccttccgaggcagccccaagtgctttcggtccgtgtccccggagaggatgtctcgtaggtccgtacgatcctccgacagaaaaaaagctctcgaggacgtcgtgcagcggagtgggcacggaacagaattcaacaagcagaagcacctggaagccgctgataaaggacacagcccagcacagaagcccaagacctctagtggcaccaagccatccgtgaaacctacctcagcaacaaagtcagacagtaacctcgggggtcacagtataagatgtaagtctaagaacctcgaagacgacaccctgagtgaatgcaaacaggtcagcgacaaggcggtctctctgcaaaggaaactccgaaaagaacagtccctccactatggcagcgtcttgctgattaccgagctccccgaggatggttgtacagaggaagatgtgcgaaaactattccagccctttggcaaggtaaacgatgtgctgattgtcccttaccgaaaggaggcttatcttgagatggaatttaaggaggcaattactgctatcatgaagtacatcgaaactaccccactaactattaaagggaagagcgtcaaaatttgtgtgcctggcaagaaaaaggcgcagaataaggaggtcaagaagaagactttagaaagcaaaaaagtctctgcttccactctcaagagggacgccgacgcctctaaagccgtggagatcgtcacatctacctccgcggagagtgtggaccagacacagcagctggttcccctcgtaaggaatactgctagggaccacgatggcactccagagaacgagggtgaggagaccgttcaatctgccctcttcggattccagtatgacgcttccgatcatactatggcttggttagggcctaacactgtgccggaagtgaaggagatgatactgcaggatccccaactccagaccacgcaactacctcaaaccacacaggcgccagatatcacatggggcatgttgaagaaaacaacctacaaagccgaacaaatactattacaaactcagaagccatttaccccagataatcttttccttgctctcctaagtggcgatgctaagcctgagtacgaacaatag

SEQ ID NO: 247749 - DNA, 1317 bp, synthetic construct
  misc_feature 1..1317: note = Description of Artificial Sequence: Synthetic coding sequence
  source 1..1317: mol_type = other DNA
atgcaagctgaggatagatcccaattcggctccgccgcagaaatgttgagtgaacagacggccgcattggggactggctgggaaagtatgaacgtacagctcgacggcgctgagccccaggtggaaaggggatcccaggaggaaaggccttggcgcaccgttccaggcccacttgaacatctgtgctgcgatctagaggaagaaccacagtcgctgcaggaaaaggcccagtcagctccatgggtccccgcaattcctcaggaagggaacaccggggattgggagatggccgcagcgctcctggcagcgggttcacaaggtttagtcaccattaaagatgtgtccctgtgtttctctcaggaggaatggagatccctcgacccaagccaaaccgatttttacggtgagtacgtgatgcaggagaactgcggtattgtggtcagcctgcggttccctatacccaagctcgacatgcttagccaattagaaggcggagaggagcagtgggtgccagacccacaagacttggaagagcgggatattctgagggtgacctacacaggagatggtagcgaacacgaaggcgacacaccggagctggaggctgaaccccctcgcatgctctcgagcgttagcgaagacaccgtgctttggaaccctgagcatgatgagtcgtgggattcaatgccatcatccagtcgcggtatgttgctagggcctcccttcttacaagaggattctttttctaatttgctgtgctccaccgaaatggactccctcttaagacctcatacctgtccacagtgtgggaaacagttcgtatgggggtcccacctcgccagacaccagcagacccatacaggagagcggccatactcatgcctcaagtgcgagaagacttttgggaggcgacaccatttgatcaggcaccagaagactcacctgcatgataagacctcacgctgcagcgaatgcgggaagaatttcaggtgtaattcccacctggctagccaccagagagtccacgcggaagggaagagctgcaaaggccaggaggtaggggagtctcctgggacacgtaaaaggcagcgagctcccccagtgccgaagtgccatgtttgtacagagtgcggtaagtcattcggtcggaggcatcacctggtgcgccattggctgacccacaccggggaaaaaccatttcaatgcccacgctgtgagaagtcttttggacgcaaacaccacctggatcggcacctactcactcaccagggacaatctcccaggaactcatgggaccgcggtacctctgtcttctag

SEQ ID NO: 247750 - DNA, 1248 bp, synthetic construct
  misc_feature 1..1248: note = Description of Artificial Sequence: Synthetic coding sequence
  source 1..1248: mol_type = other DNA
atgctcagcgagcaaactgccgcactcggcacaggctgggaaagcatgaacgtacaactcgatggtgcggagccccaggtggaacgtggctcccaggaggaaaggccttggagaacggtgccaggcccactagagcacctttgttgcgatcttgaggaggaacctcagtccctgcaagaaaaggcacaaagtgccccttgggttcctgcaattcctcaagagggcaataccggcgactgggagatggctgccgcattactggccgctggcagccaggtgtcatcagcctcgctgggagtgtcatgcggaccgatcactgccgcatttgtgctgctgtcccatcagcccatcgacgaactggcacacatgattattaacggtttcccgattcctaagcttgacatgctcagtcagctggaaggaggcgaagagcagtgggtgcctgacccacaggacctcgaggagagggatattctgcgcgtcacttacaccggggacggtagtgagcatgaaggcgataccccggaattagaggctgagcccccacggatgctgtcaagcgtatccgaggataccgttctttggaatcctgagcacgatgaatcctgggactccatgccgtcgagctcaagaggcatgctgctcggtcctccattcttgcaggaggacagcttttccaacctgctgtgctctacagaaatggacagcctgcttaggccacacacctgtccccagtgcggcaagcaatttgtatggggaagtcatttggccagacatcaacagacccacacaggcgagcgcccttactcctgcttaaaatgtgaaaagacatttgggaggagacatcatttgatcaggcaccagaagacacatctccatgacaagactagcaggtgttcagagtgcggaaagaattttcggtgtaacagccacttggccagtcatcagcgggttcacgccgaagggaagagctgtaagggtcaggaagtgggggaaagccctggaactagaaagcgacagcgcgcaccaccggtaccaaaatgtcacgtgtgcacagagtgtggtaaatcctttggaaggcgccaccatttagtgaggcactggttaacacataccggcgagaagcctttccagtgccctcgttgtgaaaagagtttcggcaggaagcaccacctggatcgccacctcctgactcaccaaggccagtcgcccagaaattcatgggatcggggtacgtctgtgttttag

SEQ ID NO: 247751 - DNA, 1317 bp, synthetic construct
  misc_feature 1..1317: note = Description of Artificial Sequence: Synthetic coding sequence
  source 1..1317: mol_type = other DNA
atgcaggcagaagatcggagccagttcggctctgctgcagaaatgctatcggagcagaccgctgcgctgggcactgggtgggagagcatgaacgtccagctcgatggcgcagagccccaggtcgagagaggcagccaggaggaacggccttggcgcaccgtgcctggccctctggaacacctttgttgtgatctggaggaggaaccccaatcgctccaggagaaagctcagtcagccccatgggttcccgctattccgcaggaaggcaatacaggcgattgggagatggctgcagcactgttggccgcagggtcccaaggcctggttactataaaggatgtaagtctgtgcttttcccaggaagaatggcggtctctcgacccgagccagacagacttctacggagagtatgtaatgcaggaaaattgcggaatagttgtgtcacttcggttcccaatacctaaattagacatgctgtctcagctggagggaggggaggaacagtgggttcccgatccccaggatttagaggagcgcgatatattaagggtgacttataccggagacgggagcgaacacgagggcgacactcccgagctggaagctgagcctccaagaatgctttcatcagtgagcgaggatacagtcctgtggaatcccgagcatgatgagtcctgggacagcatgcccagttcctcacgcggaatgctgctcggcccaccttttctgcaagaggatagctttagcaacctactgtgctctaccgagatggatagtctgcttaggcctcatacatgtcctcagtgtggaaagcagtttgtttgggggtcccatctggcacgtcaccagcaaacacataccggcgaaaggccttattcctgtctcaaatgcgagaaaaccttcgggagaagacaccatctgattcggcatcagaaaacacaccttcacgataagaccagccggtgttcagaatgtggaaaaaactttagatgtaacagtcatctagccagccaccagcgtgtccacgcagagggcaagagctgcaaaggccaggaagtgggtgagagccctggcacaaggaaacgccaaagggctcctcctgttccaaaatgtcatgtgtgcactgagtgtggaaaatcattcggtcggaggcaccatctggttcggcactggctaacccacacaggggagaagccatttcagtgtcccaggtgtgagaagagcttcgggagaaagcaccacctggaccgccacttgctgacccaccagggacagtctcccaggaattcatgggatcgcggaacaagcgtgttttag

SEQ ID NO: 247752 - DNA, 1275 bp, synthetic construct
  misc_feature 1..1275: note = Description of Artificial Sequence: Synthetic coding sequence
  source 1..1275: mol_type = other DNA
atgctcagtgagcagacagctgcccttggcacaggctgggagtctatgaatgtacagttggacggtgctgaacctcaggtggaacggggaagccaggaggaaaggccttggcggaccgtgccagggccacttgagcacctgtgttgcgacttagaagaagaacctcagagtttacaagaaaaggcccagtctgctccttgggttcctgccatcccccaggagggcaacacaggggactgggaaatggccgcagcccttctcgccgctgggagtcaaggactcgtgaccattaaggacgtatcactctgcttcagccaggaagaatggcggtccctggacccaagtcagacagatttctacggagaatacgttatgcaggagaattgtggaatcgttgtgagtttgcgcttcccaatccccaaactggacatgctgagtcaactcgaaggaggagaggaacagtgggttcccgatccccaggacctcgaagagcgcgatatccttcgggtcacctatacgggagatggctcagagcacgaaggagatactccagaactggaagccgaaccgccacggatgctgtcatccgtgtctgaggacacagtcctctggaatccagagcacgacgagtcatgggatagcatgccatcctctagtaggggaatgctcctgggacctcccttcctccaagaagactcattcagtaatttactctgttccacagaaatggactctctcctcagaccgcatacctgcccccaatgcggcaagcaattcgtttggggatcccacctggctagacatcagcagacccatacaggagagaggccctacagttgtttaaagtgcgaaaaaacattcgggcgtcgccatcatctcatccggcaccaaaaaactcacctgcatgataaaacctccagatgcagcgagtgcggcaagaactttcgctgtaactcccacctggcatctcatcaacgcgtacacgctgaggggaagtcgtgcaaaggtcaggaagtgggggagagtcctggaacacggaaacggcaacgcgctccccctgtacccaagtgtcacgtgtgtacagagtgtgggaaaagctttggacgtcgtcatcacctagtacggcattggctgacacacacgggtgagaaaccgtttcagtgcccaagatgcgagaaatctttcggtcgaaaacatcacctagaccgtcacctgctaactcaccaggggcagagccctagaaattcatgggaccggggaacctctgtgttttag

SEQ ID NO: 247753 - DNA, 411 bp, synthetic construct
  misc_feature 1..411: note = Description of Artificial Sequence: Synthetic coding sequence
  source 1..411: mol_type = other DNA
atgcaggctgaagacagatctcagtttggctcagcggctgagatgctgtccgagcaaaccgccgctcttggcacggggtgggaatctatgaacgtgcagcttgacggagccgagccgcaggtcgaacgcggatcacaggaggaaaggccttggcggaccgtgccaggaccattggagcacctgtgctgtgatctagaggaggaacctcagtcattgcaagagaaagctcagagcgccccatgggttccggctatacctcaggagggaaatacaggggactgggagatggcagcggctctgcttgccgcaggttcacaagggttggtgaccatcaaggacgtctcactctgcttctctcaagaagaatggcgctctctggacccttcccaaacagatttctacggcgaatag

SEQ ID NO: 247754 - DNA, 324 bp, synthetic construct
  misc_feature 1..324: note = Description of Artificial Sequence: Synthetic coding sequence
  source 1..324: mol_type = other DNA
atgctgtcagagcagaccgccgctctggggactggctgggagtcgatgaatgttcagctggatggagccgagccccaggtagaacggggttcacaagaagaacggccatggcggacagtgcccggtccattagagcacctttgctgtgaccttgaggaggagcctcagagccttcaggagaaggcccagagtgcaccctgggtaccagccattccacaggaagggaatacaggggactgggaaatggccgcagctctcctcgctgctggctcacagggcctagttactatcaaggacgtctccctgtgcttttcccaggagtag

SEQ ID NO: 247755 - DNA, 234 bp, synthetic construct
  misc_feature 1..234: note = Description of Artificial Sequence: Synthetic coding sequence
  source 1..234: mol_type = other DNA
atgctctctgagcagacagctgccctgggcacaggctgggagtccatgaatgtacagctggatggtgctgagccacaggtcgagaggggatctcaggaggaacgcccatggaggaccgtcccgggtccactggagcacctgtgttgtgaccttgaagaagaacctcaatctttacaagagaaggcccaaagcgccccttgggtgcccgctattcctcaagaaggtaacacttag

SEQ ID NO: 247756 - DNA, 3984 bp, synthetic construct
  misc_feature 1..3984: note = Description of Artificial Sequence: Synthetic coding sequence
  source 1..3984: mol_type = other DNA
atgagatccttcctgcagcaggacgtcaacaagacaaaatcccgcctcaatgtgctcaacggactggccaacaatatggacgacctaaagatcaataccgacataaccggagctaaagaagagctgctggacgacaacaacttcatctctgacaaagaaagcggagtgcacaagccaaaagactgtcaaacaagcttccagaaaaacaacacgctgacactgcctgaagaattatccaaagacaagtcagaaaatgccctttccgggggtcagagttcccttttcatacacgccggtgctcctacagtgtcaagtgagaatttcattctgccaaaaggcgcagcagtgaatggacctgttagtcacagctcactcacaaaaacctcaaatatgaataagggttctgtgtctctgacaacaggccagccagtggatcagccaaccaccgaatcttgcagtacacttaaagtcgctgctgacctccaactttcgaccccgcaaaaagcctctcagcaccaggtcctgtttcttctgagcgacgtcgcccacgcgaagaacccgactcattccaacaaaaaacttcctacctctgcttctgtgggatgcgatattcaaaatagcgtgggatcgaacatcaagtctgacggaactctgattaatcaagtggaagtcggggaggatggcgaagacctgttggtgaaagatgactgcgtgaacactgtgacaggcatctcttccggcactgacggcttcaggtcggagaacgataccaactgggatcctcagaaagagtttatccagttcctcatgacaaatgaagagaccgtcgataaggcaccgcctcactccaaaattgggttggagaagaaaagaaagcggaagatggacgtgtcgaagataactaggtatactgaagactgttttagcgacagcaactgcgtgcctaacaagtcgaagatgcaggaggtggactttctggagcagaatgaggaactgcaagcagttgattcccagaagtacgctctttcgaaggtgaagccggagtccaccgacgaagatctggagagtgtggacgcctttcagcacctgatttataatcccgacaaatgcggcgaggaatccagtcctgtgcacacctctacattcttaagcaacacccttaagaagaaatgcgaagaaagcgatagcgaatctccagcaaccttctccacggaggagccctcattttacccatgtacaaaatgtaatgtgaattttcgagagaaaaaacatctgcaccgacatatgatgtaccatttggatggcaacagccactttagacacctgaacgtgcctaggccatacgcctgtcgggagtgtggccgtacgtttagggaccgaaactctctgcttaaacatatgatcatccatcaggagagacgccaaaagctgatggaggaaatccgagaactgaaagagctgcaggacgaggggcgtagtgcacgcctgcaatgtccccagtgtgtgtttggaaccaactgtcctaaaacgttcgtccagcacgccaagacacatgagaaagataagagatattattgttgtgaagagtgcaacttcatggcagtgaccgaaaatgagctagaatgccacaggggcattgctcatggagccgtcgtcaagtgccctatggtcaccagtgatatcgctcagagaaagacccagaagaaaacctttatgaaagattctgtcgtgggaagctctaagaagtctgccacctatatctgtaaaatgtgcccctttaccacatctgccaagagtgtgcttaagaagcatacggaatatctacattcatcttcatgcgtcgacagcttcggctcacccctaggattagataaacgaaagaacgacatcttagaggagcccgtcgattctgattctacaaagacactgactaagcagcagtcaaccacgtttcctaagaattccgccctgaagcaagatgtaaagcggacttttggaagcacttcccaaagctcgagctttagtaaaatccacaaacgccctcaccgcatccagaaggctaggaagtcaattgcacagagtggcgtgaacatgtgtaaccaaaactctagcccacacaaaaatgtgacgatcaagagctctgtcgatcagaaacccaagtattttcatcaggccgctaaggaaaagtctaatgcaaaggcaaactcacactatctgtaccgccataagtatgagaattatagaatgattaaaaaaagcggtgagagctaccctgttcactttaaaaaggaggaagcctcatctcttaattcccttcacctcttctcctcctcatctaattctcacaacaacttcatcagcgatccacacaaaccagacgcaaagagaccagaatcttttaaggaccaccgaagagtggcggtgaaacgggtgatcaaggagtcaaagaaagaaagctcagtgggaggtgaggaccttgattcctatcctgattttctgcacaagatgaccgtcgtggtgctccagaagcttaattccgccgagaagaaggatagctacgagacagaggatgagagttcatgggacaatgtggagctgggggattataccacacaggccatcgaggacgagacgtacagcgacattaaccaagaacacgtgaatttgttccctctgttcaagtcaaaggttgagggccaggagcccggagagaacgccaccctctcatatgaccagaacgatggcttctattttgaatactacgaggacacaggaagcaacaatttcctccatgagatccatgacccccaacatctggagacggcggacgcatccctgtcaaagcactcatctgtcttccactggactgacctgtccttagagaagaaatcttgcccatactgtccggctacattcgaaacaggcgttggactgtcgaatcatgtaagagggcacctacatcgtgcgggtctgagctatgaggcacgacacgtggtgtctcccgagcagattgccacaagcgataagatgcagcacttcaaacggacaggaaccggtacaccagtcaaacgggtaagaaaggccattgagaagagtgaaaccacatctgaacatacgtgtcaactctgcggaggatggtttgatacaaagatagggttatccaaccacgtgcgagggcatctgaagcgactggggaagactaagtgggacgcccacaaatctcctatatgtgttcttaacgaaatgatgcaaaacgaggagaaatacgagaaaattctcaaagcattgaattccagacggattatacctcggccttttgtggcgcagaaacttgcctcaagtgatgatttcatatctcaaaacgttattcccttagaggcttacaggaatggccttaagaccgaggctctcagcgtgtctgctagtgaagaggaggggttgaattttctcaacgaatatgacgagaccaaacctgagctaccatcagggaagaaaaaccagagcttaacactcatagaattgctcaagaataagcgcatgggggaagaacggaatagtgccattagcccacaaaagatccataaccagacagccaggaaacgatttgtgcagaaatgcgtgctgcctctgaacgaagactccccgctaatgtaccagcctcagaaaatggatttgacaatgcactcagctctcgactgtaagcagaaaaaatcaaggtccaggtccgggagcaaaaaaaaaatgctcacattgccccacggtgcagacgaagtgtacatcctgcgctgtcgtttctgcggtctcgtgtttagaggccctctcagcgtgcaggaggactggatcaagcacttgcagcggcatattgttaacgccaatttgccgagaaccggcgcaggaatggtggaggtgacttctctcctgaagaagcccgcttcgattaccgagacgagtttttcattactgatggccgaggcggctagctag

SEQ ID NO: 247757 - DNA, 318 bp, synthetic construct
  misc_feature 1..318: note = Description of Artificial Sequence: Synthetic coding sequence
  source 1..318: mol_type = other DNA
atgcttattcgtcagaatctcgctttagattgcaagcagaaaaagtctaggtctcgatcaggatctaaaaaaaaaatgctgactctgcctcatggcgctgatgaggtctacattctaagatgtcggttttgtggtctggtctttcggggaccactgagcgttcaggaggactggatcaaacacctccagcggcacattgttaatgctaacctccctcggactggtgctggaatggttgaggtaacaagcctgctcaagaaaccggcatcaattaccgagaccagcttttccctactgatggccgaagctgccagttag

SEQ ID NO: 247758 - DNA, 318 bp, synthetic construct
  misc_feature 1..318: note = Description of Artificial Sequence: Synthetic coding sequence
  source 1..318: mol_type = other DNA
atgctgatccggcagaatctggccctggattgtaagcagaagaagagtcggtctcgatccggcagcaagaaaaaaatgctgacactcccccacggagcagacgaagtttacattttacgatgtaggttttgcgggttagttttccggggtcctttgagtgtgcaggaggactggataaagcatctccagcgccacattgtcaatgctaatctgcctcggaccggcgctggcatggtcgaagttacatcgcttctgaagaagccggcttcaatcacagaaaccagcttcagcctgctcatggccgaggctgcgtcgtag

SEQ ID NO: 247759 - DNA, 3984 bp, synthetic construct
  misc_feature 1..3984: note = Description of Artificial Sequence: Synthetic coding sequence
  source 1..3984: mol_type = other DNA
atgcgatccttcctccagcaggacgtgaacaaaacaaaatctcggctcaatgtgttaaacggcttagctaacaatatggatgatctgaagatcaacacagacattacaggcgctaaggaagaactcctcgacgacaacaatttcattagtgacaaggaaagcggcgttcacaaaccaaaagattgtcagacctctttccaaaagaacaacacactgacactacctgaagagctgagcaaagacaagtccgagaatgcattatcggggggacagtccagcctcttcattcacgcaggagccccaaccgtgagctctgagaacttcattcttcctaaaggtgcagccgtaaatggcccagtgtctcactcgagtctcaccaaaacgagcaacatgaacaagggttccgtatctctaacgaccggacagccagtggatcaaccgacgaccgaatcatgttccaccctcaaggtagccgcagatttacagctgagtacaccacaaaaggcgagccagcatcaggtcctattcctcctgagcgacgtcgcacacgcgaaaaatcccacgcattcgaacaagaagctacctacctccgccagtgtggggtgcgatatccagaatagcgtcgggagcaatattaagtcagatgggacacttattaaccaggtggaagttggagaagatggtgaggacctgctagtcaaggacgattgcgtcaacacagtgacgggtatttcctcgggaacagatggtttccgcagcgagaacgacacgaattgggaccctcagaaggaattcattcagttcttgatgaccaacgaagagactgtggacaaagcaccacctcatagcaagattggccttgagaaaaagaggaagagaaaaatggatgttagcaagatcacgcgttataccgaagactgttttagcgattcaaattgtgtgcccaacaagtctaagatgcaagaggtggactttttagagcagaacgaagaacttcaggctgttgactcgcagaagtacgctctcagcaaggtaaaacccgagagcactgacgaagatctggagagcgtcgatgcatttcagcatctgatatataatccagataagtgtggcgaagagagtagccctgttcatactagcacttttctgagtaatacactgaagaaaaaatgtgaggagtctgactcggagtcacccgctacctttagcactgaggaaccctccttttacccctgcacaaagtgcaatgtgaacttcagagaaaagaagcacctacaccggcatatgatgtaccacctagatggtaactcccattttaggcacttgaacgtcccgcgaccttatgcttgccgagagtgtgggcgaacctttcgggaccggaactctcttctaaagcatatgattatccaccaagaaaggagacagaagcttatggaagaaattagggagctcaaggaactacaagatgaggggagaagtgctcggctgcagtgcccacagtgcgtcttcggcactaactgtcccaaaacctttgtccaacacgcaaagacacacgagaaagataagcgctattactgctgtgaagagtgtaacttcatggctgttacggaaaacgaactggaatgccaccgcggtattgcgcacggcgctgtcgtgaagtgccctatggtgacctcagatatagcccagcgtaagacacagaagaagacattcatgaaagatagtgtggtggggagctcgaagaaatccgctacctacatctgtaagatgtgcccatttacaacttccgctaaaagcgttttgaaaaagcatacagagtatctgcatagcagcagctgtgtggactcatttggaagcccacttggcttagataaaagaaagaacgacattttggaggagcctgtggactctgattcaacaaagactcttacaaagcagcagagcacaactttccctaagaacagtgccttgaagcaagacgtcaagaggaccttcggtagcacttcacagtccagttctttttccaagattcacaaacggccacacaggatccagaaagccagaaaaagtattgcccagagcggggtgaacatgtgcaaccagaattctagcccgcataagaacgtgaccattaaaagcagtgtggatcagaagccgaaatattttcaccaggccgcaaaagaaaaatctaacgctaaagctaattcacactatttgtaccgtcacaagtatgagaactacagaatgatcaaaaagtctggcgagtcttatccggtccacttcaaaaaagaggaggcatcgtccttgaactcacttcacctcttttcaagtagcagcaactcgcacaacaatttcatcagcgacccacacaaaccggatgcaaaaagacccgaatctttcaaggatcatcggcgagtggcagtcaagagagttatcaaagagtctaagaaggaaagctccgtaggcggagaagatttggatagctaccctgacttccttcacaagatgaccgtcgtagtcctgcagaagctgaattctgctgagaaaaaggactcttacgaaactgaggatgagagcagttgggataacgtagagcttggggattacactactcaggcaatcgaggatgagacctacagcgatattaaccaggagcatgtgaatctgttcccactcttcaagtcaaaggtggaggggcaggagcccggtgaaaatgctaccctgagctatgatcagaatgacggtttctactttgaatattatgaagacacggggagcaataatttcttgcatgagatccatgaccctcagcatttggagactgctgacgcctctttaagcaaacattcaagtgtcttccactggacggatctcagcttggagaagaagagctgtccttactgccccgctacttttgaaaccggtgttggtctctctaaccacgttcgcggtcatttgcatagagccggtttgtcgtacgaagccaggcatgtcgtctctccagagcagattgcgaccagcgataagatgcaacactttaagaggactggaactgggacccccgtaaaacgcgtgaggaaggccatcgagaagtctgaaaccaccagcgagcacacctgccagctctgcgggggttggttcgacaccaaaattggactgagtaatcacgtgagaggccatctgaagagactcggcaagacaaagtgggacgcacacaaatcaccaatctgcgtgctgaacgagatgatgcaaaacgaggagaagtatgagaaaattcttaaggccctgaatagtagaagaattatcccgagaccatttgttgcacagaagctagcgagtagcgacgacttcatttcccagaatgtcatccctttagaagcttatcgtaatggcctgaagacggaggctttatccgtgtcggcctcagaggaagaaggcctgaactttcttaatgaatatgacgagacaaagcccgagctgccatccgggaagaagaatcagagcttgactctcattgaactgttaaaaaacaagaggatgggggaggagagaaatagtgctattagcccccagaagatacacaaccagactgctcgtaagcggttcgtgcagaagtgtgtgctccctctgaatgaagacagccccctcatgtatcagccccagaagatggacctcaccatgcattccgcattagattgtaagcagaaaaagagccgcagccgttcaggatcaaagaagaaaatgctgaccttgcctcatggggctgacgaagtatatatcctcaggtgtagattctgcgggctggttttcagaggtcccctctccgtgcaggaagattggattaagcatctgcagcggcacattgtgaacgccaacctgccccgtaccggcgcaggaatggtcgaagtgacaagcctcctcaaaaaaccagccagtattaccgagacatctttttccctcctcatggccgaggctgcatcatag

SEQ ID NO: 247760 - DNA, 1953 bp, synthetic construct
  misc_feature 1..1953: note = Description of Artificial Sequence: Synthetic coding sequence
  source 1..1953: mol_type = other DNA
atgatgtaccaccttgatgggaactctcactttcgccatctgaatgttccaaggccatatgcttgtagggaatgtggccgaaccttccgagatagaaattccctgttaaagcacatgatcatccaccaggagaggcggcagaagttaatggaagaaatcagagagttgaaagaactacaagatgaaggacggagcgcacgccttcagtgtccgcagtgcgtttttggtaccaattgcccaaagacctttgtgcaacacgccaaaactcacgagaaggacaaacgttactactgctgtgaagagtgcaactttatggctgtgacagagaacgagctggagtgtcatcgcggtattgcgcatggggctgtggtaaaatgtcccatggtgacgagcgatattgcacagcggaaaactcagaagaagacctttatgaaggatagcgtcgtgggaagtagcaaaaagtccgcaacttacatctgtaaaatgtgcccatttacaacatcagccaaaagtgtcctcaagaagcacactgagtacttgcattctagcagctgtgtcgactcctttgggtctccacttggtctcgataaacgaaaaaatgatattctggaagagcccgtcgacagtgatagtaccaagactctcactaagcagcagtctaccacattccccaagaatagcgccttgaaacaagacgtgaaaagaaccttcggctccacttcacagagttcctctttttcaaagattcataaacgtccacataggattcagaaggctcgcaaatccatcgcccagtccggggtcaatatgtgcaatcagaactcttctccccataaaaatgtgaccatcaaatctagcgtggaccaaaaaccaaaatatttccaccaggcagccaaagagaagtctaacgcgaaagctaatagccattatctttatcggcacaagtatgaaaactatcgaatgatcaagaagagtggggagagttacccggtccacttcaaaaaggaagaggcaagttctctcaatagcctccacctttttagttcatcctccaatagccataataattttatttccgatccacacaaacccgacgccaagagacccgagagctttaaagaccatcggcgagtagcggtgaagcgcgtgatcaaagagtctaagaaggaaagcagcgttggaggcgaggacctggatagctatcccgattttctccacaaaatgacagtggtggttttgcagaagctgaactcggcagagaaaaaggatagctacgagaccgaagatgaaagtagctgggataacgtggagctcggcgattacaccacccaggccattgaggacgaaacttactccgacatcaaccaggagcacgttaacctgtttccattatttaagtcaaaagtagaaggccaagaaccaggagaaaatgcgaccctttcctacgatcaaaacgacggcttctacttcgaatactacgaagacaccgggtccaataactttctgcatgagattcacgacccccaacaccttgaaacagctgatgctagcctgtctaaacattcctctgtctttcattggacagatcttagcctggagaaaaagagttgtccttattgcccggctactttcgaaaccggcgtgggattgagcaatcatgttagggggcatctacaccgagcaggcctgtcttatgaggcccgacacgttgttagcccagagcaaatcgctacttccgataagatgcagcacttcaagcggacaggtactggaactccagtgaagcgcgttcgtaaggcgatcgaaaaaagcgagacaacaagcgagcacacctgccagctctgcggcggttggttcgatacgaagatagggctctcgaatcacgtgagggggcaccttaagaggctagggaaaactaaatgggacgcccataagagtcccatatgcgtctag

SEQ ID NO: 247761 - DNA, 924 bp, synthetic construct
  misc_feature 1..924: note = Description of Artificial Sequence: Synthetic coding sequence
  source 1..924: mol_type = other DNA
atgagaagcttcttgcaacaggatgtcaataagaccaagtcccgcctgaacgtcttaaacggattagccaataatatggatgacctaaagataaacacagatatcacaggagctaaggaagagctcttggacgataacaattttatctccgataaggagtccggagtgcataagcccaaggactgtcaaacatctttccagaagaacaacaccctgaccctgccggaagagttaagcaaagacaaatctgaaaatgccttaagcggtggccaatccagccttttcatccatgctggtgcaccgactgtgagcagcgaaaatttcatactccctaagggggcagcagtgaacgggcctgtgtctcactcatccttaaccaagacctcaaatatgaataaaggtagcgtgagcctaactacggggcagcccgtcgatcagccgactaccgaatcatgctccaccttgaaggtggccgctgacctgcagttgtctaccccccagaaggcttcccagcatcaggttcttttcttgctaagcgacgtggcacacgcaaagaatccgacccatagcaacaagaaactgccaacatcagcatccgtgggctgtgacatacagaattctgtgggctctaatatcaaaagtgacggcacactcatcaaccaagttgaggtgggggaagatggcgaggacctgctggtgaaagatgactgcgtgaacaccgtgactgggatctcctcaggcactgatggttttcgtagcgaaaacgataccaactgggatcctcagaaggaattcattcagttcctcatgacaaatgaggaaacagtcgacaaagcgcctccccacagtaagatagggctggaaaaaaaaaaggccaaaaatggctgtaaacaggacaactctttatatcgtgggctgctgtag

SEQ ID NO: 247762 - DNA, 1518 bp, synthetic construct
  misc_feature 1..1518: note = Description of Artificial Sequence: Synthetic coding sequence
  source 1..1518: mol_type = other DNA
atgactaaggcccaggagtccctgacattagaggatgtagccgttgactttacctgggaggagtggcagtttctgagccccgctcagaaggacctctatcgtgacgtaatgctcgaaaactactctaatctggtgtcagtgggataccaggctgggaagcctgatgctcttaccaagctggaacagggggaaccactttggaccttggaagatgagatccatagtcctgctcaccctgagatcgagaaagcagacgatcatcttcagcagcccctgcagaaccagaagattcttaagagaacggggcagagatacgaacatggacgtaccctgaaaagctacctgggactcaccaatcagtctcgaagatataatcggaaagaacccgcagagttcaatggcgatggagcatttctgcacgataatcacgaacaaatgcctaccgagattgagttccccgagtcccgtaaacccatcagcacaaagagccagttcctcaaacaccagcagacacataatattgagaaggcccacgaatgcacagattgtggaaaagcttttctgaaaaaatcccagctgaccgagcacaaacgaatccataccggcaagaagccccacgtttgctccctttgtgggaaggcattctacaaaaagtaccgcctaactgagcacgagagagcacaccgcggtgaaaaacctcacggctgttccctgtgcggcaaagccttttataagagatacagacttaccgagcacgaacgggcacataaaggggagaaaccttatgggtgttccgagtgcggaaaagccttccccaggaagtcggaactcacagaacatcaaaggattcacactggaataaagcctcaccagtgctctgagtgtgggcgagctttttcaagaaaaagtctgctggttgtgcaccagaggacccacacgggcgaaaagccccatacatgctctgagtgtggaaaagggttcatccagaagggtaacctcaatatccaccaacgcactcacaccggagagaaaccctacggatgtatcgactgtggcaaagccttctcacagaagtcttgcctcgtggcacaccagaggtatcatactggcaaaactccctttgtctgcccagagtgcggacaaccctgcagtcaaaagagtggtctgatcaggcaccagaagatccacagtggtgagaagccttacaaatgcagcgactgcgggaaggccttcttaacgaagacaatgttgattgtccatcaccgcacacatacaggggagagaccatatgggtgtgatgaatgcgaaaaagcatatttctacatgagctgcctcgtgaagcacaaacgtatccatagccgggaaaagcgaggagattctgtgaaggttgagaaccccagtaccgcttcccattccctcagcccttccgagcacgttcagggaaaatcaccagtaaatatggtcacggtcgcaatggttgccggacaatgcgaattcgctcacatcctgcacagctag

SEQ ID NO: 247763 - DNA, 1833 bp, synthetic construct
  misc_feature 1..1833: note = Description of Artificial Sequence: Synthetic coding sequence
  source 1..1833: mol_type = other DNA
atgcctagcgccaggggaaaaagcaagagcaaggccccaatcacttttggtgatctggcgatctattttagccaagaggagtgggaatggctgagtcctatccagaaggatctgtacgaggatgtaatgctggaaaattacaggaacctggtttctcttggcttgtcattccgcaggccaaatgtgataactctgctcgagaaaggcaaggcaccctggatggtggagcctgtccggaggagaagggcacccgacagtggatctaagtgcgaaaccaagaagttgccacccaatcagtgtaataaaagcggtcagtctatttgccagaaattagtatccgcgcagcaaaaggctcctaccaggaagagtggatgtaataagaattcagtgctggtgaagcctaagaagggacatagcggcaagaagcccttaaagtgtaacgactgcggtaagacgttctctagaagcttctcacttaaacttcaccagaacatacatactggagaaaaaccgttcgagtgttcaaactgtcgaaaggctttcagacagattagtagcatactgctgcaccagcggattcactcaggtaagaagtcccatgaatgcaacaagtgcggggagtcttttaaccagcgaacaacactcatcctccacatgagaattcatgatggcaaagagatcctagattgcggcaaggccctcagccagtgtcaatctttcaacattcatcagaaaattcacgtagtcggcaacgtttgccaatgtaggaaatgtggcaaagccttcaatcagatgagctctttacttctgcacaagaaaattcacaatggcaagaagacacacaagtacaataagtgtggacggggtttcaagaaaaaatctgtttttgtggtgcacaagcgcattcacgccggtgagaagattccggagaatgccaaagcgctgtcacagtccctgcaacagcgatcccaccacctcgaaaatcccttcaagtgcagaaaatgtggaaaactctttaatcgaatctctcccctcatgttacatcagagaatccataccagtgagaagccatacaaatgcgataagtgcgataagttcttcagacgactctccaccctaattctgcacttgaggatacacaacggagagaagttataccgatgtaataaatgcgaaaaggtgtgcaaccggcactcctctctgatccagcatcagaaggtccacacgaagaagaagaagctgttcgaatgcaaagagtgtggcaaaatgttctcgggaaccgctaacctgaagatccaccagaacatccactcagaagaaaagcccttcaaatgtaacaagtgcagcaaagtgttcgggaggcagtcattcctgatcgaacaccaacgcattcatactggtgaaaagccctaccagtgcgaggagtgtggtaaggcgttttcacataggatctccttgacccgccacaaacggatccatacagaggatcgcccatatgagtgcgatcaatgtggaaaggctttctctcaatctgcccatctcgcacagcacgagcggatccatactggcgagaagccttacacctgcaaaacgtgcggtaaggcctttagccagcgcacatccctgatcttgcatgaaaggagtcacacgggcgagaagccttatgagtgcaatgaatgcgggaaagctttctcatccgggtccgatctcattcgacatcagcgcagtcattcctcggagaaaccctatgagtgcagcaagtgtgggaaggcatactcccggtccagcagtctaatacgccaccaaaacacacactcggaagagaaagcctag

SEQ ID NO: 247764 - DNA, 2217 bp, synthetic construct
  misc_feature 1..2217: note = Description of Artificial Sequence: Synthetic coding sequence
  source 1..2217: mol_type = other DNA
atgcggaccctggtaaacgccctctccgggggtgggcaggagattaagccagaaggcaagtgcgcccataacggaatgtgctttcggtgcgaagaggtggctcctgatacttgcgaagcttacccttaccccggactggtcgtcagcgttgcgggaaaggaaggacccaatccagatcacaaacgcggatttcttgatctggctcaggagggtattcaggctttgccataccagttatccgcccatctgtctgtgtggaccctgaaaggagaggagcgcatgccatcagcgagaggaaagagtaaaagtaaagcaccaatcactttcggcgacctcgcaatttacttttcccaggaggaatgggagtggttgagccccattcagaaggacctctacgaggacgttatgcttgagaactacagaaatcttgtgtcccttggcctgtcctttcgcaggccaaatgtgatcacactcctcgagaagggcaaagccccatggatggtggagcctgtgagacggaggagggctcctgagttggtgactgtagccctattttcaagtttcggagaggtgatgttcagcagaatggtactcatgctaatggatgtgtgtcagtatttagttatcgacgagcttgatagcggctccaagtgcgagactaagaagctccctccaaaccagtgcaacaagtcaggacagtctatttgccagaaattagtatctgcacagcagaaggcccctactagaaaaagtggatgtaataaaaatagcgtgctcgtaaaacctaagaagggacactctggcaagaagcccctaaagtgcaacgactgcggtaagacctttagtcggtcgttctcgctgaaattacatcagaatattcacacaggcgagaaaccctttgaatgcagtaactgtcgaaaggcgttccgccagatttcgtcgatactgctgcatcagagaatccattcaggtaaaaaaagccacgagtgtaacaagtgcggagaatctttcaaccaacgcacgacgctcatcctccatatgagaatacacgatggaaaggaaattctggactgcggcaaggcgttatctcagtgccaatcctttaacattcaccaaaagatacacgtggtagggaacgtgtgccaatgccgaaaatgtggaaaagcattcaatcagatgagttctttgctgttgcacaagaagatccataacgggaagaaaacccataagtataataagtgtggtcgaggattcaagaaaaaatctgtcttcgtagtccacaagcgcattcacgctggggaaaagatccctgaaaacgccaaggccctatcccagtcactgcagcaaaggtcacaccatctggagaatcctttcaaatgccgcaaatgcggaaagcttttcaatcggatttcacctctgatgttacaccagagaatacataccagtgaaaaaccatacaagtgtgataagtgtgataagttcttccgtaggctgagtacactgatcctgcatctccggatccataatggcgaaaagctgtatcgatgtaataagtgtgagaaagtgtgcaacaggcatagcagcctcatccagcatcagaaggtgcatactaagaagaaaaaactgtttgaatgtaaggaatgcgggaaaatgttttccggcacagccaatttgaaaatccaccagaatattcattccgaggaaaagcctttcaagtgcaacaagtgtagcaaggtgtttggtaggcaatcattcttgatcgaacaccagcgtatccatacaggggaaaagccttaccagtgcgaagaatgcggaaaggcatttagtcatcgaatttctctcacccgacacaagcgaattcacactgaagaccgtccgtatgagtgtgatcagtgtggtaaggccttcagccagagcgcgcaccttgcgcaacacgaacgcatccatacaggtgagaaaccatacacgtgtaaaacctgtggtaaagcctttagccagcggacatcacttatcctacatgagaggtctcatacaggcgagaagccgtacgaatgcaacgagtgcggaaaggcattcagcagtgggagtgacctgatcaggcaccagcggtcacactcaagcgagaagccttatgagtgctccaaatgcggaaaggcttattccaggtcctccagcttgataagacatcagaatactcactctgaggaaaaggcctag

SEQ ID NO: 247765 - DNA, 975 bp, synthetic construct
  misc_feature 1..975: note = Description of Artificial Sequence: Synthetic coding sequence
  source 1..975: mol_type = other DNA
aaaaattctgtgttagtcaagccaaagaagggtcacagtggaaagaaacccttgaagtgcaacgattgcgggaagaccttctccaggtcattctccctcaaattgcaccagaacatccatactggtgagaaacctttcgagtgttcaaattgcaggaaggcttttcggcagatttcctcaatactattgcatcagaggattcactcaggcaaaaagtcacacgagtgcaacaaatgtggagagtccttcaaccagagaactacattgattctgcacatgcggatccatgatgggaagaaccccttcaagtgtagaaagtgcggcaagctgtttaataggattagtccactgatgctgcatcagaggattcatacctccgagaagccttacaagtgcgaggagtgtggcaaaatgttcagtggcactgccaatctgaagatccatcagaacatacactcagaagagaagcctttcaagtgcaacaagtgtagcaaggtcttcggccgtcaatcttttttaatagagcatcagcgcatccacacgggcgagaagccgtaccagtgcgaggagtgtggtaaggcgttcagtcacaggatatccttgaccagacacaaacgtatccatactgaggaccgaccttacgagtgcgaccagtgtggtaaggcgttttcccagtccgcccacctagcacaacacgagcgaatacacacaggggagaagccctatacctgtaagacatgcggaaaggccttttcgcaaaggacgtccctgatcctgcatgagaggagtcatactggagaaaagccgtacgaatgtaacgaatgtgggaaggcgttcagctccggctctgatctaattcggcatcagagatcacatagcagtgagaagccatatgagtgctcaaagtgtggtaaggcctattccaggtcatcatcactgatcaggcatcagaatactcattccgaggaaaagtag

SEQ ID NO: 247766 - DNA, 1179 bp, synthetic construct
  misc_feature 1..1179: note = Description of Artificial Sequence: Synthetic coding sequence
  source 1..1179: mol_type = other DNA
atgcggattcatgatggcaaagagattctggattgcggcaaggccctgtcccagtgtcagtctttcaatatacaccagaagatccacgttgtgggtaacgtgtgccagtgtagaaagtgtggaaaggctttcaatcaaatgtcttctctgctgctgcacaaaaaaattcacaatggcaagaaaactcacaagtataacaaatgcggaagaggcttcaaaaaaaaaagtgtgttcgtcgtgcataagcgaatccatgccggtgagaaaattccggagaatgccaaagccctttctcagtctctgcaacagagatcccaccacttggaaaatccttttaaatgtaggaaatgtggtaagctcttcaacagaatctctcctcttatgctgcatcaacgcattcataccagtgagaagccgtacaaatgcgataaatgcgacaaattctttagacggctgagcacactgattctccacctcagaatccataacggggaaaagctgtaccggtgcaacaagtgtgagaaggtttgcaatagacactcttcattgatccagcatcaaaaggtgcatacaaagaagaagaagctctttgagtgtaaggagtgcggcaaaatgttcagtggcactgctaatctgaaaatccatcagaatatccacagtgaagaaaagccgtttaaatgtaataaatgctctaaggtgttcggtagacagagcttcctgatagaacaccagagaatacatactggggagaaaccctaccaatgtgaggagtgcggtaaggcattctcccatcgcataagtctgacaaggcataaaaggatacatactgaggatcggccatacgagtgcgaccaatgtggtaaagctttttcacaatccgcccacctggcccagcacgagaggatccacactggggaaaagccctatacatgcaagacttgtggaaaggctttttcccagcggactagcttgattctccacgaaaggtcccacacaggcgagaaaccctacgaatgcaacgaatgcggaaaggcattcagcagcgggagtgaccttattaggcatcagaggtcgcactcttctgagaagccatatgaatgcagcaagtgcggcaaagcatatagccgaagctcctcacttattcgccatcaaaatacacatagtgaggagaaagcatag

SEQ ID NO: 247767 - DNA, 1833 bp, synthetic construct
  misc_feature 1..1833: note = Description of Artificial Sequence: Synthetic coding sequence
  source 1..1833: mol_type = other DNA
atgccctctgcccgagggaagtcaaagtcaaaggcccctatcaccttcggcgacctggctatctacttctctcaagaggagtgggagtggcttagccctatccagaaagatctatacgaagacgtgatgctagagaactacaggaatctggtgagccttggcctgtctttccggagacctaatgtcattaccttactagaaaagggcaaggcgccttggatggttgagccagtgagacgacgtcgcgctcccgattctgggagtaaatgtgagacgaagaaactgccacccaaccaatgcaataaaagtgggcagagcatatgccagaagctggtgagtgcccagcaaaaagcacccacaaggaagtccggctgcaacaagaacagcgtcctagttaagcccaaaaaaggccatagtggtaagaagccgctgaagtgcaacgattgtggcaagacattttcccgatcttttagcctgaaactacatcaaaatatacatactggcgagaagcctttcgagtgctctaactgccggaaagcattcaggcagatctcgtccatactcctgcaccaacggatacattccggtaagaagtcacacgagtgcaacaaatgcggagagagctttaaccagcgcactacgctgatcctgcatatgcgaattcacgacggcaaagaaattctggactgtgggaaagcgttgagccaatgtcaaagctttaacatccatcagaagatccacgtagtgggaaacgtttgccagtgtcgcaaatgcggcaaggcctttaatcagatgagttccctgttactgcacaagaaaattcacaacggaaaaaaaacccataaatataacaagtgcgggagggggttcaagaagaaaagtgttttcgtggtgcataaacgcatccatgcaggtgagaagataccagagaacgcgaaggccctctcccagtccctgcagcagagatcccatcatctggaaaaccccttcaaatgtcgaaaatgtggcaagttattcaatcgcatttctccgttgatgctgcatcagcgcatccacacttccgaaaaaccatacaagtgcgataaatgcgataaattttttcgccgactatcgactttgattctacacctgcggatccataacggggaaaaattgtataggtgcaacaagtgtgaaaaggtctgtaaccggcattctagtctgatccaacaccaaaaggtccacactaaaaagaagaagctcttcgaatgtaaggaatgcggtaagatgttttcaggaacagccaacctgaagatccatcagaacattcatagtgaagaaaagccttttaagtgcaataaatgtagtaaggtgttcggccgtcagtcatttctgattgagcaccagagaatccacacaggagagaagccgtaccagtgtgaggagtgcggaaaggcattcagccatagaatttcactgaccaggcataaaaggattcacactgaggaccggccttatgagtgtgaccagtgcggtaaggcctttagccaatccgcacacctggctcagcatgagcggattcatactggggagaaaccatacacctgcaagacatgcggtaaggccttttctcagcggacttctctgattcttcacgaacgcagccacaccggagagaagccttatgagtgcaacgaatgcggcaaggccttctcatcaggcagcgacttaataagacaccagcggagccattcatctgaaaaaccatatgaatgcagcaaatgcgggaaagcctacagtagatcatcttcactgatcaggcaccagaacacccattcggaggagaaggcatag

SEQ ID NO: 247768 - DNA, 1728 bp, synthetic construct
  misc_feature 1..1728: note = Description of Artificial Sequence: Synthetic coding sequence
  source 1..1728: mol_type = other DNA
atggcaatgagtcaggaatcactgaccttcaaggacgtctttgtcgacttcacactcgaggagtggcagcaactggactctgcccaaaaaaatctgtacagggacgtgatgctggagaattacagccaccttgtttcagtcggacacctagtgggcaaacctgacgtcatcttcagactcggacccggagacgagtcatggatggcagatggaggcacaccggtgagaacgtgtgccgtgtgggaagtggacgagcagattgaccattacaaggagtctcaggacaaattcttgtggcaggccgctttcatcggcaaagaaacacttaaagacgagtccggacaggagtgtaaaatctgccgcaaaatcatatacctaaacactgacttcgtgagcgtgaagcagcgcctaccaaagtattattcctgggagcgctgctccaagcatcacctgaactttctcggacagaacaggtcttacgttaggaagaaggacgatggatgtaaggcatattggaaggtttgtctgcattataatttgcacaaggcccagcccgctgagaggttctttgatcctaatcaaaggggcaaagcgctacaccagaagcaggccctgcgcaagtcccagcgatcgcagacaggagagaaactgtacaagtgcactgagtgtggcaaggtctttatccagaaggcaaatttggtggtacatcagcggacccatacaggcgaaaaaccctatgaatgctgtgagtgtgccaaggctttcagccagaagagtacactgattgcccaccagaggacgcataccggtgaaaagccttatgaatgttccgaatgcgggaaaacattcattcaaaagagcacattaattaagcaccagcggacacacacgggtgaaaagccatttgtgtgcgacaagtgcccaaaggcattcaaaagctcatatcatttaatccgacacgagaaaacccatattcgacaagctttttataagggtattaaatgcaccaccagctctctgatataccagaggatacacacgtcagagaagccccagtgtagtgaacacggaaaggcatccgatgagaaacctagccctactaagcattggagaacccacaccaaagagaacatttacgagtgctccaagtgtggtaaatcatttcgaggtaagagtcacctaagcgttcatcagagaattcacaccggagagaagccatacgaatgttctatctgtggcaaaacatttagcggtaaatcccacctgtcagtccaccaccgaacccatacgggcgagaaaccttatgagtgtcgcagatgcggcaaagccttcggagaaaagagcacgctgatcgtccaccagcggatgcatacaggagaaaagccatacaaatgcaacgagtgcggcaaagcattcagcgagaagagccccctcatcaaacatcagcgcattcataccggtgagcgtccatatgagtgcacagattgcaagaaagcattctctcggaaatcaaccctgattaagcatcagaggatccacaccggagaaaagccttataaatgcagtgagtgtgggaaggccttctcggttaagtccacgctgatagtgcatcataggacccacacgggcgaaaaaccctacgaatgcagagactgtggaaaagcttttagtggtaagagtacgcttattaagcaccagagatctcacacaggtgataagaacctgtag

SEQ ID NO: 247769 - DNA, 1746 bp, synthetic construct
  misc_feature 1..1746: note = Description of Artificial Sequence: Synthetic coding sequence
  source 1..1746: mol_type = other DNA
atggccatgagccaagagtcattaacatttaaagacgtgttcgttgatttcaccctcgaggaatggcagcagcttgacagtgcccagaaaaacctttatagagacgtcatgctggagaattactcccatttagtgagcgtgggacatctggtggggaagcccgacgtgatcttcaggttgggacccggagatgagagctggatggcagatggcggaacccctgtcagaacgtgtgcgggagaggatagacccgaggtgtgggaggtggatgaacaaattgaccattataaagaaagtcaagacaaattcctgtggcaagctgctttcattggaaaggaaacgctgaaggacgaaagtggtcaggaatgcaaaatttgcagaaagattatctatctcaataccgatttcgttagtgtgaaacagcgacttccaaaatactatagctgggagcgctgcagcaagcaccacctcaactttttgggacaaaatagatcttatgtgcggaagaaagacgatggatgcaaagcgtattggaaagtttgtctgcattataacctgcacaaggcacaaccagctgagaggttcttcgacccgaaccaacgcggaaaagccctccatcagaaacaggccctgaggaaatctcagcggagtcaaactggtgaaaaactgtacaaatgtacagaatgtggtaaggtgttcatccagaaggcaaatttggttgtccaccagagaacccatacgggggagaaaccttatgagtgttgcgagtgcgctaaggcctttagccagaaaagcactctgatcgcccaccagcggacccatactggcgagaagccatatgagtgctccgagtgtggcaaaacattcattcagaagtcaactctcattaagcatcaacgcactcatacaggagaaaaaccttttgtgtgtgacaaatgtcctaaagcctttaaaagttcttatcatttaatccgtcatgaaaagacccatattcgacaggcattttataagggaatcaaatgcactaccagtagcttgatatatcaacgcatccacacatccgaaaagcctcagtgcagcgaacacggcaaagcatcagatgagaaaccgtcacctacgaaacactggcgcacccacactaaagaaaacatctacgaatgttcgaagtgcggtaagagttttcgaggcaaatcccacctgtctgtgcatcagagaatccacacaggggagaagccctacgagtgcagtatttgcggcaaaaccttctctggaaaatctcatttgtccgtccatcatcgtacccacacaggcgaaaaaccttacgaatgtcgacgctgcggaaaggcatttggggagaagtctacgttgattgtccaccagagaatgcatacaggtgaaaagccgtataagtgcaacgaatgcggaaaagctttctccgaaaagtctcccctgattaagcaccagcgaatccatacaggtgagagaccctacgagtgcaccgactgcaagaaggctttttctagaaagagcactctaattaagcaccagagaattcacactggtgagaaaccatacaagtgttcagaatgcgggaaggcatttagcgtgaagagcactcttatcgtgcatcaccggacccacaccggtgagaagccatacgaatgtcgggattgcgggaaagccttttctggaaaatctaccctgatcaaacatcagcgctcccacactggtgataaaaatttatag

SEQ ID NO: 247770 - DNA, 3714 bp, synthetic construct
  misc_feature 1..3714: note = Description of Artificial Sequence: Synthetic coding sequence
  source 1..3714: mol_type = other DNA
atgggcgacatgaaaacccccgacttcgatgacctactcgctgccttcgatattccagacatcgacgctaatgaagcaatccatagcggacctgaggaaaacgaagggcctggcggacctgggaaacccgagcctggagtcggcagcgaaagcgaagatacggccgcagcgagcgccggagatggtcctggggtgccagcccaggcttctgaccacggcctccctccacccgatataagcgtggtgagcgttatcgtcaagaatacggtgtgcccagagcagtctgaggccctagctgggggatcagccggagacggggctcaggccgctggtgtgaccaaagagggccctgtgggcccacatcgcatgcagaacggctttggctcccctgagccctctttaccaggcaccccccatagccccgcaccccctagcggtggcacttggaaagagaaggggatggagggaaaaactcccctggatttgtttgctcatttcggtcctgaaccaggagatcactctgacccactgccaccttcagccccaagtcccacacgggaaggggcactcacccccccaccctttccaagcagcttcgaactggcgcaggaaaatggacccggaatgcagccccctgtgtcttccccacctctgggagcgctgaagcaggaaagctgttcccctcatcatccacaagtcctcgctcagcaaggctcaggaagctcgccgaaggctacagatattcccgcttcagccagccctccaccggtcgcgggagtaccattctttaagcagtcccccggtcaccagtcacctctggcttctcccaaagttccagtgtgtcagccccttaaggaggaagatgacgatgaaggcccagtcgacaaatccagccccggtagtccccaaagcccatcatctggcgctgaggccgctgacgaggactccaacgatagtccagcgtcatcctccagcaggcctttaaaggtaaggattaagactatcaagacatcctgtggcaatatcaccagaactgttacacaggtccctagcgaccctgaccccccagctcccctagctgagggcgcttttctggctgaagccagcctgctgaaattgagcccagcgactccgacatccgaggggcctaaggtcgtgagtgtgcaactaggcgacggcactagactaaaagggacagtgctaccagtggcgaccatccagaacgcttctaccgccatgcttatggccgctagcgttgcacgaaaggctgtagtgctgcccggtggtaccgcaacatcacccaagatgatcgctaaaaatgtcctgggtctagttcctcaggctctgcctaaggctgacggacgcgctggcctgggaacagggggacagaaagtgaatggggcttctgttgttatggtccagccctctaagacggcaactggcccttcaacagggggaggcacggttatcagtagaactcagagttctctcgtggaggccttcaacaagatattgaatagcaagaatctgctacctgcttataggcccaacctgtcccctccagcggaagcgggattggctctccctccaacaggctataggtgtcttgagtgcggggatgcgtttagtctcgagaaaagcttggcccgtcattatgataggagatcaatgagaattgaagtaacttgtaatcactgtgctagacgcctggtgttttttaacaaatgttctttactgctacacgccagggaacacaaagataaggggctggtgatgcagtgtagccacttggtcatgagacctgtggcgctcgaccagatggtcggacagcctgatattacaccgttgctgccggtcgctgtcccccctgtcagcggtccattagccttgcctgccctcgggaagggtgaaggagccattactagctcagccattactaccgtagctgctgaggcgcctgtgttaccactgagcaccgagccacccgcagcccctgctacgtccgcctatacctgctttcgctgccttgagtgtaaagaacagtgccgcgataaggcagggatggctgcacatttccagcagttaggaccaccagcgccaggggcaacaagcaatgtgtgtcctacgtgtcctatgatgcttcccaatagatgtagcttctcagctcaccagcgtatgcacaaaaatcggcctccgcacgtctgccctgagtgcgggggtaattttctacaagcaaacttccagacccatctccgcgaggcatgcctccacgtcagtaggagggttgggtatagatgtccgtcctgttcagttgtcttcggaggtgttaattccatcaagtctcacatacagaccagtcattgtgaggtgtttcacaaatgccccatttgccccatggcctttaagtcggggccaagcgcacatgcccacctgtacagccagcatccaagcttccagacccaacaggccaagttgatctacaagtgcgctatgtgtgacactgtctttacacataaacccttgttatcttcccattttgaccagcacctgttgcctcagagagtctctgttttcaaatgcccaagttgtcctcttctgttcgcccagaaaaggacaatgcttgagcacctcaagaacacacaccagagtggcagacttgaagaaaccgccggaaaaggcgcaggcggtgccctgttaacccctaaaactgagccagaggagctggccgtgagccagggtggagctgcacctgctacagaggagtcctctagcagctcagaagaggaagaggtaccttcctcccctgagccccctagacccgctaagcggccacggcgagaacttgggagtaagggcttgaagggaggcggagggggtccaggcggttggacttgcgggctctgccactcttggttccccgagcgggacgagtacgtggcacatatgaagaaggagcatgggaaaagtgtcaaaaagtttccttgcaggctgtgtgagcgctcattttgctcagcacccagccttcgccgacacgtaagagtgaatcatgagggcatcaagagagtctacccctgtcgttattgcactgagggaaagcgaacattctcctcaagattgatcctcgaaaaacatgtgcaggtaagacatgggcttcagttgggcgctcagtctccagggagaggtactactctggcaagggggtcttcggctagagctcagggaccaggtcgtaagcgacgtcagtcttccgactcatgctctgaagagccagactcgactaccccgccagctaagagcccacgcggaggcccaggctccgggggacacggacctctgaggtataggagctcttctagcactgagcagtccctcatgatggggctgagagtggaggatggagcacagcagtgtttggattgcggcctgtgtttcgcttctcctggctccctcagtcggcataggtttatatctcacaagaaacggaggggcgtcggtaaagcctccgctctggggttaggagatggagaggaggaggcaccacccagtcgcagcgaccctgacggcggtgatagccctctgccagcatcgggtggaccattaacctgcaaggtctgtggtaagagctgcgacagcccactgaacttgaagacgcatttccgcacacatgggatggccttcatccgcgcacggcagggtgcagtaggcgacaactag

SEQ ID NO: 247771 - DNA, 3714 bp, synthetic construct
  misc_feature 1..3714: note = Description of Artificial Sequence: Synthetic coding sequence
  source 1..3714: mol_type = other DNA
atgggcgacatgaagacaccagattttgacgatctgcttgctgcgtttgacattccagacattgacgccaatgaagccattcacagtgggcctgaggagaacgagggacccggagggccaggcaagcccgagccaggtgtgggatcggagtctgaggacacagccgctgccagcgccggagatggaccgggagtgccggcacaagcgagtgatcacggtctcccaccacctgatatctcggtggtctctgtaatcgttaaaaacaccgtttgcccagaacagtccgaagccctggccggtgggtctgctggtgatggagcccaggccgctggagtgactaaggaggggcctgtggggcctcacaggatgcaaaatggattcggatcacccgaaccttctctacctggtactccacacagtcctgctccccctagtgggggaacctggaaggagaaaggcatggaggggaaaactccattagacttgttcgcacattttgggccagaacctggcgaccacagtgatcccctgcccccaagtgccccatcaccaactagagaaggtgctctgactcccccacccttcccctcttctttcgaactggctcaagaaaatggaccaggcatgcaaccaccagtttcttctcctccactgggagccctcaaacaggaatcttgttctcctcatcatccgcaggtcctggctcagcagggcagtggctcaagcccaaaggctacagatatccctgccagtgcatcgcctccacccgtagctggtgttccgttcttcaaacagtccccaggccatcaatcaccactcgcgtccccaaaggtccccgtttgtcaacctctaaaggaagaagacgatgacgagggccctgtggataagtcttcaccaggatccccccaatcccccagctcaggggcagaagccgctgatgaagacagtaatgatagccccgctagcagtagctcaagaccccttaaagttcgcattaagactattaagacctcttgtggaaacattacgagaacagtcactcaggtacctagcgacccagacccacccgctccgctcgccgagggtgccttcctagccgaggcctccttgctgaagctctcacccgctaccccaacttcagaagggcctaaagtcgtgtctgtgcaactgggcgatggaacccgccttaaggggactgtcttacccgttgccaccatacaaaacgcgagcaccgccatgctgatggccgcatccgttgcaaggaaggctgtggtcctgcccggtggaaccgcgacttcgcctaagatgatcgcgaaaaatgttctggggctggtgccgcaagccctacccaaagcagatgggagagctgggctgggcacagggggacagaaggtgaacggtgcttccgttgtgatggtgcagccatctaaaacagcaaccggtccttccacagggggaggaacagtcatctctagaacccaaagcagcttagtcgaagcttttaacaaaatcttgaattcaaagaacctcttgcccgcatatcgcccaaatctgtccccaccagccgaggccggactggctctaccacccactgggtaccggtgcctcgaatgcggcgacgcgttctcattggagaagtcactcgcacgacattatgatcggaggtctatgcgcattgaggttacctgtaatcactgtgccaggcgtctagtgttcttcaataagtgctccctgctgttgcatgcacgtgagcacaaggataaggggctggtaatgcagtgcagccatttggtgatgaggcctgttgctctggatcagatggtggggcagccagacatcacaccgcttctgcctgtggccgtgccccctgtaagcgggccattggccctcccggctcttggtaagggcgaaggcgctataaccagcagcgccatcacgaccgtcgccgctgaggctcctgtgctgcccctctccactgaaccccctgctgcccctgcgactagcgcctacacctgcttcagatgtcttgaatgtaaggaacagtgtagagacaaagcgggaatggctgcccacttccaacagctcggcccaccagctccgggagccacctcaaacgtgtgtcccacgtgcccaatgatgctgcctaataggtgctctttttccgcccaccaacgcatgcataagaaccgaccgcctcatgtatgcccagaatgcgggggtaacttcctccaggcgaatttccaaacacacttgcgtgaagcatgtcttcatgtcagtcgcagggtggggtatcgctgtcccagttgtagcgtcgtttttggcggagtcaactcaattaagagtcatattcagaccagccattgtgaagtgttccataaatgcccgatatgtcccatggccttcaaatcaggaccgtctgcacacgcccacttatattctcagcatcctagcttccagacacagcaagccaagctgatctataagtgcgccatgtgcgataccgtcttcacccacaagcctctgctcagctcccactttgatcagcatttgcttccacaacgtgtttccgtattcaaatgtccatcgtgccccttgctctttgcccaaaaacggacaatgctcgagcaccttaagaatactcaccagtcaggcaggcttgaggaaaccgcgggaaagggtgccggaggggctctgcttacccctaagacggagccagaggaactcgctgtttcgcaaggaggggcagccccagctacagaggaaagcagctcctctagcgaggaagaggaggtcccaagcagtcccgagcctcctcggccagccaagcggcctagaagggagctgggctcaaaagggctgaagggtggagggggaggaccagggggatggacctgcggcctgtgtcatagttggtttcctgaaagagatgagtatgtggctcacatgaagaaagagcacggtaagtctgttaagaagtttccctgtaggctttgcgagcgaagcttttgctcagccccttccctgagaagacacgtgcgtgtgaaccatgaggggatcaaacgcgtgtatccttgcagatattgtacagagggcaagagaactttctccagccgcctgatcctggaaaagcatgtacaggtgcgtcacggacttcagctgggcgcacaatctcctggacggggaacaacactggctcgagggagctcagctcgggcacagggtcccggtaggaagagacgccagtcgtcagatagttgtagcgaggagcccgacagcaccactcctcccgctaagagccctcgtgggggtccgggttctggtggccatggacctctacgctatagatcctcaagcagcaccgagcagtcacttatgatggggctacgggtggaagatggagcgcagcagtgtctcgactgcggcttgtgcttcgcttctcctggctcactctctcggcaccgctttatatcgcacaagaagcgaagaggtgtgggaaaagcgtcagcactgggtttgggggatggcgaggaggaagccccaccgagtcgatccgacccagatggcggagactctcctctacccgcaagtggaggacccctgacctgtaaagtatgtggaaagagttgtgacagccctctgaaccttaagactcacttcaggacccatggcatggcatttattcgcgcacgacagggcgctgtgggtgataattag

SEQ ID NO: 247772 - DNA, 3312 bp, synthetic construct
  misc_feature 1..3312: note = Description of Artificial Sequence: Synthetic coding sequence
  source 1..3312: mol_type = other DNA
atgggtgacatgaagactccagatttcgacgaccttctggcagcatttgatatccccgatattgatgcaaatgaagccatacattctggcccagaagaaaacgagggtcctggtgggcctggcaagcccgagcccggtgtcggctccgagtccgaggacaccgcagctgccagcgccggagacggcccaggggtccctgcgcaggccagcgatcacgggctcccaccgcctgatatttccgtggtctccgtgatagtgaaaaataccgtgtgtccagaacagagcgaggccttggcaggtgggtctgctggagatggggctcaggccgcaggcgtcacaaaggagggacccgtggggccacaccggatgcagaacggcttcggcagtccagagccgtctcttccaggcacgcctcattcaccagccccacctagcggcggaacttggaaggaaaaggggatggaggggaaaacacctcttgatctctttgcgcacttcggaccagagcctggggaccacagcgacccacttccgccttcggccccttccccaaccagggaaggggcactgacccctcctccgtttccgagctcctttgagttggcacaggagaatgggcctggcatgcagccccctgtctcctcaccacccctgggcgctctgaaacaggagagctgctcaccacatcaccctcaagtgctggcccagcagggatccggctcaagtccaaaagccaccgacattccagctagcgcatccccaccacctgtcgctggtgttccatttttcaaacaaagccccggtcaccagtccccgttagcttccccgaaagtccctgtctgccagcccttgaaggaggaggacgacgatgagggaccagttgataaaagtagtcccggatctccacaaagccccagctcgggcgcagaggcagcagatgaagactccaacgactcaccagctagctctagctccaggcccctcaaggttaggataaaaaccataaaaaccagctgtggcaatattacaagaacagtgacccaggttccttctgaccccgacccgccagctcctctggccgagggtgctttccttgcggaagcatctttactgaaactgtcccccgctacccctacctcagaaggccctaaagtggtgtcagtccaactgggggatgggactcggcttaagggcactgtgctgcccgtggccaccattcaaaacgcttctactgctatgttaatggctgccagcgtcgctcggaaggcagtggtgttaccaggcggtacagccacatcacctaagatgatcgcaaaaaacgtgctgggactggttccacaggcattgcctaaggcagatggacgggcagggctcggcacaggaggccagaaagtaaatggagccagcgttgtcatggtccagccaagtaagaccgccacaggtccatccaccggaggtggcaccgtgatctcacgtactcagagtagcctagtcgaagctttcaacaagatcctgaattctaaaaacctacttccagcttaccggcctaacctgagcccgccagccgaggctgggcttgcattacccccaacagggtaccggtgcctggaatgtggggatgccttctccctggaaaaatccctggcccgtcactatgaccggaggtcaatgcgtattgaggtgacatgcaaccattgcgctcgcaggttggtcttttttaataagtgtagcctactgctccacgcaagggaacataaggacaagggactggtcatgcaatgctctcaccttgtcatgcgacccgtggcgctggaccagatggtaggccagcctgacattacaccactcctgcctgtggccgtgccacccgtttcaggcccactggcactgcctgctctaggcaaaggcgagggcgcaatcacgagctccgccatcactacggttgctgctgaggcccctgtgctgcctttatcgactgagccccctgcagccccagccacttcggcttacacttgctttcgttgtctcgaatgcaaggagcagtgtagggacaaggccggaatggccgcacattttcaacagttgggtccccctgcccctggggcaacgtccaacgtttgtccgacctgtccaatgatgctgcctaacaggtgctctttcagcgcacaccaaaggatgcataaaaatagacctccccatgtgtgccccgagtgcgggggtaattttctgcaggccaattttcagactcatctgcgtgaagcctgcctacacgttagtagacgggttggctaccgttgcccctcatgcagtgtggtattcgggggtgtaaacagcatcaaatcccacatacaaacctcgcattgtgaagtgtttcataagtgcccgatctgtccgatggccttcaaaagcggaccttctgcacatgcgcacctgtattcgcagcatccttctttccaaacccagcaggccaaactcatttacaaatgcgccatgtgcgacaccgtttttacccataaaccacttttaagctcccacttcgatcagcatctcctgccacagcgtgtgtctgtttttaaatgcccgtcctgccccctgctctttgctcaaaagcggactatgttggagcaccttaaaaacactcatcagtcaggccgacttgaggagaccgcgggtaagggggcaggaggggcactgttgaccccaaagaccgaaccggaggagctggccgtttcacaaggcggagctgcacctgctacagaagaatcaagcagcagctccgaggaagaagaggtaccgtccagtcccgaaccccctcggcctgcaaaaaggccaagacgcgagcttggcagcaaagggctgaagggcggagggggtggccctggcggatggacgtgcggactttgtcactcttggttcccagagcgcgatgagtacgtcgcgcatatgaagaaggaacatggaaagagtgtcaagaagttcccttgccggctgtgtgagagatcgttctgttccgctccatcactaaggcgtcacgttcgggtaaatcatgagggcatcaaacgggtctatccttgccgcagtaaaggtccaggactgcgagcagtgcccttacttccctcttgtcctctaccattccaggtgttgcaccggggaaagacccatctgcagcagccaccagacccacgcgaaacctgtcccggacccgctagattggcagcctgggggcctgtgccctggcccggagaccatcttggctctggattccaatgtcaaagcccaggcgctagatctgagacgcctcccgtgttttag

SEQ ID NO: 247773 - DNA, 2121 bp, synthetic construct
  misc_feature 1..2121: note = Description of Artificial Sequence: Synthetic coding sequence
  source 1..2121: mol_type = other DNA
tgaactgtgttgccagtagccaccattcagaatgcttccacagccatgttgatggcggcttccgtggcgagaaaggctgtcgtcctaccaggcggaaccgcaacatctcccaagatgatcgccaaaaacgtacttggcctagttcctcaagcattacccaaagccgacgggagagccggactcggcacaggtgggcagaaagtaaacggcgcttccgtggtcatggttcaacctagtaagaccgcaaccggacctagtaccggcggtggcacagtaatcagcagaacccagtcctccctcgtcgaagccttcaacaaaatccttaacagcaagaatcttctgcccgcatatcgacccaacttaagtccacccgctgaagccggacttgcactaccacccacagggtacagatgcctggagtgcggcgacgccttcagtcttgagaagtctctggctcggcattacgatcgcaggtcaatgcgcattgaagtgacctgcaatcactgtgccaggcgacttgtatttttcaacaaatgctccctgttgttgcatgcgagggagcacaaggacaagggattagtcatgcagtgcagccacttagtcatgcgccctgtggctctcgatcaaatggtgggccagccagacattacgcccttgcttcctgttgccgtaccacccgtatccggaccattagcactaccggcactcggaaagggcgagggcgctatcacaagctctgccatcactacagtagcagcggaagcccctgtgctgcctttgtcaacagagccaccggctgcccctgcaacatccgcctacacatgcttccggtgccttgagtgtaaagagcagtgcagagataaggccggaatggcagctcattttcaacagttgggcccacccgcaccgggagcaacttcaaacgtgtgccccacgtgtcccatgatgctgcccaatagatgctctttttccgctcatcagcggatgcacaagaaccgaccgccacacgtatgccccgagtgcggaggcaactttctgcaggcgaactttcaaactcatctgcgcgaggcctgtttacatgtgtccagaagggtaggctacaggtgcccatcgtgtagtgtcgtttttggaggcgttaattccattaaatctcatattcaaaccagccattgtgaggtctttcacaaatgtcccatttgcccaatggcttttaaaagcgggccttccgcacacgcccacctgtacagccagcatcctagctttcaaacccaacaagcgaagctgatttacaagtgcgcaatgtgtgatacagttttcacccacaaacccttgttgtccagccattttgatcagcacctattaccgcagcgagtttcagttttcaaatgtccctcgtgcccactgctatttgcacagaaaaggacaatgctggagcacctcaagaacactcatcagtctggtagacttgaggagacagccggtaagggcgctgggggagccctgttaacacctaagacggaacccgaggaactggccgtctctcagggaggtgctgcgccagctaccgaggaatcttcttccagttctgaggaggaggaagtcccatcctcgcccgaacccccaaggcccgcaaaaaggccgagaagagaactgggcagtaaggggttaaaaggtggaggcggaggacccggtggatggacatgcggcctgtgtcattcctggttcccagagcgcgacgagtacgttgcacatatgaaaaaggaacacggaaaatctgtgaagaagttcccttgccgcctgtgtgagcgctcattctgctccgcacccagtctgcgcaggcacgtgagagtcaaccacgagggaattaagcgcgtatatccctgtcgaagtaagggcccagggttgagagccgtgccccttctccccagttgcccactgccattccaggttcttcatagggggaagactcaccttcagcagccgccagatcccagagaaacctgtcccggtccagcgagacttgcggcttgggggccagtaccctggccaggcgatcatctcggtagcgggttccagtgccagagccccggagccaggagcgaaacccctcctgtgttttag

SEQ ID NO: 247774 - DNA, 450 bp, synthetic construct
  misc_feature 1..450: note = Description of Artificial Sequence: Synthetic coding sequence
  source 1..450: mol_type = other DNA
atgccttgttgctctcatcgcaggtgtcgggaggatccaggaacctccgagtcacaggagatggaagagtgggctctgcttgatatcagtcagcgaaagttatataaggaggttatgttggaaacctttcgtaatctcacatctgtgggaaagtcatggaaggaccagaacatagagtacgaatatcaaaatcccaggagaaactttcgttcactcattgagaaaaaggtcaacgaaatcaaggacgatagtcattgcggcgagactttcacacaggtgcccgacgacagattaaacttccaagaaaagaaagcgtctcccgaaatcaaaagctgtgactccttcgtgtgcggtgaggtggggctgggcaactcctcgtttaacatgaatattaggggagacatcgggcacaaggcctatgagtaccaggaatatggcccaaaaccatag

SEQ ID NO: 247775 - DNA, 1701 bp, synthetic construct
  misc_feature 1..1701: note = Description of Artificial Sequence: Synthetic coding sequence
  source 1..1701: mol_type = other DNA
atgccctgctgcagccaccggagatgcagagaagatcccggaacatccgagagccaggagatggaccctgtggcctttgatgacgtggccgtaaatttcacccaagaagaatgggctttgctggacataagccagcggaagctgtacaaggaggtaatgttggagaccttccggaatcttaccagcgtcggtaagagctggaaagaccagaatattgagtacgaataccagaacccgaggcggaattttagaagccttattgagaagaaagtgaatgaaattaaagatgattctcactgtggcgagacgtttactcaggtacctgatgaccggctcaattttcaggagaaaaaggcctctccagagattaagtcctgcgatagctttgtgtgcggcgaagtcggccttggtaattcttcctttaatatgaatattcgcggagatataggccacaaagcatacgaataccaggaatatggtccaaagccctgcaaatgtcaacagcccaaaaaggcatttcggtaccacccaagctttcgtacaccacaacgtgatcatacaggggaaaagccatatgcctgcaaagaatgcggcaaaacatttatttcgcatagttcaattcagcggcatgtggtgatgcattcgggggacgggccttataaatgtaaattttgtggtaaagctttccactgcctgagtctgtacctgatccatgagcgcatccacaccggtgaaaagccttacgagtgcaaacagtgtggcaaaagcttcagctactccgcaaccctgcgtatccacgaaagaacccatacaggcgaaaagccgtacgaatgtcagcagtgcgggaaggctttccattctccaaggtgctatcggcgtcacgagcgaatccacacgggagaaaaagcgtatcaatgcaaggagtgcggaaaggcattcacctgccctcaatacgtgaggattcacgagcgcactcatagtaggaaaaagccctacgagtgtacccagtgtggaaaagccctctcgtctcttacatcctttcagacacatatccgcatgcactccggagagagaccgtacgagtgcaaaatctgtgggaaaggcttttgctccgctaactccttccaacgacacgagaaaacgcactcgggcgagaagccctacaagtgcaaacaatgcggcaaagcgtttattcatagctctagcttaaggtatcatgaaaggatccatacaggtgagaagccttatgagtgcaagcagtgtggaaaagccttccgaagcagctcacatctgcagctccacgggagaacccatacaggcgaaaaaccctacgaatgtcaggaatgtggtaaggccttcaggagtatgaagaacctgcagagccacgaacggacacagacacacgtgcgcattcatagcggcgagaggccctacaagtgcaagctatgcgggaaaggattttactgtcccaaaagtctacagcgacatgagaagacccacactggtgagaagctgtatgagtgcaaacagtgcggggaagcatttagttcttcgagcagctttcgatatcacgagaggactcacacgggtgagaagccatataagtgcaaacaatgtggaaaagcatttcgggctgccagtgtcctgaggatgcacggcaggactcacccagaggataaaccttatgagtgcaaacaatag

SEQ ID NO: 247776 - DNA, 2061 bp, synthetic construct
  misc_feature 1..2061: note = Description of Artificial Sequence: Synthetic coding sequence
  source 1..2061: mol_type = other DNA
atggaagtagtcacattcggcgatgttgctgttcacttttctagagaggagtggcagtgcctggatcccggacagagggctctctatagagaggtaatgctggagaaccactcctctgtggccggtttagccggtttcctcgtatttaaacctgagctcatttcgaggcttgagcagggagaggaaccatgggtcctggatctgcagggtgcagagggcactgaggcccctcggacatcaaagacagacagtacaatccgcactgaaaacgagcaggcatgcgaggacatggatatcctgaagagtgagtcctacggcactgtggttaggatcagtccccaggatttcccacagaacccgggatttggcgacgtgagtgacagcgaagtgtggctagacagtcacttaggctcaccgggtttgaaggtcactggattcacattccagaataactgcctcaatgaggaaaccgtggtcccaaagaccttcaccaaagacgctccccagggatgcaaggagctggggtcctctggcctggattgccagccactcgagtcccagggcgagagtgccgaaggtatgagccaacggtgtgaggaatgtggtaaaggaataagagcaactagcgacatcgccctgcattgggaaatcaatacccaaaagatctccagatgtcaggaatgccagaaaaagctgtctgactgcctccaaggcaagcataccaataattgtcatggggagaaaccttacgagtgtgctgagtgtggcaaagtgtttaggctatgctcgcagctgaatcagcaccagagaattcatactggcgaaaaaccttttaagtgcacagaatgcggaaaggcatttcgcctgtcctccaagctgattcagcatcaaaggattcacaccggcgaaaagccctaccgttgtgaagaatgcggcaaggccttcggccagtctagctcattgatccaccatcagaggatccatactggggaacgaccctacggctgtcgcgaatgtggtaaggcattctcacaacaatcacagctggtgcgccatcagagaacgcacactggcgagcgaccatatccatgcaaagagtgtggtaaggcattttcccagtccagtaccttggctcagcaccagcggatgcataccggcgaaaaggcacaaatcttaaaagcaagtgattcaccatcactggtggcccaccagaggatccacgccgtggaaaaaccttttaagtgcgacgagtgtggaaaggcatttcgctggatttcgagattgagccagcatcagctgattcacacaggtgaaaagccttataagtgcaataagtgtaccaaggcctttggatgctcttcgaggttgattagacaccagcggactcacactggcgagaagccctttaagtgcgacgaatgtggtaagggatttgtccagggaagccatttaattcagcatcagcgtatccataccggtgaaaagccttacgtttgtaacgattgcgggaaggccttctcgcagtctagttctctcatctatcaccagcggatccataagggagaaaagccttacgagtgcctacagtgtgggaaagccttctcgatgtctacacagctcacgattcaccagcgcgtccacacaggggagagaccttataagtgtaatgagtgtggcaaggccttttcacagaactccaccctcttccaacaccaaatcatccatgcaggggtgaaaccttacgagtgcagcgagtgtggcaaagctttttcacgcagtagctatttaatcgaacatcagaggatccatacgcgggcacagtggttttacgaatacggtaatgctctcgaagggtccactttcgttagccggaagaaggtgaacactatcaagaagctccatcagtgtgaggactgcgagaaaatcttccgctggcgaagccatctcatcattcatcaaaggatacatacaggtgaaaagccttataagtgtaatgattgtggtaaagcgtttaatcgtagttccagattaactcaacatcagaagatccatatgggatag

SEQ ID NO: 247777 - DNA, 2094 bp, synthetic construct
  misc_feature 1..2094: note = Description of Artificial Sequence: Synthetic coding sequence
  source 1..2094: mol_type = other DNA
atgggttttctcgggtgctggtgcgtatccttccaggaggtggtgaccttcggcgacgtggcagtgcactttagccgcgaggaatggcagtgcctcgatccgggacagcgggctttgtatagggaagtcatgcttgagaaccattcatcagtggctggcctcgccggtttcctggtgtttaaacccgagctcatttcacggctcgagcaaggggaggaaccttgggtgctggatctgcagggtgcggagggaacggaagcacccagaacatcgaagaccgactccacaataaggactgagaatgaacaggcctgtgaagacatggatatactcaaaagcgaaagttacgggaccgtggtcaggattagtccacaggactttccacaaaatccaggctttggcgacgtgagcgactccgaggtttggctggactctcaccttgggagccctggcttgaaggtcaccgggttcacctttcagaataactgcctgaacgaagagactgtggtgcccaaaacattcactaaggatgccccacagggatgtaaagagctcggcagctccggcctggattgccagcccctcgaatctcagggcgagtctgccgaggggatgtcacagagatgcgaagagtgtgggaagggcattcgagccaccagcgatattgcccttcactgggaaatcaatacgcagaagattagtcgttgccaggaatgtcagaaaaagctgagcgattgcctccagggcaaacacaccaataactgtcatggtgagaagccgtatgagtgtgccgagtgcggaaaggtgttcagactgtgtagccagctcaaccagcatcagcgcattcacactggagagaagccatttaagtgcacagagtgcggtaaggctttccggttgtcttctaagctaatacaacaccagcgcatacatactggagagaaaccctaccggtgcgaggagtgcggaaaagctttcgggcagtcatcctccctgatccaccaccagcggatccacaccggcgaacggccttatggatgccgagaatgtggaaaggcctttagtcagcagtcacagctcgtgcgccatcaaaggacccacacaggagagcggccatatccctgtaaagagtgcggaaaagctttttctcagtccagtacactggcccagcatcagcgaatgcacactggggaaaaggcgcagatactcaaggctagcgattctccatcactggtggcacatcagcggatccatgcagtagagaaaccgttcaaatgcgatgagtgcggaaaggcatttcgctggatatcccggttgtcccaacaccagttaatccacacaggcgaaaagccttacaagtgcaacaaatgcacgaaggctttcggctgttccagcagactgatccgacaccaaagaacccataccggtgagaagcccttcaaatgcgatgagtgcggcaagggcttcgtgcagggctcccacttgatccagcatcagcgaatccataccggggaaaaaccttacgtgtgtaacgattgcggaaaggccttctctcaatcctcctcactgatctatcaccagaggatccacaagggagaaaaaccctacgagtgtctgcaatgtggaaaagccttcagcatgtccacacaactgacaattcaccagcgggtgcacactggcgagcggccatacaagtgtaacgaatgtggcaaagctttcagccagaattctacactcttccagcaccagataatccacgctggtgtgaagccttatgaatgttctgaatgcgggaaggcatttagccgatcatcataccttatcgaacaccagaggatccatacgcgagctcagtggttttacgaatacggcaatgctttagaaggctccactttcgtgtcccgcaaaaaggtcaataccatcaaaaagctccatcagtgcgaagactgcgagaaaatcttccgctggcggagtcacctgatcattcaccagcgcattcacactggtgagaagccatacaagtgtaatgactgcgggaaggcctttaaccggtcatctcgtctgacccagcaccagaaaatccacatgggatag

SEQ ID NO: 247778 - DNA, 447 bp, synthetic construct
  misc_feature 1..447: note = Description of Artificial Sequence: Synthetic coding sequence
  source 1..447: mol_type = other DNA
atggaagtggtgacctttggagatgttgccgtccacttttcccgtgaggagtggcagtgcctggatcccggacagagagctctgtaccgcgaggttatgttggaaaatcacagcagcgtcgcgggtctcgctggttttctggtgttcaaaccagaactcatttcccgcctagagcagggagaggaaccatgggttctggacctccagggcgctgaaggcacggaggcacctagaactagcaaaaccggattcctgggacgaccgaccatggggcaggaaccacggcacccgcacgcccctccagccaccccagttcctgggctgcccaagcattgtagtcagcggctaaccttaccaccgccaggtctgtcctcctcgccactgggccacttcttagtgcacgatcaggatagaagacgagggacaagcgcaatttggatggtgtag

SEQ ID NO: 247779 - DNA, 2061 bp, synthetic construct
  misc_feature 1..2061: note = Description of Artificial Sequence: Synthetic coding sequence
  source 1..2061: mol_type = other DNA
atggaggtggtgaccttcggagatgtcgcagtacactttagtcgggaggaatggcagtgtcttgatccaggccagagggcactgtaccgggaagtcatgctggaaaaccacagctcagtcgccggactggctgggtttctcgtttttaaaccagagttaataagtcgattggaacaaggcgaggagccctgggttttagacttgcagggcgctgaggggactgaggccccaaggacttctaaaacagactccactattcgcacagagaacgaacaggcttgcgaggacatggatattctcaagtccgaatcatacggcactgttgttcgaatatctccacaagactttccccagaatcccggatttggagatgtgagcgatagcgaagtctggctggacagtcacttgggttctcccggactcaaggtgacaggctttacttttcagaataactgcctcaatgaggagacagtggtgcctaaaaccttcaccaaggatgcgccacagggttgtaaggagctcggtagcagtggattggattgtcagcccctggagtcccagggagagagcgccgaaggaatgagccagagatgtgaggaatgtggaaaagggataagagcgacctccgatatcgccctgcattgggaaatcaatacccagaagatttccagatgccaagaatgccagaagaagctgtctgactgcttacagggtaaacacaccaacaactgccacggtgaaaagccttacgagtgcgcagagtgtggaaaggtttttagactgtgctcacaactgaatcagcatcaaagaatacacacaggcgagaagcccttcaagtgtacggaatgcggcaaggccttcagactttcaagcaagcttatccaacatcaaagaattcacactggtgaaaagccataccggtgtgaagaatgtggcaaagcattcggacagagctcatccctgatccaccaccagaggattcacaccggcgagcgcccatacggatgcagggaatgcggaaaggccttcagccagcagtctcaactagtgaggcatcagcgaacacatacaggggaacgaccctatccgtgtaaagagtgtggcaaagccttcagccaaagcagcacattggcccaacatcaaagaatgcacaccggggaaaaggctcagatactcaaagcatcagattcaccttccctggtggcacaccaacgaattcacgccgtggagaagccttttaagtgcgacgagtgtgggaaagcttttagatggatctctcgtctctctcagcaccagcttatccatacaggcgaaaagccctataagtgtaataagtgcacaaaagcctttgggtgttcatccaggcttattaggcatcagcggactcatactggagaaaagccttttaagtgcgacgagtgtggcaagggtttcgtccaggggagtcacttaatccagcatcagagaattcatacaggggaaaagccatatgtgtgtaacgattgtggcaaagcgttcagccagtcaagtagcttgatatatcaccagcgcatccataaaggagagaagccgtatgaatgcctccagtgcggcaaagcgttctccatgagcacccagttgacgattcaccagagagtccacacaggggagcgcccttataagtgtaatgagtgtggtaaagcctttagccagaacagcactctttttcagcaccagattattcatgcaggggtcaagccttacgaatgcagcgagtgtgggaaggctttctcaagatctagctacctgattgagcaccagcggatccacacacgggcacagtggttttatgaatatggaaacgcattggaggggtcaaccttcgtgtctaggaagaaggtgaatactatcaaaaagttgcatcagtgtgaagactgtgaaaagatctttaggtggcgaagtcatttgatcatccaccagcgcatccacaccggcgaaaagccatataagtgcaacgattgcggcaaggcattcaaccggtccagccgtctcacacaacatcaaaagatccacatggggtag

SEQ ID NO: 247780 - DNA, 1773 bp, synthetic construct
  misc_feature 1..1773: note = Description of Artificial Sequence: Synthetic coding sequence
  source 1..1773: mol_type = other DNA
atggatattctaaaatcagagtcctacggaacagtcgttcgcatttcaccccaagactttcctcaaaatccaggattcggcgacgtctcggatagcgaagtgtggctggactcccacctgggatcaccgggtctgaaggtgaccggatttacatttcagaacaactgcctgaacgaggaaactgtcgtgcccaaaacctttactaaagatgcaccgcaaggttgcaaggaactcggaagctctggcctggattgccaacctctggaaagtcagggcgagtccgccgaaggtatgagccagcggtgtgaggaatgtggcaaaggtatacgagccacctccgatattgcgctccattgggagataaatacccagaagatcagccggtgtcaggagtgccagaaaaagctgagtgattgcctgcagggcaaacacactaacaattgtcacggcgagaaaccatacgagtgtgccgagtgcgggaaggtctttaggctctgctcccagctgaaccagcatcaaagaattcacacgggggaaaaaccattcaagtgcacggagtgtggaaaagccttcagattatcttccaaattgattcagcatcagaggatacataccggagaaaagccgtacagatgtgaagaatgcggcaaggctttcggccagtcctccagtctcatccatcatcagcgcatccatactggcgaaagaccctatggatgcagggaatgtggaaaggccttttcgcagcagtctcagttggtaagacatcaaagaacacatactggcgaacgcccttatccttgcaaggaatgcggcaaggctttcagtcagagcagtactctggcacagcaccagaggatgcacactggcgagaaggcccagattctgaaagcctcagatagtcccagcctcgtggcgcatcagcgaattcacgctgtagaaaaaccatttaaatgcgatgagtgcggcaaggcgttcagatggatctctcgcctgtcccaacaccagctcatccacactggagaaaagccgtacaaatgtaacaaatgcactaaggccttcggctgctcctctcggctaatacggcaccagcgaacacataccggcgaaaagccattcaaatgtgacgaatgcgggaaaggttttgtgcagggttcccatctgattcagcatcagaggatacacaccggagaaaagccctatgtgtgcaacgattgtgggaaggcctttagtcagagctcctcacttatctaccaccaacgcatacacaaaggtgagaagccctatgagtgccttcaatgtggaaaggccttctccatgtccacacagttaaccatccaccaacgggtccacaccggtgagaggccttataagtgtaacgaatgcggaaaggccttttctcaaaacagtacactgttccagcaccagatcatccacgcgggagtgaagccctatgagtgctctgagtgcgggaaagctttctccaggtcctcctatcttatcgagcaccagaggattcacacgagagcgcaatggttttacgagtacgggaacgccttagaaggcagcacatttgtcagcagaaaaaaagtgaacacaatcaagaagctgcaccagtgtgaggattgcgagaagattttcaggtggagatcacacttaattatccaccagaggattcacactggagagaagccatacaaatgcaacgactgcggcaaggcatttaatagatcgtctcggctgactcagcaccagaaaatccacatgggctag

SEQ ID NO: 247781 - DNA, 1470 bp, synthetic construct
  misc_feature 1..1470: note = Description of Artificial Sequence: Synthetic coding sequence
  source 1..1470: mol_type = other DNA
atgaaggagctagaccctaaaaacgacatttcggaagacaagttgagcgttgtcggggaggccacagggggaccaacccggaatggggctcgcggtcctggctcagagggggtgtgggaaccaggctcctggccagaacgccctaggggagacgcaggagctgagtgggagccactggggatcccccaggggaacaagctgctcggcggttccgtgcctgcgtgtcatgaactgaaagcattcgcaaatcagggctgcgtattggtgcctccacggctggatgatcctaccgaaaagggtgcatgtcctcccgttcgaaggggcaaaaatttctcctccaccagtgacttgagcaaacccccaatgccgtgtgaggagaaaaagacctatgattgcagtgaatgtggcaaagcctttagtcggagctctagcctgatcaagcaccagagaattcacactggggagaagcccttcgaatgcgatacgtgcggaaagcatttcatcgagcgatcttccctgactattcatcagcgcgttcataccggagaaaagccctacgcctgtggcgattgcgggaaggcattctcccagcgaatgaacctgactgtgcaccagcgaactcacacaggagagaaaccgtatgtttgtgacgtgtgcggaaaggcttttcgcaaaactagtagcctgacccagcatgagcgaatacacacaggcgagaaaccctacgcctgcggagactgcggaaaggctttcagtcaaaatatgcatcttattgtgcaccagagaacacacaccggcgaaaaaccttacgtttgccctgaatgcgggagagcgtttagccagaacatgcatctaaccgaacatcaacgtacacatactggagagaagccctacgcttgtaaggagtgcggcaaagctttcaataaatccagctccttgacactgcatcaacggaatcatacgggggaaaaaccctacgtgtgtggcgaatgtggaaaggccttttcccagagcagctatctgatccagcaccagaggttccatattggagtgaagcccttcgaatgttctgaatgcggcaaggccttctcaaagaatagttccctcacacagcaccagcggatccataccggcgagaagccttacgagtgttacatctgcaagaagcacttcactggtcgcagttctctgatagttcatcaaatcgtgcatacaggcgagaagccatatgtctgtggcgagtgtggaaaagcttttagtcagtcggcgtacctgatcgaacaccagcgaatccacacgggggagaagccctatcggtgtggacagtgtggaaagtcattcattaagaactcgtctctaacggtccaccagaggatccacacgggagagaaaccctataggtgtggtgagtgcggcaaaaccttctcaaggaataccaacttgaccaggcatctgagaatacatacgtag

SEQ ID NO: 247782 - DNA, 2286 bp, synthetic construct
  misc_feature 1..2286: note = Description of Artificial Sequence: Synthetic coding sequence
  source 1..2286: mol_type = other DNA
atggattcgggaggaggtagtctgggcctacacacccctgatagccggatggcccacacaatgataatgcaggactttgtagcgggaatggctgggactgcccacatagatggcgaccatatcgtcgtatcagtgcccgaggcggtccttgtgagtgatgttgtgacggacgacggcattacactggaccatggcctagcagccgaagttgtgcacggcccagacattatcacagaaactgacgttgttacagagggcgtaatcgtgcccgaggccgtcctcgaggctgacgttgctatcgaggaggatctagaggaggacgacggggatcacatcctaactagcgagctcattaccgaaactgtccgggtgcctgaacaggtgtttgtcgccgacctcgtgacaggaccaaatggtcacttagaacatgtagtgcaagactgtgtatctggcgttgattccccaacaatggtgtcagaggaggtcctcgttaccaatagcgacacggagacagttatccaggctgccggaggggtgccaggaagcaccgtgacgattaaaaccgaagacgacgatgacgacgacgttaaaagtacatctgaggattacctcatgatcagtctggacgatgtcggagaaaaactggaacatatgggcaacaccccactgaagatcggttccgatggaagccaggaagacgccaaggaagacgggtttggcagtgaagtgattaaagtgtatatctttaaagctgaagccgaggacgacgtggaaatcggcggtaccgaaatcgtgaccgaatccgaatatacctcaggacacagcgtcgcgggtgtcctggatcagagcagaatgcagagggagaagatggtgtatatggcagtgaaagatagtagccaagaggaggacgatatccgcgatgaacggcgtgtgtcaaggaggtacgaggactgtcaggctagcgggaatacactggactctgctttagaaagcagatcaagtacagctgcccagtacctgcagatttgcgatgggatcaataccaacaaggtccttaagcagaaagctaaaaaacgaaggcgaggagaaaccaggcaatggcagaccgcagtcatcatcggtcctgatggccagccactgactgtctatccctgtcatatatgtactaagaagttcaaatcacgaggttttctgaaacggcacatgaagaaccatccggaccatctgatgcggaagaagtaccagtgcaccgactgcgatttcacaaccaataagaaggtttccttccataatcatctggaatctcataagctaataaacaaggtggataagactcacgagtttaccgaatacactcgcagatatcgcgaagcatcccccttaagttctaataagttaatcttgcgggacaaagaaccgaagatgcataagtgtaagtactgtgattatgaaaccgctgaacagggattgttgaatcgacacctgctggccgtgcatagcaaaaactttccacatgtgtgtgtcgaatgtgggaaggggtttagacaccctagtgagctgaagaaacacatgagaacacatacgggggaaaagccctatcaatgccaatattgcattttcaggtgcgccgaccagagcaacctgaaaacgcatatcaaatcgaagcacggaaacaatctaccgtataagtgtgaacactgccctcaggcgtttggagacgagcgagagttgcagaggcacctcgatctgtttcaaggccacaagactcaccaatgccctcattgcgaccacaagtccaccaattcttctgacctgaaacgtcacattatttcagtgcatactaaggactttccccacaagtgcgaagtgtgtgacaaaggctttcaccggccatcagagttaaaaaagcattccgacatccataaggggaggaaaatccaccagtgcagacactgtgacttcaagacaagtgaccccttcatcctgtctggacacattctctctgtacacaccaaggatcagcccttaaaatgcaagcgttgtaagagaggatttcgccagcagaacgagttgaaaaagcatatgaagacccatactggccgtaagatctaccagtgcgagtactgtgagtactccactactgacgcctctgggttcaaaaggcacgtcataagtatacacacaaaagactacccccaccgctgtgaattttgcaagaaaggttttcggcgacccagcgagaagaaccaacacattatgagacaccataaagaggctctgatgtag

SEQ ID NO: 247783 - DNA, 2286 bp, synthetic construct
  misc_feature 1..2286: note = Description of Artificial Sequence: Synthetic coding sequence
  source 1..2286: mol_type = other DNA
atggacagtgggggaggatcactgggcctccatacgccagacagtagaatggcgcatacaatgataatgcaagattttgtagccggaatggccggtaccgcacacatagacggggatcatatcgtcgtttccgtacctgaggctgtgttggtgagcgatgtggttacagatgatggcatcacactagatcacgggttggccgcagaggtcgtgcacggtcctgacatcatcaccgaaactgatgtggtgactgaaggcgtaattgtacctgaggctgtcctcgaagccgacgtggccatcgaggaggacctcgaggaggatgatggcgaccatatactgaccagtgaacttatcaccgagacggtgagagtgcctgagcaggtgttcgtcgctgaccttgtgaccggccctaatggccacctcgagcatgttgttcaagattgtgttagcggggtggactctcctactatggtgtccgaggaagtgctcgtaactaattctgataccgagacagtgatccaagccgcagggggagtgccgggatctactgtgaccatcaaaaccgaagatgacgacgacgatgatgtaaaatctacatctgaagactatcttatgatctctctggatgatgtgggagagaagctggaacacatgggcaatactcccctcaagatcggatcggatggaagccaagaggatgctaaggaagacggctttggatctgaggttattaaggtgtatatcttcaaggccgaggccgaagacgatgtcgaaataggcggaactgagattgtgacagagagcgaatacacttcaggtcactcagtcgcaggagtcctagatcagtcccggatgcagcgagagaagatggtctatatggccgtgaaagactcttcacaggaagaagacgatattcgggatgaacgacgtgtgtccagacgatatgaggactgccaagccagcggaaatacactggactccgcattagagagcaggagctcgactgccgcacagtatctccagatttgcgacggcattaacactaataaagtccttaaacaaaaggccaagaagcggagaagaggagaaacaaggcagtggcagacagccgtgattatcggccctgacggacaaccgctgaccgtgtacccttgccatatttgcactaagaagtttaagtcccgcggtttcctgaagcgacacatgaagaaccaccccgaccacctgatgcgcaagaagtatcagtgcacagattgtgatttcacaacaaacaaaaaagttagctttcataatcacctcgaaagccacaagctaattaataaggtcgacaagacccacgagtttactgagtatactaggcggtatagggaagccagtccactgtccagcaacaaacttatcctacgtgataaggagcctaaaatgcacaagtgcaagtattgcgattatgaaaccgcggagcagggtctgctgaacagacacctcttagccgttcacagcaagaatttcccacatgtgtgtgtggagtgtggcaaaggcttccgccatccttctgaactgaaaaaacacatgcgcacacacactggagagaagccataccaatgtcagtactgcattttcaggtgtgccgatcagtcgaacctgaagacgcacatcaagtccaagcacggtaataatctgccttacaaatgcgagcactgccctcaagcctttggagatgagcgggagctgcagcgccacttggatcttttccaaggacataagacccatcaatgtccacactgtgatcacaagtctacgaactcctcagatctgaagcgccacattattagtgtgcatacaaaggattttcctcacaaatgcgaagtctgtgacaagggcttccaccgtccatcagagttgaagaagcactccgacatacacaagggacgtaagattcatcaatgtaggcactgtgattttaaaacaagcgacccatttattttaagcggccacattctatccgtacatactaaagaccagccactgaagtgcaaacgttgtaaaagagggttccgtcagcaaaacgagttgaagaagcatatgaagacacatacgggacgcaagatctatcagtgtgagtactgtgagtatagcaccactgatgcctcagggttcaagaggcacgtgatttccattcatacaaaggactatccgcaccgctgtgaattttgtaagaaagggttccgaaggccaagtgaaaagaaccagcacattatgcggcaccacaaagaagccctaatgtag

SEQ ID NO: 247784 - DNA, 2310 bp, synthetic construct
  misc_feature 1..2310: note = Description of Artificial Sequence: Synthetic coding sequence
  source 1..2310: mol_type = other DNA
atgcaagattttgtagctggcatggcaggcacagcacacatcgatggcgatcatatagtggtgagtgtacctgaagccgtgctggtttccgacgtggtaactgatgatggaatcaccctagaccacggtctagccgctgaagttgtgcacggtcccgacatcataaccgaaaccgacgtcgtgaccgagggtgtgatagtgccagaggctgtgctcgaggctgacgtcgcgattgaggaagatttagaagaggatgatggcgaccatatactgacaagcgaattaatcaccgagacggtcagagtccccgagcaggtcttcgtggccgacctggtaaccggtcccaatggccacttagagcacgtcgttcaggactgtgtgagcggggtggattcgccaactatggtatcagaggaggtgctcgtcactaactccgatacagagacggtaatccaggcagctggtggagttcccggttccaccgttactattaaaactgaggatgacgacgatgatgacgttaagagcactagtgaagattacctgatgatcagcctcgacgatgtgggcgagaagctggagcatatgggaaatactcctttaaaaatcgggtcggacggcagccaggaagatgctaaggaagatgggttcggctccgaggtgatcaaagtatatatatttaaggcggaggccgaggacgatgtcgaaatcgggggaaccgaaatagtgactgagtccgagtataccagcgggcactctgtggctggcgtgctcgaccaaagccgaatgcaacgggaaaagatggtgtacatggctgtgaaagactctagtcaagaggaggatgacatttcctgcgcagagattgcagacgaggtgtacatggaggtaattgtgggagaagaggaggggacttccttgcccgagattcagcttgaggattccgacgtcaataaaacagtggtccccgtcgtgtgggctgccgcttatgggaacaccctggactccgcactggagtctaggtctagcacagcagcccagtatctccagatctgtgacggaattaacacgaataaggtgctgaagcagaaggcaaagaaaaggaggcgcggagagacccggcaatggcagactgctgttattattgggcctgacggccagcccttgaccgtgtatccttgccacatctgcacaaaaaagtttaagtcccggggatttttaaaacggcacatgaagaaccaccctgatcacctgatgagaaaaaagtatcagtgcacagattgtgacttcaccacaaataagaaggtgtcatttcacaaccacttggaatcccataaactgataaacaaagtggacaagactcatgagtttacagaatacactcgccgttaccgggaagcctcccctctttcttccaacaaactgatactccgggataaggagcccaaaatgcacaaatgtaagtactgcgactacgagactgccgagcaagggctgctgaatcggcacctgttagccgtgcactcaaaaaactttcctcacgtgtgtgtggaatgcggtaagggatttcgacacccaagtgagttgaaaaagcatatgcggacccataccggcgagaagccgtaccagtgccagtactgcatattcagatgcgcagatcagtctaatcttaaaactcacatcaagagcaagcatggcaacaatttgccttacaagtgtgagcattgtccacaggcgtttggagacgagcgagagctgcagcgtcacctagatttatttcagggccacaaaacccaccagtgtccccattgcgaccacaagtccacaaactcttccgatctcaagcgacacatcatatctgttcataccaaggattttccgcataaatgcgaagtctgtgataagggatttcaccgcccttctgaacttaaaaagcattcagacatacacaaaggcaggaagattcaccagtgtcgtcattgtgactttaagacttctgacccgtttatcctgagtggacatattctgagcgtccatacgaaagatcaacctctgaagtgcaaacgatgcaagagaggctttcggcaacagaacgagctaaaaaagcatatgaagactcatacaggtcgaaaaatttaccagtgtgagtattgcgagtattccaccactgacgctagtgggtttaagagacatgtcatttcgattcacactaaagattaccctcaccgatgtgagttttgtaagaaaggattccggaggccttccgaaaagaaccagcacataatgcgtcatcacaaagaggctttgatgtag

SEQ ID NO: 247785 - DNA, 1812 bp, synthetic construct
  misc_feature 1..1812: note = Description of Artificial Sequence: Synthetic coding sequence
  source 1..1812: mol_type = other DNA
atgatatccctcgatgatgtcggagagaaactggagcacatgggaaatacaccactgaagatcgggtcagacggaagccaggaggatgctaaagaagatggttttggatctgaagttatcaaagtttacatctttaaggcggaagcagaggatgatgttgaaatagggggtacagagatcgtcaccgaatctgagtatacatcaggccattcagtggccggagtgctcgaccagtcaagaatgcagagagaaaagatggtctacatggctgtgaaggattcatcccaggaagaggatgatatctcttgcgccgagattgcagatgaagtatacatggaggtaatcgtgggcgaggaggaggggacatcattgccggagatccaactcgaggatagcgatgtgaataagactgtggtccccgtggtttgggccgctgcatacggcgatgagcggagggtctcacggcgatacgaggactgtcaggcctccgggaacacactggactcagcgctggaaagtcggtcttcaactgcagcccaatatctgcagatctgcgatggcatcaacaccaataaagtcttgaagcagaaagcaaaaaaaagaagaaggggagaaaccagacagtggcaaacagctgtcataatcggtcctgacgggcagcccctgacagtttatccctgtcacatttgtactaaaaagtttaagagccgcggatttttgaagcgacatatgaagaatcatccggaccacctgatgcgcaaaaagtaccagtgcactgactgcgacttcactaccaataaaaaggtgtcctttcataaccaccttgaatctcacaagctgattaacaaagttgacaaaacacacgaatttaccgagtataccagaaggtatagagaggcgtccccactgagcagcaataaactaattcttcgggataaagagccgaagatgcataaatgtaaatactgcgactacgagacagctgagcaaggactgcttaacaggcatctgttagcggtacactccaagaattttccccatgtgtgtgtggagtgcggtaaaggattcaggcatccttcagaactcaagaagcacatgaggacccacaccggagagaaaccttatcagtgccagtactgtatttttagatgtgccgaccaaagcaacctgaaaactcatattaaatccaagcacggcaataatcttccatataaatgtgagcattgccctcaggcctttggggatgagagggagctgcagagacacctggatctgtttcagggacacaaaactcaccagtgcccgcattgcgaccataagagcactaacagcagtgacctgaaacgccacatcatctctgtccacacgaaagatttcccacataagtgtgaagtctgtgataagggattccaccggccatcagaactcaaaaaacactctgatatacataaaggacggaagatccatcagtgccgccattgtgacttcaagacctcggacccttttattttatcaggccatatcctgtctgtacacacaaaggatcagcccctgaagtgcaaacggtgtaaaagggggtttagacaacagaacgaattaaaaaagcacatgaagacgcatacgggtagaaaaatctaccagtgcgaatattgtgagtacagcactaccgatgcttcaggtttcaaacggcacgtgatctcgatccacaccaaggactacccccaccggtgcgagttttgtaaaaagggattccgccgaccctccgagaagaatcagcatataatgaggcatcacaaagaagctttgatgtag

SEQ ID NO: 247786 - DNA, 1611 bp, synthetic construct
  misc_feature 1..1611: note = Description of Artificial Sequence: Synthetic coding sequence
  source 1..1611: mol_type = other DNA
atgggccctcttcagtttagggatgttgccatagagttctcactcgaggagtggcactgcctggacaccgctcagaggaacctctatcgcaatgttatgctggagaattatagaaatttagtgttcttgggcatcgtggtgagcaaaccagatttgatcacatgtctggagcaaggaaagaaaccactgactatgaaaaaacacgagatggtggcaaaccccagcgtgacttgtagtcatttcgccagagatctatggccagagcagtccatcaaggatagtttccaaaaagtgacccttcgtagatacgaaaactatggtcacgacaatttgcagttcaagaaaggatgtgaatccgtagacgagtgtaaggtccacaagagggggtataacgggctaaatcagtacctcacaacaacacagtctaaaatttttcaatgcgacaaatacgtcaaggttattcacaagtttagtaacagtaataggcataagatccgccacactggcaaaaaaccgttcaagtgtattgaatgcgggaaagcgttcaatcagagttctacactcaccactcataaaaaaatccacacaggcgagaaacccttcaaatgtgaggagtgcggaaaagcttttaattggtcctcccatctgacaacacacaaacgtatccacacaggggagaaacgttacaagtgtgaagactgcgggaaggcgttctcccgatttagttatctgacggcacacaagataattcattccggtgagaagccatacaaatgcgaggagtgcggaaaggctttcaaacggagctccaatttgacaacacacaagatcatccatactggtgagaaaccgtacaagtgtgaggaatgtggtaaggccttcaagagatctagtatcctcacagcacacaaaatcatccacagcggagaaaagccatataagtgtgaggagtgtggaaaggcattcaagcacccatctgtgctgacaacccataaacgcatccacacaggcgagaagccatataagtgtgaggagtgtggaagagcattcaagtacttcagtagccttaccacccataagattatccattcaggggaaaagccttataagtgtgaggagtgtggtaaggcgttcaattggtcctcgcacctgaccacccataagaggatccacaccggggagaagccatataagtgcgaagaatgcggagaagcattcaagtatagctctagcctgaccacccacaagatcatccacaccggacagcaaccgtttaagtgtgaggaatgcggcaaggcatttaagtgtttctctatcctgaccacacacaagcggatccacaccggcgagaagccatataaatgtgaggaatgtggcaaggcttttaattcctccagtcatttaacagctcataaacggatccataccggtgagaagccttataagtgcgagcgttgcggaaaggcttttaagcggagcttcatcctaactcgccacaaacgcattcacaccggcgaaaaaccgtacaaatgcgaggaatgcggaaagggctttaagtgtccctccactctgacaacacacaaagttattcatacaggcgaaaagttatag

SEQ ID NO: 247787 - DNA, 1935 bp, synthetic construct
  misc_feature 1..1935: note = Description of Artificial Sequence: Synthetic coding sequence
  source 1..1935: mol_type = other DNA
atggagattcctgcaccagagccagaaaagacagccctgtcaagccaggatcctgcccttagtctgaaagagaacctggaagacatcagtgggtgggggctacctgaagccaggtcaaaagaatccgtgagcttcaaggatgtggctgtcgactttactcaggaggagtgggggcagctggacagtcctcagcgggctttgtatagagacgtgatgctggagaattatcagaatttgcttgccctggggcctcctttgcacaagccagacgtcatttctcatcttgagcgaggggaggagccatggagcatgcagagagaagtcccccgtggtccctgtccagaatgggagcttaaggccgtgccctcccagcaacagggcatatgcaaggaggaacccgcacaggaacccattatggagcggccactcggcggagctcaggcttggggcagacaggcgggagccctccagagatctcaagccgctccatgggctccggctccagcgatggtctgggacgtgcccgtggaggaatttcccctcaggtgccctctgtttgctcagcagagagtgcctgagggtggcccattgttagatactcggaagaacgtccaggcaacagaaggaagaacaaaggctcccgcacgcctttgtgcaggggagaatgccagcactccttctgagcctgaaaaattcccgcaagtacgtaggcagcggggagctggtgctggggaaggggagtttgtctgtggtgaatgcggcaaggcttttagacagtcttcgtcactaacactgcaccggcgttggcatagtcgagaaaaggcctacaaatgcgatgagtgcgggaaggctttcacatggagcactaatctcctggagcatcgcagaatccacactggggagaagccgtttttttgcggggaatgcggtaaagcctttagttgccacagttccctaaatgtgcaccaaagaatacataccggcgaaagaccttataagtgctcagcgtgcgagaaggccttcagctgttcatccctcctgtctatgcatctgagagtgcacaccggcgaaaagccatacaggtgcggcgaatgtggcaaggctttcaaccagaggacgcacctcacgagacatcacagaattcatacaggcgaaaaaccctaccaatgtggctcctgcggaaaggctttcacatgccatagttctcttactgtccatgagaagatccattctggagacaaacccttcaaatgttcagattgcgaaaaagcttttaactcacggagccgcctgacgctccaccagcgtactcacaccggcgagaaaccttttaaatgcgctgattgcgggaagggtttctcatgccacgcttacctgctcgtgcatcgtaggatccactccggcgaaaagccattcaagtgtaatgaatgcggaaaagctttctcctcccatgcttacctgatcgtccaccggaggatccataccggggaaaagcccttcgactgttcacagtgttggaaggcctttagctgtcatagcagtctcatagtccaccagcggattcacactggagaaaagccgtacaagtgctctgagtgtggaagagctttctcccagaaccattgcctgatcaagcatcagaaaatccactctggtgaaaagtccttcaagtgtgagaagtgcggagaaatgttcaactggtcaagccatctgaccgagcaccagaggttacactcagagggaaaacccctggccattcaatttaacaaacatctactttccacctattacgttcccggaagccttttgggggctggagacgcaggccttcgggatgtggatcccatcgatgcattggatgtggccaagcttctctgcgtggttccacccagggctgggaggaacttctcacttggttcaaagccccgaaactag

SEQ ID NO: 247788 - DNA, 1935 bp, synthetic construct
  misc_feature 1..1935: note = Description of Artificial Sequence: Synthetic coding sequence
  source 1..1935: mol_type = other DNA
atggagattcctgcccctgagcccgagaagactgccctaagttctcaggatcccgctctctcgctcaaagaaaacctcgaggatatcagtggatggggactacccgaagcacggtcgaaagaaagcgtgtcttttaaggatgtggcagtggattttacacaggaggagtgggggcaactggactcaccccagagagcgttgtaccgagatgtcatgcttgaaaactaccagaacctgctggccttgggtccccctttgcacaagcccgatgtgatctcccacttagagcggggtgaggagccctggtcgatgcagagggaggtgccacgcggaccatgccctgaatgggagctgaaagctgttcctagccagcagcaggggatctgtaaagaagaacccgcacaagagcctattatggagaggccccttgggggagcccaggcctggggacgacaggcaggggcactgcagagatcgcaggcagccccatgggcccctgcccctgctatggtctgggacgtgcccgtggaggaattccccctaagatgcccactcttcgcccagcagcgcgtgcctgaaggtggaccattgttggacactagaaagaacgttcaggccaccgaagggaggactaaagcccctgcgcgtctttgtgcaggcgaaaacgccagtacaccctcagagcctgagaaattcccccaagttcggcgtcaaagaggagccggagcaggtgaaggtgagtttgtgtgcggtgagtgcgggaaggcattcagacaatcctcctcactcaccctgcacaggcgctggcactcaagagagaaggcgtataaatgtgatgagtgtggcaaggctttcacctggtctaccaacctgttggaacaccgacgtattcatacaggtgagaaaccatttttctgcggagaatgcggaaaagccttttcttgccactcctcactgaacgtacaccaacgtatccataccggcgagcgtccctataagtgtagtgcctgcgaaaaggctttttcctgctcatctctcctctctatgcacttgcgggtgcatacgggcgaaaagccctaccgatgtggggaatgcggaaaagcttttaaccagcgcactcaccttacacgccatcacagaattcacactggggaaaagccgtatcaatgcggatcctgcggcaaggcattcacctgtcactcgtctctgaccgtccatgaaaagatccactcaggcgacaagcccttcaagtgtagtgattgcgagaaggcctttaactcccggtcgagactcactctccaccaacgaacccacactggcgagaagccctttaaatgcgccgattgtgggaagggtttttcttgccacgcatacctcctcgttcataggagaatccactctggcgagaaacctttcaaatgtaatgagtgcggaaaggcattcagttcccatgcatatctgattgtgcaccggagaatccacaccggagagaagcctttcgactgctcccagtgctggaaggcctttagttgccactcctccctgattgtgcatcagcgtattcacactggcgaaaagccatataagtgctcggagtgtgggcgtgccttttctcaaaaccactgtctgataaaacaccagaagattcatagcggagaaaagtccttcaaatgcgaaaaatgcggagagatgttcaactggagctctcatcttacagagcatcagcgcctccactctgaaggaaagccactggcaatccagtttaataaacacctcctgtctacctactacgtccctggctccctgctgggcgctggcgatgctggattaagggatgtcgatccgatcgacgcattagatgtcgcgaaacttctttgtgtggttcccccacgcgctgggaggaacttctccctgggctcgaagcctagaaactag

SEQ ID NO: 247789 - DNA, 1839 bp, synthetic construct
  misc_feature 1..1839: note = Description of Artificial Sequence: Synthetic coding sequence
  source 1..1839: mol_type = other DNA
atggagatccccgctcctgagcctgaaaaaaccgcgctatcgtcgcaggacccggcactctcactcaaggaaaatttggaagacattagcggctggggacttccggaagctaggagcaaagagtcagtgtcattcaaagacgtggctgtggattttactcaagaagaatggggtcagctcgattccccccagcgcgctctgtatagggatgtgatgctggaaaactatcaaaatctgctggccttagagtgggaactcaaggcagtaccgtcgcaacagcagggcatttgtaaagaagagcctgcgcaggagcccatcatggagagaccacttggtggcgctcaagcatggggccgtcaggcaggggctctgcaacgctcacaggcagccccatgggcacccgcaccagcaatggtgtgggatgtgccagttgaggaatttccgctgcgatgccccctgtttgcccaacagcgggtgccagaaggaggtccgctattggatactcgaaagaacgtccaggcaaccgaaggacgcacaaaagcacctgccaggctgtgcgccggagaaaacgcctcgactccttcggagcccgagaagtttccgcaggtacgcaggcagcgcggagccggtgcaggtgagggcgaatttgtctgcggcgaatgtggtaaagccttcaggcaaagctctagcctcactttgcacaggcggtggcacagccgcgagaaggcctacaagtgtgacgagtgtggcaaagccttcacttggtctacgaatttgttggagcatcgaaggatccacaccggggaaaaacccttcttttgtggcgagtgcggaaaagctttctcgtgtcatagctctttgaacgtgcaccagcgtattcatactggagaaagaccctataaatgctcagcttgcgaaaaggctttcagttgctcgagcctgctgtctatgcatctgcgggtgcacaccggagagaagccttacagatgcggcgagtgtggaaaagcgttcaaccagcggacccacttgacacggcaccaccgcatacatacaggggagaaaccctatcagtgcggatcttgcgggaaagccttcacctgccattcatcactgaccgtccacgagaaaatccacagcggtgacaagccattcaagtgcagcgactgtgagaaggccttcaactctcgctcacggttaacattgcaccagcgcacacacacaggagaaaaaccgttcaaatgcgccgattgcggcaaagggtttagctgtcacgcctacctcttagttcatcgacgtatccacagtggcgaaaaaccgttcaagtgcaacgaatgcggcaaagcctttagctcccatgcgtacttgatcgtgcaccggaggatccacaccggcgagaagcccttcgactgttctcagtgttggaaagctttctcgtgtcactcctccttgatcgtgcatcagcggattcacaccggggagaagccttacaagtgttctgagtgtggaagagcgttctcccagaatcactgtctaatcaagcaccagaagattcatagcggagaaaaatcctttaaatgcgaaaagtgcggtgagatgtttaattggtcaagccacctgacggaacatcaacggctgcactctgaaggcaagccactggctatacagttcaacaaacatctattgagtacatactacgttccaggatccctcctaggcgctggtgatgccggtctcagggacgtcgatcccattgacgccttagacgttgccaaactgttgtgcgtcgtcccaccaagggcgggtagaaatttttcgctcgggtccaaaccacgcaactag

SEQ ID NO: 247790 - DNA, 210 bp, synthetic construct
  misc_feature 1..210: note = Description of Artificial Sequence: Synthetic coding sequence
  source 1..210: mol_type = other DNA
atggagatccccgctccagagcctgaaaagacagccctttcttcccaagaccctgcgctgtccttaaaggaaaatctggaagacattagtggttggggtcttccagaagcgagatccaagagtctcgccctcgtaacccaggcaggtgtgcagtggaggaatttgggatctcttcagccacctcctctcgggtttaagcaattttcatag

SEQ ID NO: 247791 - DNA, 1935 bp, synthetic construct
  misc_feature 1..1935: note = Description of Artificial Sequence: Synthetic coding sequence
  source 1..1935: mol_type = other DNA
atggccgaggccgtggctgctccgatctctccctggactatggctgctaccatccaggccatggaacggaagattgagtcacaagccgctcgcctgctgtccctcgaaggccgaactgggatggctgagaagaagttagccgattgtgaaaagacagcagttgagtttgggaatcaactggaaggtaagtgggccgttctggggaccctgctgcaagagtacgggctcctgcagcggagactggaaaacgtcgaaaatctcctgcgtaaccgcaacttttggatcctgagattgccacctgggtccaaaggggagagcccgaaggagtgggggaaactggaggactggcaaaaggaactctacaagcacgtgatgcgcggaaactatgaaacccttgtgtcactcgactatgcaataagcaaacctgaagttctgtctcagattgaacaggggaaggaaccatgcaactggcggagacctggacccaagattccagatgtgcccgtggatcctagtcccggaagtggtcctcccgtgcccgcacccgacctgctcatgcagattaagcaagaaggggaactccaacttcaggagcagcaagcccttggggttgaggcttgggcagcgggacaacccgacatcggtgaagagccatggggcctgagccaactggattcaggagctggggacatcagtaccgacgcaacttccggcgttcactccaacttctccaccactattccaccaaccagctggcagacagatctgcctcctcatcatccctcctcagcatgttcagacggaacactgaaactgaatactgccgcttcaacagaggatgtcaaaattgtgattaagactgaagtccaggaggaggaggtggtggccacccccgtgcaccccacagacctagaagcgcacggtaccttatttggccctgggcaggctactcgatttttcccatccccggctcaagaaggggcttgggagtcacagggcagctcatttccatcccaggaccccgttcttgggctgagagaacctgcacgacccgagcgagatatgggcgagctgtctcccgctgtggctcaggaagaaacaccgcctggtgattggcttttcggtggcgttcgttggggttggaatttccggtgtaaaccacctgtagggttgaatcccaggaccggacctgaaggactgccatatagcagtccagacaatggagaggcaattctcgatccaagccaagctccacgtccttttaacgagccgtgcaagtaccccggacggacaaagggcttcggccacaaacccggtctcaaaaaacatcccgctgccccacccggtggcagaccattcacttgtgccacatgcggaaaatccttccagttacaagttagcctaagcgctcaccagcgatcctgcggagctcccgacgggtctggccctgggaccggcggaggcggatcagggtcagggggaggtggtggtggtagcgggggtggctccgccagagatggctccgctcttcggtgtggcgagtgtggaagatgcttcacaaggccggcacacctcatccgacatcggatgctgcacactggtgagcgacctttcccctgcacagagtgtgaaaagaggttcaccgagaggtccaagttaattgaccactatcgtacacacactggtgtgcggccttttacatgcacagtgtgtggaaagtctttcatcagaaaggaccatctgaggaagcatcaaagaaaccacgccgctggagctaagaccccagcacggggtcagccattgccgacgcccccagccccaccagatcccttcaaatcgccagcgtcaaaagggcctctggcttctactgacctggtgacggactggacttgtggactgagtgtcctcgggcctaccgacggaggcgacatgtag

SEQ ID NO: 247792 - DNA, 1938 bp, synthetic construct
  misc_feature 1..1938: note = Description of Artificial Sequence: Synthetic coding sequence
  source 1..1938: mol_type = other DNA
atggctgaggccgttgctgccccaatctccccctggacaatggcggctaccatacaggccatggagcgcaagatcgaatctcaggctgcaaggctgctgtcactggaagggagaaccggcatggcggagaagaagctcgcggactgtgaaaaaaccgcagtggagtttgggaatcagcttgagggtaagtgggccgttctgggcactctgctgcaggagtatggcctgttgcagcggaggcttgaaaacgttgaaaaccttctgcggaacaggaacttttggattttgagactcccaccgggaagcaaaggcgagagtcctaaagaatggggaaaactggaagattggcagaaggaactgtacaagcatgtgatgcgaggaaactacgagaccctggtctctctcgactatgccataagtaagcccgaagtactgagccagatcgagcaggggaaggagccttgcaactggagacgacccggtcccaagatcccggatgtgccagtggacccctcccctgggagcggaccccctgtgcctgctccagatctgcttatgcagataaagcaggagggcgagcttcagctgcaagaacaacaggccctcggagtggaagcatgggccgcaggacagcccgacatcggcgaagagccgtggggactatcccagttagacagcggggcaggcgatatatctaccgacgctaccagtggggttcacagcaatttctctactaccattccacccacctcttggcagaccgatttgccaccacaccacccttcaagtgcgtgttctgatgggacgcttaagctaaatacagctgcctcaaccgaggcggatgtcaaaatagtcattaagaccgaagtgcaagaagaagaggtggttgccacccctgtacatccaacagaccttgaggcacacggcacactcttcggaccagggcaggctaccagattcttcccctccccggctcaggaaggagcctgggaaagccaaggaagcagcttcccttctcaggatccggtcctggggctgagagagcctgcacgtcccgagcgggatatgggggaactttcacctgctgtcgctcaggaggaaaccccccctggagactggttgtttggaggggtacgctggggctggaactttcggtgcaaacctccagtgggtctgaatccacgcaccggccctgagggcctcccctattcttcaccagacaatggcgaagccattctcgatccctcacaagcgccacgtccttttaacgaaccatgtaaatatccagggaggaccaagggcttcggacataaaccaggactcaaaaagcacccagcggcacctcctggcggaagacctttcacctgtgccacctgcggcaagtccttccagctccaggtgtccttaagtgcacatcagcggagttgcggcgcaccagatgggagtggcccaggaaccgggggaggtgggtctggcagcggcggagggggaggaggctcaggcggaggctccgctcgtgatggatctgctcttagatgcggggaatgcggccgttgcttcacccggccagctcacctgattcggcaccgaatgctccacactggagagagaccattcccctgcactgaatgtgagaagaggttcaccgaaagatccaagctcatcgatcattatcggacccataccggagtgcgaccatttacctgcacggtgtgcggtaagagttttatccgcaaggaccatcttcggaaacaccaaagaaaccacgccgctggcgcaaaaacacctgcaagagggcagccactaccaactcctcctgcccctccagatcctttcaaatctccagccagcaagggcccactggctagtaccgacctggtgactgactggacatgcggcctgtcagtactgggacccaccgacggcggtgacatgtag

SEQ ID NO: 247793 - DNA, 2172 bp, synthetic construct
  misc_feature 1..2172: note = Description of Artificial Sequence: Synthetic coding sequence
  source 1..2172: mol_type = other DNA
atgtctttgctgaaagagcgaaaaccgaagaagcctcactatatcccccgacctccaggcaaaccttttaagtacaaatgttttcagtgtcctttcacatgcaacgaaaagtcccacctgtttaaccatatgaagtatggactgtgcaagaactcaatcactcttgtgtccgagcaggatcgagtccccaaatgtcctaaaagcaactcacttgacccgaagcagactaatcagcccgacgccacagcgaaacctgcttcctctaagtctgtggctaacggactgagtgcatttgactccaaactccaacactcaagcgccagggaggacattaaggaaaatctggagctgcaggcgagaggcactcaccggtgcctaggacagaagcctgccctacaccgagcctctccttgtaaatcaccggcacctgaggcagctctgggcgcacaacctgcgctagagggcgctgctcgaccgagcgcctttgtacccgtgggggaacacagacttaagggtcctgacaatgcggaagctcccgaaaccctcgctctccacaacccaacggcaaaggcagtcagctttcacacgaaaagtgcctttcatacaccaggctacccgtggaaggctggtagtccattcctgcctcctgagtttccgcacaaaatctcttcaacaaaggggttgggcgcaatctcgccctatatgcatccgaccattcccgagtatccccctcacttttataccgaacacggcttggccaccatctacagcccatacctgttggcaggctctagccccgagtgcgatgctccactcttatcagtgtatggcacgcaagatccgaggcattttcttccgcaccctgggccaatccccaagcaccttgcgccttcgcctgccacctacgaccactacagatttttccagcagtaccctagcaatctgcccattccttatggtttttacaggcccgagagcgctttcagctcttatggcctcaggctgccccctgttactggcctaaccagggaccagtctagtcacctgctggaagaagcaacgttagtctaccccgcaagctctccatcccgtctgaacccttcagacccaaacagaaagcatgttgagttcgaatccccaattccagaggccaaagatagctcaaaagctgggcagagagacaccgaaggcagcaaaatgtctccccgagccggtagcgcggcaactgggtctcctggtaggccctctccaacggacttcatgcagacttcccagacttgcgaaggactctatgatctgagcaataaggctgcgagttctgctctgggcagactgtatccccctgaacagtctctgaccgccttcagaccagtaaagaagtcaacggagtgtctccccgcacaagctgctgaaacaactgccgagtcaccggtgagcctgaacgtggtgaatggagaccctcctgctccgaccgggagcgcctccctggtgagtgaggcggcaccaagcagccccgatgattcatcaggcatgggtcctctcaatctgtctaaaaaatcagaaatcaacctagctgccacacacgagcccacatatcaaggatcccctcaggctgagactgctagcttctccgaattgcaagacctacccttgaatctgagtgtgaaagatccctgcaatactcaagctccgagacctgccttcccgggtagacctagagccgcagagcctgccgctgcggtcccacagaagaccggtacagagggctcggaggatggcccatcacatccggagactaagcccggttctctcgacggagatggagcgcctcctaccggccctggggaagaagcccctgatgcctgcgcagtagactcctcagaggagcaaaagcaaaccgccgctgtggccctatgtcagctggccgcttatagcccgcgaaatattcgcgtgggagatggtgacgccgcagcgccagaacccgcatgtcgtcaggatacgcccacactttcatccatggaatctcaggaggcacagtgtgatttgcggcctaaaggccagaagcggaccagcctgagagacgccggaaagtctcagcagggagctaagaaggcaaaactgcaggacactgctcgcgtgttcacactgcgacgcagggccagagtctcctag

SEQ ID NO: 247794 - DNA, 951 bp, synthetic construct
  misc_feature 1..951: note = Description of Artificial Sequence: Synthetic coding sequence
  source 1..951: mol_type = other DNA
atgagcccgcgagcgggttctgccgctacggggagccctggccgtccgagtcctactgactttatgcagacatctcagacttgtgagggcctgtacgatttgagcaacaaggctgcttcatctgcacttgggcgtctgtacccaccggaacaaagtctgacggcttttcgccctgtgaagaagtccaccgaatgcttgcccgcacaggctgcagaaaccaccgccgaatctccagtgtctttaaacgttgtgaatggtgaccctcccgcaccgacaggcagtgcgtccctagtaagcgaagctgctccctcctccccagacgactcttctggtaagtctgagatcaacttggccgctacgcacgagccaacctaccagggatctcctcaggccgaaactgccagcttctccgagctccaggacttaccactgaacctatccgttaaagacccttgcaatactcaagccccaagaccagctttcccaggtcgcccaagagccgcagagccagccgcagctgtcccacagaagacaggcaccgaggggagtgaagatggtccctcccaccctgaaacaaagcctggctccctcgacggggacggcgctccacctactggccctggagaggaagctcctgacgcttgtgccgtggattcgagtgaagagcagaagcagaccgctgccgtcgccttgtgccagttggctgcctatagcccgcgaaacattcgtgtcggtgacggggatgccgctgcgcctgaacctgcctgcagacaggataccccgaccctctcgtctatggaaagccaggaggctcagtgcgacctgcggccaaaaggacagaagagaaccagtctgcgagacgctggcaaatcccagcagggcgctaagaaagctaaactccaagataccgcacgtgtgtttactctccggagacgcgcacgcgtttcttag

SEQ ID NO: 247795 - DNA, 891 bp, synthetic construct
  misc_feature 1..891: note = Description of Artificial Sequence: Synthetic coding sequence
  source 1..891: mol_type = other DNA
atgtatttttcacaggaggagtgggagttgctcgatccgacccagaaggcattgtacaatgatgtaatgcaggagaactatgagaccgtaatctcattggctctttttgttctgcccaaacccaaagttattagctgcttagaacagggtgaagaaccttgggttcaggtttccccagaattcaaggatagcgctggcaagtccccgactggcctaaaactcaagaatgatactgagaatcaccagcccgtgtccctctcagacttggagattcaagcttccgctggcgtaatctccaagaaggcaaaagtgaaggtcccccagaagaccgccggtaaagagaaccactttgacatgcatagagtaggaaagtggcaccaggattttcctgtaaaaaaacggaaaaagctttccacttggaaacaggagttactaaaattgatggaccggcacaaaaaggactgcgcccgagagaaaccctttaagtgccaagagtgcgggaaaacgtttcgcgtcagttctgacctgataaagcatcaaagaatacacaccgaggagaagccttacaaatgtcaacagtgcgacaaacgatttaggtggtcgagcgacctgaataagcatctgactacccaccagggcataaaaccatataagtgtagctggtgcggaaagtccttctcccagaacaccaacctacacacacaccagaggacccacacgggggagaagcccttcacttgtcatgagtgcgggaaaaagtttagccaaaatagccatctgataaagcaccgcagaacccacaccggcgaacaaccttacacttgctctatttgtagacgcaactttagccgtaggtcaagcttgctgcgtcatcagaagctacacctgtag

SEQ ID NO: 247796 - DNA, 891 bp, synthetic construct
  misc_feature 1..891: note = Description of Artificial Sequence: Synthetic coding sequence
  source 1..891: mol_type = other DNA
atgtacttttcccaggaggagtgggaattattggacccaacccagaaggccctgtataacgacgtcatgcaggagaattacgagacagttatcagcctagctcttttcgtcctgcctaagcctaaggttatttcttgcctcgagcaaggagaagaaccgtgggtacaggtgtcccccgagttcaaggacagcgccggaaagtctcctacagggcttaaactgaaaaatgacaccgagaatcatcaaccagtcagcttgagtgatttggaaatacaggcttccgcaggagtgatatctaaaaaggctaaggtcaaagtacctcagaaaaccgcgggaaaagaaaaccacttcgacatgcatcgggttgggaagtggcaccaggactttccagtaaagaagagaaagaaactgagcacctggaagcaggagctcctgaaattgatggaccgccacaagaaagattgcgctcgagagaagcccttcaaatgccaggaatgcggtaagactttcagagtttccagcgacctgatcaaacatcagcgcatacatacagaggaaaagccttacaaatgccagcagtgcgacaaaagattccgctggtcaagcgacctgaataagcatctaaccacccaccagggcatcaaaccttataagtgctcctggtgcggtaaaagtttctcccaaaacaccaacctccacacccatcagagaacccatactggggaaaagcctttcacatgtcacgagtgtggcaaaaagttttctcagaatagtcacctgatcaaacatagaagaacacataccggagaacagccatacacatgctccatctgcaggcgtaactttagtcgcaggagctcactgctacgacaccagaagctccatttatag

SEQ ID NO: 247797 - DNA, 1248 bp, synthetic construct
  misc_feature 1..1248: note = Description of Artificial Sequence: Synthetic coding sequence
  source 1..1248: mol_type = other DNA
atggctatgagagaacttaatgccgactcatgctcctctcctcagatgggagcaatgtgggaaacctctggttctgtcaaagagaatagctcccagtctaaaaaatattctacaaagattgaaaacctgggacccgagagtgcatgcaggcacttctggtcctttcgctatcatgaggcaaccggccctctcgaaactatatcacagctacagaagctttgccaccagtggctcaggccagagatacactccaaagaacaaattctggagatgctggtgctggagcagtttctgagcatcctgcccaaagagacccagaactgggtgcaaaaacaccaccctcagaatgttaaacaggcactcgtcctggtggaatttctacaaagggaacctgatgggactaaaaatgagtcactcttgacctttgaggacgtcgcagtttacttcagtgaggaggagtggcagctgctgaacccattagagaagacactgtacaacgatgtgatgcaagacatttatgaaactgtgatctcacttggacttaaacttaaaaatgacacaggaaacgaccatcccatctccgtgagcacgagcgagatccagacctcaggctgcgaggtcagcaagaaaacacgcatgaaaatagctcaaaaaactatgggtagagaaaatccgggtgacacccacagcgtccagaaatggcatagagcctttcctagaaagaagcgcaaaaaaccagctacctgtaagcaggaactgccaaagcttatggatctgcatggtaaagggccaacaggggaaaagcccttcaagtgtcaggagtgcggtaaatcatttagagtgagttccgatctgatcaaacatcaccgaattcatacgggggaaaagccctacaaatgtcagcagtgcgacaggcgctttagatggagcagtgaccttaataagcatttcatgactcaccagggcatcaagccatatcgctgcagctggtgtggcaagtcctttagccacaatactaacctccacacacatcaaaggatccatacaggggaaaaacctttcaaatgcgacgagtgcggtaagaggttcatccagaattctcatctgatcaaacaccagcgcactcacacgggcgaacagccttatacctgttctctgtgcaagagaaacttctcgagaaggtcctcgctcctccgccaccagaaactccaccgcagacgcgaagcatgtttggtcagtcctaactag

SEQ ID NO: 247798 - DNA, 1533 bp, synthetic construct
  misc_feature 1..1533: note = Description of Artificial Sequence: Synthetic coding sequence
  source 1..1533: mol_type = other DNA
atggccatgagggagcttaatgcggactcttgtagctcaccccaaatgggggctatgtgggagacgagtggctccgttaaagagaacagcagtcagagtaagaagtatagcacgaagatcgagaacttgggcccagagagtgcttgtcggcacttctggtctttccgatatcatgaagctaccgggccacttgagaccatttcccagctgcagaaattgtgtcaccagtggctccgacctgaaatacacagtaaggaacaaattttagaaatgctggtgttggaacaatttttgtccattctgcctaaggagacccagaattgggtgcagaaacaccatccccagaacgtcaaacaggccttggtgttagttgagtttctgcagagagagccagacggcacaaagaacgaagtgaccgctcatgagctgggaaaggaggccgtgcttctgggcggtaccgcagttgcccctggttttaaatggaagcccgcagagccacagccaatgggtgtcttccaaaaggaatactggaacacatacagagtgctgcaagagcagttaggctggaacacccataaggagactcagccggtgtatgagcgggcagtgcatgaccagcagatgctagcactcagtgagcagaaacgcatcaagcactggaagatggctagcaaactgatcttgcccgaaagtctgtctttactgacatttgaagatgtcgcggtctacttcagtgaagaggaatggcagctcctaaatccactggagaaaacgctgtataacgacgtcatgcaggacatttacgaaacagtaatctctctgggactgaagcttaagaacgacaccgggaacgatcaccctataagcgtgagcacgagcgagatacagacctcaggatgcgaggttagcaagaagactcggatgaagatcgcccaaaaaaccatggggagggagaatcctggagatacacattctgtgcaaaaatggcaccgggcttttccgaggaagaagaggaaaaaacctgccacctgtaaacaggagctccccaagcttatggaccttcacggcaaagggcctacaggcgagaaacccttcaagtgccaggaatgcggcaaatcctttcgggtgagttctgatctgattaagcaccacagaattcacacaggagaaaagccatataagtgtcaacagtgtgatagacggtttcggtggtcgagcgaccttaacaaacattttatgacccatcagggcatcaagccttaccgctgctcctggtgcggaaagtcgttcagccataacactaatttgcacacacaccaaaggatccacacgggggagaagccttttaaatgtgacgaatgcggtaaacgatttattcagaactcacatctgattaagcatcagcgcacacatactggggagcaaccatacacatgctctctatgtaagaggaatttttcacgacgatcaagtctcctgaggcaccagaaacttcatcgcagaagggaggcgtgcctggtttcaccaaattag

SEQ ID NO: 247799 - DNA, 1548 bp, synthetic construct
  misc_feature 1..1548: note = Description of Artificial Sequence: Synthetic coding sequence
  source 1..1548: mol_type = other DNA
atggagtctctggggcttcatactgtgacactcagcgacggaacgacagcctatgttcagcaggccgtaaaaggcgaaaagctgttggaggggcaggtgatacaactggaggacggcactactgcgtatattcatcaagtcaccgttcaaaaggaggccctgtcttttgaagacggccaaccggtgcagcttgaagacgggtccatggcttacatccatcgtacacccagggagggctatgatccttctaccctcgaggccgtacaattagaagatggatctaccgcatacatccatcatccagtggctgtcccctcagaatctactattctggcagtccagacagaagttggcttggaagatctcgccgcagaagatgacgaggggttcagtgcagacgctgtggtcgctttggagcagtacgcgagtaaagtgttacacgacagccagataccccgaaatggcaaggggcaacaagtcggcgatcgagcttttcgctgcggctataaaggttgcggaaggctgtacacaactgcccaccacttgaaggtgcatgaaagggcccacacaggcgatcgcccttaccgctgtgacttccccagctgcggcaaggcatttgctacgggctacggattgaaatctcacgttcgcactcacaccggcgaaaaaccatacaaatgcccagaggagttgtgcagcaaggcctttaaaacttccggcgacctgcagaagcatgtgcggacccacactggcgagaggccgtttcagtgtccgtttgaaggctgcggcaggtccttcaccaccagcaacatccgcaaagttcacgtacggacccatacgggtgagaggccctatacatgccctgaacctcattgcgggcgaggattcacttctgctaccaactataagaatcacgtgcgtattcatactggcgagaagccatatgtctgcacagtgccaggctgtggaaaacggttcacagagtattcttcactttacaagcaccacgttgtccacactcactgtaagccatacacttgtagcacatgcggtaaaacgtataggcagactagtaccctggccatgcacaaaaggtcggcccatggcgagctggaagcaacagaggagtcagagcaagcactctacgagcagcagcagctggaagctgcttcagcagccgaggagagcccacccccaaagcggccacgcatagcctacctctctgaggtcaaggaagagcgcgacgatataccagctcaggttgctatggtgaccgaagaagatggagccccacaggtggctctgatcacacaggatggggctcaacaagtcacaatcatcacatccggcgctgtggtggctgaggattcatctgtcgctagcttgcgccatcagcaggtggcgcttctggccacagccaatggcactcatattgctgtacagttagaggaacagcagactctggaagaagccatcaatgtggcgaccgccgctatgcaacaaggcgcagttacgctagagaccaccgtgtctgagtctggatgttag

SEQ ID NO: 247800 - DNA, 1713 bp, synthetic construct
  misc_feature 1..1713: note = Description of Artificial Sequence: Synthetic coding sequence
  source 1..1713: mol_type = other DNA
atggaatcactgggtctgcacacagttacgctgtccgatggaacaaccgcttacgttcaacaggccgtgaaaggtgagaagcttctggaaggccaggtcattcagcttgaggacggcacgaccgcatatattcaccaggttactgtgcagaaggaggctctgtcgttcgaagacgggcagcctgtgcaattagaggatggcagcatggcttacattcaccgaacacccagagaaggttacgatccaagcacgctggaggctgtgcaattggaggatggatccactgcttatatccaccaccctgttgccgttccctccgagtccactatcctggctgtgcagactgaggtcggcctggaggatctcgcggcagaggatgatgaaggattctccgcagatgctgtagtcgccctggagcagtatgcatccaaggtgctccatgattcccagattccacgaaacggcaaggggcaacaggtgggcgatagagcatttcgttgtggctacaaaggatgcggccgattgtacacaacagcccatcacctgaaagtccacgagcgggctcacaccggtgatcggccatatcggtgtgacttcccctcttgcggtaaggccttcgcaacagggtatgggctgaagagccacgttagaactcataccggagagaaaccgtacaagtgccctgaggagctgtgctcaaaagcctttaaaacaagcggagacttgcaaaagcacgtgagaacccacactggcgagcgccctttccaatgccctttcgagggatgcggacggagcttcactacgagcaacatcaggaaggtgcatgtgaggacccataccggtgagcggccatacacctgtcccgagccgcattgtggcagagggttcacttctgcaactaattacaagaaccatgtccgaatacacactggcgagaagccctatgtgtgtacagtgcccggatgcggaaagcggtttacagagtatagctctctgtacaaacatcacgtggtgcacacacactgcaaaccctacacatgctcaacctgtggcaaaacgtacagacagacaagcaccttggcaatgcataagaggagcgcccacggagagctcgaggccaccgaggaatccgaacaggctctgtacgaacaacaacaactcgaggccgcaagcgcagcagaggaatctcctccacccaaaagacccaggatagcctacctgtcggaagtgaaagaggagcgggacgacatacccgctcaggtggcaatggttaccgaagaagacggcgcaccccaggtcgccctgattacccaggacggagcacagcaagtatccctgagtcccgaagatttgcaagcccttggatctgcaatttctatggtcacacagcatggctctacaaccctgaccatcccttcccccgacgcggaccttgccacatcaggcacgcatactgttaccatggtctcggctgatggaactcagacccaaccggtgactatcattacttccggcgcagtcgttgccgaagacagttccgtagcatccctcagacatcaacaggttgctctgctggcaacggcaaacggcactcatattgcagtccagctggaagagcaacaaaccctcgaggaagcgatcaatgttgccacagctgctatgcagcagggggcagttaccttagagactaccgtatccgagagcggctgttag

SEQ ID NO: 247801 - DNA, 1287 bp, synthetic construct
  misc_feature 1..1287: note = Description of Artificial Sequence: Synthetic coding sequence
  source 1..1287: mol_type = other DNA
atggagtccttgggacttcatactgttactttatcagacggaactaccgcgtatgtccagcaggcagtaaaaggagaaaaactcctggaggggcaggttattcagctggaagatgggacaacggcgtatatacatcaggtcaccgtacagaaagaggccctctcttttgaagatgggcagccagtccagctcgaggacggttccatggcatatatacatcgtactcctcgagaaggatatgacccgtctaccctggaagccgtgcaactagaagatggcagtaccgcctatatacatcatccagtcgcagtcccttcggagtccaccatcctcgcagtacagactgaggtgggcctcgaagatctggcagcagaggacgacgaggggttttccgccgatgctgtggtggctctggagcagtatgccagcaaggtactgcacgacagccagattcctcggaacggtaagggacaacaagtaggcgaccgggcttttaggtgtggctataagggttgtggaaggctctataccacggcccaccatctaaaagtccacgaacgagcccacaccggggaccgcccttataggtgtgactttccatcgtgcggcaaagcattcgcaaccggctacggcctcaaaagtcacgtgcggacccacaccggcgagaagccgtacaagtgtccagaagagctgtgctccaaagcattcaaaacttccggtgacctacaaaagcacgtgcggactcatacgggcgagagaccatttcagtgtccttttgaaggttgcggtcgcagtttcacaaccagtaacatccggaaggttcacgtacgcacacacactggggagcggccatatacttgtccagaaccacactgtggcaggggcttcacctctgccactaattacaagaaccacgtcagaattcatacaggagaaaagccctacgtctgtacagtgcctgggtgtggcaaacgttttactgagtactccagtctgtacaagcaccacgtagtgcacacgcactgcaagccctacacctgttccacgtgcggcaagacctacagacagactagtaccttggccatgcataagaggagtggtcactgcgggcacgctgccaggggttgtgaccccggagataactccgtcggcgaatggttgttgtctccaaggggactgggccctacaccctgctggaggaagtgccacttgcacggccattcatgtccccagggccctcgtctctggcttactcacagacggtggccccatcgctcccttgggtag

SEQ ID NO: 247802 - DNA, 1635 bp, synthetic construct
  misc_feature 1..1635: note = Description of Artificial Sequence: Synthetic coding sequence
  source 1..1635: mol_type = other DNA
atggagtccttgggactccacaccgtgaccctttcagatggtactacagcctacgtgcagcaagccgtcaagggggagaaattactcgaaggtcaggttatccaactggaagatggtacaacagcgtatatccatcaggttaccgtgcagaaggaaggttatgacccatctaccctcgaagcagttcagctcgaggacggatccacagcatacattcatcaccccgtagctgttcccagtgagtcgacgatcctggctgtccagacagaggtcggtctggaggacctggcggcagaagatgatgaaggattctccgctgatgcggtcgtggctttggagcaatacgcaagcaaagtgctgcatgacagtcagatcccacgcaatggaaaggggcagcaagtgggggatcgggctttcaggtgtggctacaaaggttgcggccgtttgtatactaccgcgcaccatctgaaggttcatgagcgtgctcacacaggcgacaggccatatcgatgtgattttcctagttgcggcaaggctttcgcgactggctacggactgaaatctcatgttagaacacacacaggagaaaagccctacaagtgtccagaggaactgtgctccaaggccttcaagacctctggggaccttcagaagcatgtcagaacccacaccggggaaaggccctttcaatgcccttttgaggggtgcgggcgttccttcacaacatctaacatcagaaaagtccatgtgaggacccacacgggggaacgcccatatacttgccccgaaccccattgcggcaggggtttcacttctgccacaaactacaagaatcacgttcggatccataccggagagaaaccttacgtgtgcactgtgccaggatgtggtaaacgctttaccgagtactctagcctttacaagcatcatgttgtacatacccactgtaagccatacacttgcagtacgtgcggcaagacataccggcagacctctaccctggctatgcacaagagaagtgcacatggggaactggaagcaaccgaggagtccgagcaggctctttatgaacagcagcagctggaagctgcgagtgctgcggaggaaagcccaccacctaagcgaccgaggatcgcttacctgtccgaggttaaggaggaacgcgatgacattcccgcacaggtggcaatggtgacagaggaagatggggctccccaggttgctctgatcacacaggacggtgcccagcaagtgtccctcagccctgaggacctgcaggcactaggctctgctatttctatggtgacacagcacggaagtactactctgaccatcccaagtcccgatgccgacctggctacgtccggcacccataccgttacaatggttagcgcagacgggactcagacccagccagttaccattattacctcgggcgcagtcgtagcggaggacagcagcgtcgctagtttacggcaccaacaggtagcactcttggccactgccaatggaacgcacatcgcagtgcagctagaggagcagcagacgttagaggaggccattaacgttgcaactgctgcaatgcagcagggagccgtgacccttgaaactacagtgtcagagtcgggatgttag

SEQ ID NO: 247803 - DNA, 1209 bp, synthetic construct
  misc_feature 1..1209: note = Description of Artificial Sequence: Synthetic coding sequence
  source 1..1209: mol_type = other DNA
atggagagcctgggcctccataccgtgaccctttcagacggtactactgcctacgtgcagcaggccgttaagggggagaagctcctggagggacaggtgatacagctggaggacggaacaactgcttatatccaccaggtgactgtgcagaaggaggccctctcattcgaagatggccagcccgtgcagttggaggacggatcgatggcttatatccataggacccccagagaagggtacgacccaagcacgttggaggctgtgcagctggaagacggaagcacagcttatatccaccatcccgtggccgtgccatcggaatctaccatactggcagttcagacagaggtgggactcgaggatctggctgccgaggatgacgagggtttcagcgccgacgcggtagtggctctggagcagtatgcctcaaaagtcctgcatgatagccaaatccccaggaacggtaagggacagcaggtgggcgaccgtgccttccggtgtggatacaagggatgcggccgactctatacaaccgcccaccatcttaaagtgcatgagcgggcacatactggggacagaccgtaccgctgcgattttccatcctgcggcaaggcttttgccaccgggtatgggctgaagagccacgtgcgcacgcataccggcgagaaaccttacaaatgcccagaggaactttgcagcaaggcctttaagacaagcggtgacctgcaaaagcacgttaggacgcatacaggcgagcgtcccttccaatgcccattcgaaggatgtggccgttcatttacaaccagcaacatccggaaagtgcatgtcaggacccacacaggagagagaccctacacctgccccgaaccacactgcggcagggggttcaccagcgcaacaaattacaagaatcacgtcaggatccacaccggcgagaagccgtacgtatgtactgtgcctggttgtggaaaaagatttacagaatactcatcactttacaaacatcacgtcgtgcacactcaccattgcggccatgcagcaagggggtgtgatcctggtgacaattcagttggagagtggcttctcagccctagagggctgggccctacaccctgttggcgaaagtgtcacttgcacggtcactcgtgtccccaaggccctaggctctggctgactcatcgcaggtggccacatcgtagcctagggtag

SEQ ID NO: 247804 - DNA, 1023 bp, synthetic construct
  misc_feature 1..1023: note = Description of Artificial Sequence: Synthetic coding sequence
  source 1..1023: mol_type = other DNA
atggaatcgttaggcctacacacagtgaccctctctgatggtacaacagcttacgtgcagcaagctgtcaaaggagaaaagctgctggaagggcaggtaatccaactggaagatgggacaacagcctacattcatcaggtgactgtgcaaaaggaagccttatctttcgaggatggtcagcccgtccagcttgaggatggcagcatggcctatattcatcgcactcctagggagggctacgacccaagcacgctggaggctgttcagctcgaggatggatcaacagcctatatccaccatcccgtcgccgtgccctctgagtcaaccatcctggcagtgcagactgaggtaggactggaagatctagcagccgaagatgatgagggcttttctgctgacgctgtggtcgcactggagcagtacgctagtaaggtcctgcacgattcacagatcccaagaaacgggaagggtcagcaggtgggggatcgggctttccgctgtggttacaagggctgcggcagactgtataccaccgctcaccatctgaaggtccacgagcgggctcatacaggcgatagaccttatcgatgcgacttcccatcctgtgggaaagccttcgccacaggatatggcctgaagtctcacgtccgcacccatacgggggaaaagccttacaaatgccccgaagagctctgctctaaagcttttaagactagtggtgatcttcagaaacatgtcaggacccacactggcgaaagaccttttcagtgccccttcgagggctgtgggcgttcctttaccacctccaacatcaggaaggtccacgtgcggacgcataccggggagagaccctacacctgtccagaacctcactgtgggaggggcttcacgtccgcgactaactataaaaaccatgttagaatacataccggagaaaaaccatatgtgtgtacagttccaggatgtgggaagcgctttaccgagtactcgtcgctatataagcatcatgtggtgcatacatag

SEQ ID NO: 247805 - DNA, 1638 bp, synthetic construct
  misc_feature 1..1638: note = Description of Artificial Sequence: Synthetic coding sequence
  source 1..1638: mol_type = other DNA
atggactgcgtcatattcgaggaagtggccgttaattttacacccgaagagtgggccctcctcgatcacgcacagcgttctctctacagggatgtcatgcttgagacttgccgcaacttagcctccctggactgctatatttacgttagaacgagtggcagttcctctcagcgggacgtgtttgggaacgggatctcgaatgacgaggagatcgtgaagtttaccggcagcgactcgtggtctatctttggagaaaattggcgcttcgataacactggtgaccagcaccaaatcccccagcgccacctgaggagccagcttgggaggttgtgcgaaagcaatgaaggccaccagtgtggcgagactttgtcacagacagctaacttgctggttcacaagtcttatcctacggaggcgaaacccagtgagtgtactaagtgtgggaaggcatttgagaaccggcagcggtcacacactggccagcgcccttgtaaagagtgcggacaggcttgtagctgcctgagctgccaatcaccgccaatgaaaacccagacggtggagaaaccctgtaactgccaggactccagaaccgcctcagttacctacgtaaaatccctctctagcaaaaaatcttatgaatgccagaagtgcggaaaagccttcatctgcccatcttcgtttcggggacatgtaaacagtcaccacggccagaagactcacgcatgtaaagtgtgtggaaaaaccttcatgtattacagctacctgacacggcacgtacgcacgcatactggcgagaaaccttatgagtgcaaggaatgtggcaaagccttctcttgcccctcttacttccgcgagcatgtcagaacccatactggggagaagccctacgagtgtaagcattgcggaaaaagcttctcttgttattctagcttccgagaccacgtcaggacacatactggtgaaaagccctgtcagtgcaagcattgcggaaaggcctttacatgctattcctcccttcgggagcacggacgaacccacagcggggagaaaccatatgagtgcaaggaatgcgggaaagccttccgctacccctcatccctccgggctcatatgagaatgcatactggagagaagccctacgtgtgcaagcagtgcggcaaagcctttgggtgccctacctacttccggagacatgttaagactcacagcggagtgaaaccctaccaatgcaaagagtgtggcaaagcgtactcattctccagctctcttcgaatccacgtccggacacatacgggagaaaagcctttcgagtgcaagcactgtggaaaagctttctcctgccactccagcctccgtgagcatgtcagaacccacagcggcgagaagccctatgaatgtaaccagtgtggaaaagctttttcgcacgctcagtattttcaaaaacatgtgaggtcgcattccggggttaaaccctatgagtgtacggagtgcggaaaagcatactcttgcagttcttctctgcgagttcatgttagaacgcatacgggagaacggccatacgaatgcaaacagtgcggaaagaccttccgctatcttgcgtcgctgcaagcccacgtacgaacccatgcgggagcttag

SEQ ID NO: 247806 - DNA, 1308 bp, synthetic construct
  misc_feature 1..1308: note = Description of Artificial Sequence: Synthetic coding sequence
  source 1..1308: mol_type = other DNA
cggctctgtgaatctaatgagggccaccagtgcggggagaccctgagtcagactgccaatttacttgtgcataaatcgtaccccacagaagcaaagcccagcgagtgtaccaagtgcggcaaaacctttatgtactatagctatctcacccgccatgtgcggacacacaccggagagaagccatatgaatgcaaagaatgtgggaaggccttcagctgcccgagttacttccgggagcatgttcggacacacactggcgagaagccttacgagtgcaagcactgcgggaagtccttctcatgttactcatcgtttcgcgaccacgtcaggacacacacaggagagaagccatgccaatgtaaacactgcgggaaggcctttacttgctactcgagtctgagggaacacggtcgtacccattccggggagaagccctacgaatgtaaggagtgcgggaaagcgtttcgatatccttctagcctaagggcccatatgcggatgcatactggcgagaaaccatacgtgtgtaaacagtgtggaaaggctttcggatgcccgacttactttcggaggcacgtcaagacccatagtggggtgaagccataccagtgtaaggagtgtggcaaggcctattctttctcgagctccctgaggatacacgtccggacacacacaggtgaaaaacccttcgaatgtaagcattgtggaaaggccttctcatgtcacagctccctccgggaacatgtgcgcacacacagcggggagaagccttacgaatgcaaccaatgtggaaaagcctttagccacgcccaatattttcagaaacatgttcgatcccacagtggtgtcaaaccctatgaatgtacagagtgcgggaaagcctattcctgttcttcatctctgagggtgcatgtacgaacgcacactggggaaaggccttatgagtgcaagcagtgcgggaagaccttcagctggccttctgacctgagagtccatatgcgaactcatagcggcgaaaagcgatgcgggtgcaagcagtgtggcaaaagctttagcagcccatcttcctttaaaggacacatcaggacccacacaggggagaaattatacacctgccgggagtgtggtaaggtattttcctctcccagttattttagaacccaggttcgaattcatatcggtgaaaaaccctacgtgtgtgagcaaagaggaaaagtgttttcttggtctagttcatttcggggacatttgaggacacatagtagagaaaaaccctatgaatgcaaagagtgtactaaagctttctag

SEQ ID NO: 247807 - DNA, 1497 bp, synthetic construct
  misc_feature 1..1497: note = Description of Artificial Sequence: Synthetic coding sequence
  source 1..1497: mol_type = other DNA
atgttagaggaaggagtgctgccaagtcctggtccagccctgccccaggaggaaaataccggagaagaggggatggcagcgggtctgctgaccgccggacccagggggagcaccttttttagttcagttacggtggcgttcgcacaggagcgttggcgttgtctggtgtctaccccccgtgacaggttcaaggaaggtatccccggtaagagccggtctcttgtactgctgggcctgccagtgagccagcctggcatgaactcccagctggaacagagggagggagcatggatgttggagggagaagacctccggtcacccagtcccggatggaagatcatttctgggagcccccctgagcaagcccttagtgaagcatcctttcaagacccctgtgtggagatgcctcctggcgactccgatcacgggacgagtgacctggaaaagagctttaacctgagacctgtgctgagcccccagcagcgagttcctgtcgaagccagacctagaaagtgtgagactcatacagagtcatttaagaacagtgagatacttaagcctcaccgcgctaagccatacgcctgtaacgagtgcggtaaagcatttagctactgttcctcactgtctcagcatcagaaaagccacacaggagaaaagccctatgagtgctctgagtgcgggaaggccttcagccagtcatcatccttgatccagcatcagcgcattcacaccggggaaaagccatacaaatgttccgagtgtgggagggcattttcccaaaacgcgaaccttaccaaacaccagcgaacccacactggggaaaaaccctaccggtgtagcgagtgcgagaaggcattctccgattgcagcgccctcgtccaacaccaacgtatccataccggggagaagccgtacgaatgtagcgactgtggtaaggccttccgccattccgccaacctgacgaaccaccagcgtacacatactggtgagaaaccctacaaatgcagtgagtgcggcaaggctttctcctattgtgcagcctttattcaacatcagaggatccacaccggcgagaagccctataggtgcgccgcttgtgggaaggcattcagtcagagtgcaaatctcacaaaccatcagaggacccacaccggtgagaagccctacaagtgcagcgaatgtggtaaagcctttagtcagtccacgaatcttattatccatcagaagacgcatacgggtgagaagccttacaagtgtaatgaatgtgggaaatttttttctgagtcttctgctctgattcgccatcatatcattcacactggagaaaagccctacgagtgtaacgagtgcgggaaagccttcaaccagagctcttcccttagccagcatcaacgaatccacactggagtcaaaccttatgagtgttcagagtgcggaaaagcattccggtgtagctccgctttcgtgcgccatcagagactgcatgctggagaatag

SEQ ID NO: 247808 - DNA, 1425 bp, synthetic construct
  misc_feature 1..1425: note = Description of Artificial Sequence: Synthetic coding sequence
  source 1..1425: mol_type = other DNA
atggccgcaggcctcctgacagccggacctaggggatctactttcttttctagcgtcacggtggcattcgctcaagaacggtggcggtgtctggtgtctacgccacgagaccgcttcaaggagggtattcctggaaaaagccgttcgctggtcctgctgggactaccagtgtcccaacccggaatgaactctcagctcgaacagagagagggagcatggatgttggaaggagaggatctgaggtcaccgtcaccaggttggaagataatatctggatctcccccagaacaggctctgtctgaggccagcttccaggatccttgcgtcgaaatgccccctggtgactctgatcacggtacatcagacctcgagaagtctttcaacctcaggcctgtgctctccccccaacagagggtgcccgtggaggcaagaccaagaaagtgtgagacgcacaccgagtcattcaagaactctgagatcctgaaaccccacagagctaagccctatgcttgtaacgaatgcgggaaggcttttagctattgcagctcgttgtcccagcaccagaagtcgcatacaggcgaaaaaccctacgaatgctccgaatgcggaaaggccttctcccaaagcagctcactcatacaacaccagcgcatccataccggggagaagccttacaagtgcagcgagtgcgggagagccttcagtcagaacgccaacctgaccaagcatcagcgcacacacacaggagagaagccatacaggtgttcagagtgcgagaaggccttcagcgattgctctgcacttgtgcagcaccagcgtatccacacaggcgaaaagccttacgagtgctctgactgcggcaaggctttcagacattctgccaatctgactaatcaccagcgaactcatactggcgaaaagccatataagtgtagtgagtgcggcaaggctttttcttattgcgccgcttttatccaacatcagagaatccacaccggggagaagccttacaggtgtgcagcctgcgggaaagccttctctcagtccgccaacctgactaaccaccaaaggacccacacaggtgagaagccttacaaatgctcagagtgtggcaaggccttttctcagtcaactaacctgataatacaccaaaaaacacacactggggagaaaccctataagtgtaacgagtgtgggaagtttttctctgagtccagcgcactcatacggcaccacatcattcatactggcgaaaaaccatatgagtgcaacgagtgtggcaaggcttttaaccaatcatcttctctgagccaacaccaacgcatacacaccggcgtcaagccctatgaatgttcagagtgtgggaaagcattcaggtgctctagcgcgtttgtccggcaccagcgtcttcacgcaggcgagtag

SEQ ID NO: 247809 - DNA, 1728 bp, synthetic construct
  misc_feature 1..1728: note = Description of Artificial Sequence: Synthetic coding sequence
  source 1..1728: mol_type = other DNA
atggatcccgaagacgaaggcgtcgccggtgtcatgtcagtcggccctcccgctgccagactgcaggagcctgttactttccgggatgtggccgtcgacttcacacaagaggagtggggccagctggatcctacacagaggattctgtatcgggacgttatgctggaaacatttggccatctcctgtcgattgggcctgaactgcctaaacctgaagtgatatcccaattagaacagggtacagaactctgggtggcggaaaggggcacaacccagggttgccacccagcttgggagcctcggtccgagtcccaggcgagtcgcaaagaagagggactgcccgaagaagagccaagtcatgtgaccgggagggagggcttccctaccgatgccccatatccaacaaccctcggtaaggatcgggagtgccagtctcagagtcttgccctgaaggagcagaataacctgaagcaactggagtttggattgaaagaggcaccagtgcaggatcagggctacaagaccctccgcctgcgcgaaaactgcgttctgagttcaagccctaacccctttccagagatttctaggggagagtatctctacacatacgattctcagattactgattctgagcataactccagcctggtgtctcagcagaccggatctcctggaaaacagccaggcgagaactcagattgtcatcgagattcatctcaagccatacccataacagaacttaccaaatctcaggtgcaggataagccctacaaatgtacagactgcggaaaatcatttaaccacaatgcgcatctgactgtgcataagagaatacacacgggagagcgcccttatatgtgtaaagagtgcggcaaggctttttcccagaattccagcctagtccagcatgagagaatccataccggggacaagccgtacaaatgtgctgagtgtggcaagagtttttgtcacagtacccacctgacggtccatcgtaggattcataccggggaaaaaccctacgaatgtcaggactgcggtagggcattcaaccagaactcttcactcggcagacataagcggacacacaccggggagaaaccttatacttgctcggtgtgtggcaagtcctttagtcgcacaacatgtctgttcttacacctcagaactcatacagaggaacgaccctacgaatgcaatcattgtggaaaaggatttcgacacagtagttccctcgctcagcatcagaggaaacacgctggtgagaagccctttgagtgcagacagcgactcatttttgagcagactcccgctcttacaaagcatgagtggacggaggcactgggatgcgaccccccactgagccaggatgaacgcacgcaccgtagcgacaggcccttcaagtgcaatcagtgcggcaagtgtttcattcagtccagtcaccttatcagacaccaaatcacacataccagggaggaacagcctcacgggagaagtcggcgtagagaacaatccagttctagaaactctcacctggtgcagcaccaacaccccaatagccgcaagagctcggccggaggcgctaaagccggacagcctgaaagcagagcgcttgcactgttcgacattcaaaaaattatgcaagaaaaaaatccagttcacgtgatcggggtggaagagcccagcgttggggcatccatgctgttcgacatccgagaatcgacctag

SEQ ID NO: 247810 - DNA, 519 bp, synthetic construct
  misc_feature 1..519: note = Description of Artificial Sequence: Synthetic coding sequence
  source 1..519: mol_type = other DNA
atggacccagaagatgaaggtgttgctggagtcatgtctgtgggacccccagctgcacgcctacaggtgacaatcaccaccataacgacagctgctggaagtggccaagctagcccagcacagaccgaccctttcacaagtcgcagggacgaatccggcaccgcagttaacgcgctggacacatgggggaactctgatgcgggacgaggagtggttacagtgctggctggccagcgcggaggacgcgatagtaaccaagccccaggacctcgtatgaggatgctccatgccgctctatcctcaccagcgccacgctctccttgtccaggcgcttgggctcagccactcggcggtaatgacggatccccaagaactgaatgcgatgaatctgaccaccagggaaggcccctgcgagactgcggcaggactgcggttcaaggagggcagtgtctccaaggccatttggcaatacgcgcacctctgtccaggcaaagtggctgtggcctctgttcaccatag

SEQ ID NO: 247811 - DNA, 873 bp, synthetic construct
  misc_feature 1..873: note = Description of Artificial Sequence: Synthetic coding sequence
  source 1..873: mol_type = other DNA
atgtgcaaggaatgcggaaaggcatttagtcaaaacagtagtcttgtgcagcatgagaggattcatactggagataaaccttataaatgcgccgagtgcggcaagagcttctgtcatagtacgcacttgactgtccatagaaggattcacacaggtgaaaaaccttatgaatgtcaggattgcggaagagcatttaatcagaactcgagtctaggacggcacaagcgaacgcacacgggagagaagccgtacacgtgctctgtgtgcggcaagagcttctcacgaacgacctgcctgttcctgcacttaaggacccacacagaagagaggccttatgagtgcaaccactgcgggaaggggtttcggcatagctcctccctggcccagcaccaacggaagcatgcaggcgaaaagcctttcgagtgccgccagcgcctgatttttgagcagacgccagcactcacaaagcatgagtggacagaagctctcggctgcgaccctcccttgtcacaggacgagaggacccataggagcgacagacctttcaaatgcaatcagtgtggcaaatgcttcattcagagcagccatctcatccgacatcaaataactcatactcgagaggagcagccacacggccgttcaagacggagggaacagtcctcctccaggaacagccacttagtgcagcaccagcatccaaattccaggaaaagtagtgcaggcggtgccaaggccggtcagcccgagtcccgtgcactggcactgttcgatattcaaaaaattatgcaggaaaaaaatcccgttcacgttatcggcgtggaagagccttccgtgggagcaagcatgttatttgatatcagagaatcaacttag

SEQ ID NO: 247812 - DNA, 822 bp, synthetic construct
  misc_feature 1..822: note = Description of Artificial Sequence: Synthetic coding sequence
  source 1..822: mol_type = other DNA
atgagccctaagcgggatggactcgggaccggcgacggccttcactcccaggtgctgcaagagcaggttagtactggcgataatctgcatgaatgcgactctcaaggaccaagtaaggacactctcgtgcgtgagggaaagacttataaatgcaaagaatgtgggtcagtgtttaataagaattcactgttggttcgacaccagcagatccacaccggagtgaagccttacgaatgccaggaatgcggcaaggcgttccccgaaaaagtggatttcgtccgtccaatgagaattcacactggagagaaaccctgcaaatgtgtcgagtgtggcaaagtttttaacagaaggagccacttgctctgttatagacagatacacaccggcgaaaaaccatacgaatgcagcgaatgtggaaaaacgttctcatatcactcagtctttattcaacatagagtgacccatactggcgaaaagctcttcggctgtaaagaatgtggcaaaactttttattacaacagctctctgacccgtcacatgaagatccacactggcgaaaaaccatgcaaatgctctgaatgtggaaagacttttacctataggagcgttttttttcgccatagtatgacacacaccgcaggaaagccttacgaatgcaaagagtgcggcaaagggttttactattcatactccttgactcgacataccaggtcccacaccggagagaagccttatgagtgtcttgaacataggaaggattttggctaccattcagccttcgcccagcaatccaagattcattccgggggaaagaacctttag

SEQ ID NO: 247813 - DNA, 822 bp, synthetic construct
  misc_feature 1..822: note = Description of Artificial Sequence: Synthetic coding sequence
  source 1..822: mol_type = other DNA
atgtctccaaaaagagacggactcggcaccggagacggcttacatagtcaagtactgcaagagcaggtgtctactggagataacctgcatgaatgtgacagccagggcccatcaaaagacactcttgtcagagaaggaaagacctataaatgtaaagagtgtgggagcgtgtttaacaaaaatagcctgctggttaggcaccagcagattcatacaggcgtgaagccttatgagtgccaagagtgcgggaaggcctttcccgaaaaagttgacttcgtgaggccgatgcgcatccataccggagaaaaaccctgcaaatgtgtcgaatgtggcaaggtcttcaaccggagatcccatttgctctgttatcgacagatacacacgggggagaaaccctacgagtgcagcgagtgtggaaagacattttcttatcattcagtgtttattcagcatcgggtgactcacaccggcgagaagctcttcggctgcaaagaatgcggaaagacattttactataattcttcgctaacccgacatatgaaaatccataccggcgagaagccttgcaaatgttccgaatgcggtaagactttcacctataggtcagtcttttttagacattctatgacccatacagccggtaaaccttatgagtgtaaagagtgcggcaagggattctactacagttatagcctgaccagacacacacgatcacatacaggagagaaaccatatgaatgtttggagcaccgcaaagactttgggtaccactctgcgttcgcacagcagagcaagatccatagcgggggaaaaaacctgtag

SEQ ID NO: 247814 - DNA, 3630 bp, synthetic construct
  misc_feature 1..3630: note = Description of Artificial Sequence: Synthetic coding sequence
  source 1..3630: mol_type = other DNA
atggagtgctattacattgtgattagttctacacacctgtcgaatggccacttccggaacattaaaggagtgtttcgcggtccacttagtaaaaatggtaacaaaacgctcgattatgcggagaaggagaatactatagcgaaagcactggaagacctgaaagccaacttttattgtgaactgtgcgacaaacagtattataaacaccaagagttcgacaatcacatcaatagctacgaccatgctcacaagcaaaggctgaaagagctgaaacagcgggagttcgctcggaacgttgcgagcaagagtcgaaaggatgaacgcaaacaagaaaaagcgctgcaaagacttcacaaacttgccgagctgagaaaagaaacggtctgcgctccaggatctgggccaatgtttaagtcaaccacagtgactgtccgcgaaaactgcaatgaaatatcccaaagagtggtcgtggactccgtcaacaatcagcaggacttcaagtacactttaatccactccgaggagaacacaaaggatgccaccaccgtcgccgaagaccctgaatccgccaacaactataccgctaaaaataatcaggtaggtgatcaagcccaggggatccataggcacaaaatcgggttttcttttgctttccccaaaaaagctagcgtaaaactggagagtagtgctgccgctttttccgagtactcggatgacgcatccgtgggcaaaggctttagccgcaaatccaggttcgtgccatctgcctgccacctgcagcaaagctctccgacggatgtgcttctgagctctgaagagaagaccaattcatttcacccccctgaggccatgtgtcgggataaggagaccgtgcagactcaggagattaaagaggttagtagcgagaaagatgcactccttttgccctccttctgtaagtttcaactgcagctgagctccgacgcagataactgccagaattcagtgcccctggctgaccagatccccttggagtccgtcgtgattaatgaggatatccctgtgtccggaaactctttcgagctgctgggtaataaatccacggtgctggatatgagtaatgattgtattagcgtacaggcaaccacggaggaaaacgtgaagcataatgaagccagcaccaccgaagtagagaacaagaatggccctgaaacgttggccccatctaacaccgaggaggtgaatataacaatacataaaaagacaaacttctgtaaacgccaatgcgagccttttgtcccagtgctcaataaacaccggtctacggttctccagtggccgtccgagatgttggtttacactaccactaagccaagtataagctacagctgtaatccactgtgctttgacttcaaatcaacaaaagtcaataataacttagataaaaataaacccgatctcaaagatctatgctctcagcaaaagcaagaggatatttgtatgggcccactgagcgactacaaagacgtctctaccgagggtctgaccgactacgaaatcggctcctcaaagaacaaatgctcacaagtaacgccactgctggccgacgatatcctgtcgagttcgtgcgattctgggaagaatgagaacacaggtcagagatacaagaatatcagttgcaagattagagagaccgaaaagtataactttacaaagtcacagatcaagcaggacacattggacgagaagtacaacaagatccgccttaaagagactcacgaatattggttccataagtcccggagaaaaaagaagcggaagaagttgtgccaacatcatcacatggagaaaacaaaggaatctgaaacacgatgcaaaatggaagccgagaattcctacactgagaacgccggaaaatatctgctggagccgattagcgaaaagcaatatctggcagccgagcaactgttagactctcaccagttactggataaacggccaaagtctgaaagcatctctctttccgacaatgaagagatgtgcaaaacctggaataccgagtacaatacgtacgacacaatctccagcaaaaatcactgtaaaaaaaatactattctgctcaatggccagagtaacgccactatgatccattcagggaaacacaacctgacctacagtaggacctattgctgctggaagactaagatgagcagctgctcgcaggatcaccgcagcttggttcttcagaatgatatgaagcatatgtcccaaaaccaggctgttaaacggggatataactccgtcatgaatgagagcgagcgcttttatcgtaagagaagacagcattctcattcttattcgtctgacgaaagcttgaaccggcagaaccacctgcccgaagagttcctgcgtcctccgtcaacatccgtggccccttgtaagcctaaaaaaaaacgtcgacgtaagaggggccgttttcacccaggctttgagaccctcgagctcaaagagaacaccgattaccccgtgaaagacaacagttcccttaaccccctagatcgattgatttcagaagacaaaaaagaaaaaatgaagcctcaagaagtagccaaaattgagcggaattcggaacagaccaaccaactgcgaaataaacttagtttccatcctaataacctgctgccaagcgaaactaatggcgagacagaacaccttgaaatggaaaccacaagtggcgaactctcagatgtgtccaatgacccaaccacctctgtgtgcgttgcctccgcgccaactaaagaagccatcgacaatacgctcctggagcacaaggaacgcagcgaaaacatcaatctgaacgagaaacagatcccattccaagtgccgaatatagagcgcaattttcgtcagagtcaaccaaagagttatctctgtcactatgagctggccgaagccctacctcagggaaagatgaatgagactccaaccgagtggctccgttataactctggcattctgaatacccagccgccacttccattcaaggaggcacatgtgtctggacacacgtttgtcacggctgagcagattcttgctcccctagccttacctgaacaggccctcctgattcccctggagaaccacgacaaattcaaaaatgtgccatgtgaggtgtaccagcacatcctgcagcccaatatgctggccaataaggtcaagtttaccttccccccagccgctctgccacctccgagtacacctctgcagccactcccactgcaacaaagcctttgcagcacaagcgtcactactattcaccatacggtgctccaacagcacgccgcagctgccgctgctgcggcagccgctgccgctgccggtacatttaaagtgctccagccacaccagcaattcctcagccagatccctgctctgaccagaactagcctccctcagttgagtgtgggcccagtggggccacgcctctgtccaggtaatcagccaaccttcgtggccccaccccagatgccaattatccccgcttcggtgctccatccatcccatcttgcctttccttctttaccgcatgctttatttcctagtctgctgagcccccaccctaccgtgatccccctgcagcctcttttttag

SEQ ID NO: 247815 - DNA, 210 bp, synthetic construct
  misc_feature 1..210: note = Description of Artificial Sequence: Synthetic coding sequence
  source 1..210: mol_type = other DNA
atgcccgcaaacgaggatgcccctcaaccaggtgagcatgggagcgcttgcgaggtgtccgtgtcttttgaggacgtaacagtcgatttcagccgcgaggagtggcagcaactcgactccacccagcgacgcctctaccaggacgtgatgctcgaaaactacagccacctgctcagtgtcggcaaagataaccacccagtgaagctgtag

SEQ ID NO: 247816 - DNA, 1986 bp, synthetic construct
  misc_feature 1..1986: note = Description of Artificial Sequence: Synthetic coding sequence
  source 1..1986: mol_type = other DNA
atgccggctaacgaggacgcaccccagcccggtgaacatggctctgcttgtgaggttagtgtgtctttcgaagatgtcactgtagacttcagccgggaagaatggcagcagcttgacagcacacagagaagattgtaccaagacgtgatgctggaaaactactcccatcttctctctgtgggcttcgaggtacctaagccagaggtaattttcaaacttgagcaaggggaagggccttggacactggaaggggaggctcctcatcagtcgtgctcagatggcaagttcgggatcaagccgtcccaaagaaggatcagcggcaagtctacttttcattcggagatggaaggcgaggacacgagggatgattctctgtactccatcctggaagagctgtggcaagatgccgaacagatcaaacgatgtcaggagaagcacaacaaactcctgtccaggactacttttctcaacaagaagattctcaataccgaatgggattatgaatacaaggatttcggcaaattcgtccatccttctccaaacctgattctctctcagaaaaggcctcataaacgcgacagcttcgggaaaagcttcaagcacaacctggatctccacatacataacaagagtaatgcagctaaaaatctcgacaaaactatcggtcacggtcaggtgtttacccaaaactcctcctattctcatcatgaaaacactcatactggcgtgaagttttgcgagagaaaccagtgcggcaaggtgcttagccttaagcattccctgtcccagaacgttaagtttcctataggcgagaaggctaacacatgcactgaatttggcaagatcttcacacagcggtctcacttctttgctccacagaagatacacactgtggaaaaacctcacgagctctccaagtgcgtgaatgtgtttacgcagaaaccactactctcgatttatctgcgggtgcacagagacgaaaagctgtatatctgcaccaagtgtggtaaggcatttatccaaaattccgaactgattatgcacgagaaaacccacacccgtgagaaaccgtacaaatgcaatgagtgcggtaagagtttcttccaggtgtcatccttgctgagacatcagacgacacacacaggggagaagctctttgagtgttcagagtgcgggaagggttttagcctgaactctgccctcaatattcaccaaaaaattcatacaggagaacgccaccataaatgttccgagtgcgggaaggcttttacgcaaaagagtaccctgcggatgcaccaacggatccatactggggagagatcctatatatgcactcaatgcggtcaggccttcattcaaaaggcccatttgattgctcaccagagaatccacaccggcgagaaaccttacgagtgctcagattgtggaaagagctttccctccaagagccagttgcagatgcataagaggattcacaccggagagaagccatacatctgtacagaatgcggaaaggccttcacgaaccgcagtaacctgaatacacaccagaagtcacacaccggagaaaagtcttatatctgcgctgagtgtggcaaggcatttactgacaggtccaatttcaacaaacaccaaacaatccatactggggagaagccttatgtttgcgccgactgcgggcgagccttcatccagaaatctgaacttattacgcaccagaggatacataccacagaaaagccctacaaatgtccagattgtgaaaaaagcttctcgaaaaagccccatctaaaagtgcaccagcgcatccacaccggtgaaaagccctatatatgcgccgagtgtggaaaagcatttaccgacaggtcgaattttaataagcaccagaccatccatacaggagacaagccatataagtgctcggattgtggcaaaggctttacccaaaaaagtgtcctgtccatgcatagaaacatccacacatag

SEQ ID NO: 247817 - DNA, 312 bp, synthetic construct
  misc_feature 1..312: note = Description of Artificial Sequence: Synthetic coding sequence
  source 1..312: mol_type = other DNA
atgccagcaaacgaggatgcaccccagcctggggagcatggaagcgcttgtgaggtgtccgtgtccttcgaggacgtgaccgtggacttcagtagagaggaatggcagcagcttgatagcacacagcgtaggctataccaggacgtgatgctcgaaaactactctcacctgcttagcgtgggctttgaagtccctaagccagaggtgattttcaagctcgagcagggagagggaccatggactctcgaaggggaggcccctcaccaaagctgctccggtatttcaacctatttcgtcacatctacagtgtag

SEQ ID NO: 247818 - DNA, 1986 bp, synthetic construct
  misc_feature 1..1986: note = Description of Artificial Sequence: Synthetic coding sequence
  source 1..1986: mol_type = other DNA
atgcctgctaatgaagacgcgccacaacccggtgagcacggatccgcatgcgaggtgagcgtgagcttcgaggatgttacagttgacttcagtagagaggagtggcagcagctcgactccacgcaacgcaggttataccaggatgtgatgttagagaattactcccacttattgtccgtagggtttgaggttccgaaacccgaggtcatcttcaaacttgagcagggcgaaggcccttggacattggagggggaagcccctcatcagagctgtagcgatggaaaatttggcatcaaaccaagccagcgccgaatctcaggaaagagcacgtttcactcagagatggagggcgaagatactcgtgacgattccctctacagtattttggaagagttgtggcaagacgctgaacagattaaacgatgccaggagaaacataataagctgctgtctcgcaccacttttttgaataaaaagatcctgaacacagaatgggactacgagtataaggacttcggaaagtttgtccacccctctcctaatctgatcctgtctcagaagagaccccataagcgcgatagtttcgggaagtcatttaagcataatctggacctgcacattcacaacaagtctaacgctgctaagaacctggacaaaactatcgggcatgggcaagttttcacccagaatagttcctacagtcaccatgagaatacacacaccggcgtgaagttctgcgaaaggaaccagtgcgggaaggtgttatccctcaagcactctttgagtcagaatgtgaagtttcctataggggaaaaggccaacacctgtaccgagtttgggaagatctttacacagcggagtcacttctttgccccacaaaaaatccataccgtcgaaaaacctcatgagctttccaagtgtgtaaatgtattcacacagaaacccctgctctcaatttatctcagagtgcatagagatgaaaaactgtatatctgtactaagtgcgggaaggcctttatccagaattcagagttaataatgcacgagaagacgcacacccgcgagaagccttacaagtgcaacgagtgtgggaagagtttttttcaagtgtcctcactgctccggcatcagacaacacacacgggagagaagctgttcgagtgctccgagtgcggcaagggcttcagcttgaattcagcactgaatattcatcagaaaattcatacgggtgagagacaccataagtgcagtgagtgcggaaaagcattcacccagaaatcgactttgcgcatgcatcagaggattcacacgggggagagaagttatatctgcactcagtgcggccaagcctttattcagaaagcccatttaatcgctcaccagcgcatccacaccggggaaaagccctatgagtgctcagattgcggcaaaagcttcccatccaagtcccagctgcagatgcacaaacggatccatactggagagaagccttatatttgcactgagtgcggcaaagcttttactaacaggtccaatctgaatacccaccaaaagtctcacacgggtgagaaatcttatatttgtgcggaatgcgggaaagctttcactgaccggtctaactttaacaagcaccagaccattcacaccggtgaaaagccttatgtatgcgcggactgcggccgtgcattcatccaaaagtccgagctgattactcaccagcggatccatactactgaaaagccctataaatgccccgattgtgaaaagtcatttagcaagaaaccacacctgaaagtccaccagagaatccatacaggcgagaagccctacatttgcgcggagtgtggtaaagcatttactgatcggagcaattttaataaacatcagaccatccacaccggagacaagccttacaagtgctctgactgcggcaagggcttcactcagaagagcgtcctctccatgcacagaaatatccatacttag

SEQ ID NO: 247819 - DNA, 369 bp, synthetic construct
  misc_feature 1..369: note = Description of Artificial Sequence: Synthetic coding sequence
  source 1..369: mol_type = other DNA
atgcccgctaacgaggacgctccacaacctggtgagcacggtagcgcatgcgaggtcagcgtgtcgtttgaggacgtgaccgttgatttctcgcgggaagaatggcagcagctagactccactcagagacgcctgtatcaggacgtaatgctcgagaactactcccatttattgtcggtcggattcgaggttccaaagcctgaagtaatctttaaacttgaacagggagaaggaccatggaccttggaaggcgaggcgccacaccaaagctgttccgacggtaagtttggaatcaagccttcccaaagaagaatatctgggaagtcgacattccactcagaaatggagggagaggacacactttgttag

SEQ ID NO: 247820 - DNA, 1551 bp, synthetic construct
  misc_feature 1..1551: note = Description of Artificial Sequence: Synthetic coding sequence
  source 1..1551: mol_type = other DNA
atgcatggtcggaaggacgatgcacagaagcagccggtgaaaaaccaactcggcctgaatccccagagccacctccccgagttgcagctgtttcaggcagagggaaaaatctataagtatgatcacatggagaaaagcgtgaactcttcatccctggtttcccccccacagcggatttctagtacagtcaagactcacatatcccatacttatgaatgtaatttcgtggacagtctctttacacagaaagaaaaagcaaatattggcacagaacactataaatgctctgaacggggtaaggcgtttcatcaaggcctacacttcacaattcatcagatcatccacactaaggaaacacagttcaagtgcgatatctgtgggaagatttttaataaaaagtccaacctggcctcccaccagcggatccataccggggaaaagccatacaaatgcaatgagtgtggtaaagtgttccacaacatgagtcacctggctcaacatcggaggatccataccggggaaaaaccctacaaatgcaacgagtgcggcaaagtttttaatcagatctcccatttggcgcagcaccaacggatacacaccggcgagaagccttataagtgtaacgaatgcggaaaagtcttccaccagatctctcacctcgcacagcataggactatccacacaggggagaaaccttatgaatgcaataagtgtggcaaggtattctccagaaacagctacctcgtgcagcatctgattattcacacgggagagaaaccttatcgttgcaacgtgtgtggcaaagtgttccatcatatctctcacctggcgcaacatcagagaatccacaccggcgaaaaaccatataagtgtaatgagtgcggcaaggtgttctctcataaaagctccctcgtgaaccattggaggattcacacaggggagaagccttacaaatgcaatgaatgtggaaaagtgttctctcataaatcttccctggtgaatcactggcggatccacactggagaaaagccatataaatgtaacgaatgtggcaaggtattctcccgaaattcctacctcgctcaacaccttattattcatgccggtgagaaaccttataagtgcgatgagtgtgataaggcattctctcagaattcacatctagtccaacaccatcgcattcacacaggagagaagccctataaatgcgatgagtgcggcaaagtattctcccagaatagctacttggcctaccactggaggattcacactggggaaaaggcctacaagtgcaatgaatgcggaaaagtgttcgggctcaactcaagtcttgcgcatcacagaaaaatacacacgggagagaagccattcaagtgtaacgagtgtggaaaagccttcagcatgagatcttcgcttactaaccatcacgctattcatactggcgagaaacatttcaagtgcaatgaatgtggcaagctgttccgggacaatagttacctcgtgcgtcatcagcgattccacgccggaaagaagtccaacacttgtaactag

SEQ ID NO: 247821 - DNA, 1467 bp, synthetic construct
  misc_feature 1..1467: note = Description of Artificial Sequence: Synthetic coding sequence
  source 1..1467: mol_type = other DNA
atgcatgggagaaaggatgatgctcagaagcagccagtcaagaatcaactaggcctgaatccgcagagccacttgccagaactacagctgttccaagccgaaggtaagatctacaagtacgaccacatggaaaaatcagtgaactccagctctctcgtgagtcccccacagaggataagctccacagtgaaaactcacatctctcacacttatgaatgtaactttgtggatagtctgtttacccagaaggagaaggccaacatcggaacggaacactacaagtgtagtgaaaggggtaaggcctttcatcaagggctgcactttacgattcaccagatcatccatacgaaagagactcagttcaagtgtgacatatgtggtaaaatctttaataaaaagtcaaatcttgcgagccaccagaggatccatacaggcgaaaaaccttataaatgtaatgagtgtgggaaggtgtttcacaatatgtcccatcttgcacagcaccggaggatacacaccggagagaagccatataaatgcaacgagtgcgggaaagtcttcaaccaaatctcccacctagcgcagcatcagaggatacacaccggcgagaaaccatataagtgtaatgagtgcggcaaggtcttccaccaaatctcacacctggcccagcatcgcacaatccacacgggagaaaaaccttatgaatgtaacaagtgcggaaaggttttcagcagaaatagttacctcgtccagcacctgataatccacaccggcgagaaaccttatcggtgcaatgtatgcggaaaggtgttcagccataagagcagcctagtgaaccactggcgcatacacactggggagaagccatacaaatgtaacgagtgcgggaaggtgttctctcataagtcttccttggttaatcattggcggattcatactggcgagaaaccatacaagtgcaatgagtgtggcaaggtcttttctcgcaacagctatctcgcccagcatttaattattcatgccggtgaaaaaccctacaagtgtgacgagtgtgacaaagctttttcccagaatagtcatctagtccaacaccacaggatccatactggggagaaaccatacaaatgcgatgaatgcgggaaggtgttctcccagaacagttatttggcctaccactggagaatccacaccggcgagaaggcttataagtgcaatgaatgcggtaaggtcttcgggctcaactcatctttagcgcaccatcgcaaaattcacactggagagaagccctttaagtgtaatgagtgtgggaaagcattcagcatgcgctccagcttgacaaaccaccacgcaatccacaccggtgagaagcatttcaagtgcaacgagtgtggcaagctgttcagggacaactcctacttagttcggcatcagagatttcacgcagggaaaaagtccaacacatgtaattag

SEQ ID NO: 247822 - DNA, 1467 bp, synthetic construct
  misc_feature 1..1467: note = Description of Artificial Sequence: Synthetic coding sequence
  source 1..1467: mol_type = other DNA
atgcatgggaggaaagatgatgcacagaagcagccggtcaagaaccaactcggactgaaccctcagagccatctcccggagcttcaactgtttcaggccgaaggtaagatctacaaatatgaccatatggaaaaaagcgtgaattcatctagcctggtcagcccccctcagaggattagcagcacagtgaaaactcacatctcccatacctacgaatgtaatttcgttgatagtctcttcacacaaaaggagaaagccaatatcggcacggaacattataagtgttccgagaggggcaaagcctttcaccaagggctgcatttcacaatccaccaaattatacacactaaggagacccagtttaaatgcgacatatgcggtaagatcttcaataagaaatctaatttagcaagccaccagagaatccacacgggcgagaaaccttacaaatgtaacgagtgcggaaaagttttccataacatgagccatttagcacagcaccggagaatccatactggagaaaaaccatataagtgcaacgaatgtggaaaggtgttcaaccaaatctctcaccttgctcagcatcaaagaattcacaccggggagaaaccatataagtgcaatgagtgtgggaaggttttccaccagatctcacacctggcccagcatcgcacgatacacactggggaaaaaccctacgaatgcaacaaatgcgggaaggtgttttcacgcaatagctaccttgttcagcacctaattatccataccggagagaagccctaccgatgtaacgtgtgcggaaaggtgttttcccataagtcctctttagtcaaccactggcggatccacactggggagaagccgtacaaatgcaacgaatgcgggaaagtcttttcacataaaagctctctggtcaaccattggcggatacacacaggcgagaaaccgtacaagtgtaacgagtgcggtaaggttttctcaagaaactcttacttagcccagcatctgataatacacgccggagaaaagccctataagtgcgacgagtgtgacaaggcatttagccaaaactcccacttggttcagcaccatagaatccatacgggggagaagccgtacaaatgcgacgaatgcggtaaggtgttctctcagaacagctacctcgcctatcactggcggatccatacgggagagaaagcctacaagtgtaacgagtgtggtaaggtgtttggtctgaacagcagcctggcacatcacagaaagatccatacaggggagaaaccgtttaagtgtaacgagtgtggaaaagccttttccatgcgtagctctctaaccaatcatcacgcaatccatacaggcgagaagcacttcaaatgcaatgagtgtgggaaattgtttcgcgataattcttatctggttcggcatcaacgctttcacgcgggaaagaaaagcaatacatgcaattag

SEQ ID NO: 247823 - DNA, 1551 bp, synthetic construct
  misc_feature 1..1551: note = Description of Artificial Sequence: Synthetic coding sequence
  source 1..1551: mol_type = other DNA
atgcacggacgtaaggatgacgcacagaaacagccggtgaaaaaccagctcggtttgaacccccagtcccacctgcctgaattgcagttgttccaggctgaggggaaaatctacaagtacgatcacatggagaagtcagtcaactcgagctctcttgtcagccctccacagaggatttcttccaccgtcaaaacccatatttcacacacctacgagtgcaattttgtggattctctttttacgcagaaagagaaggcaaatattggcaccgagcactataaatgttcagagagagggaaagcgttccatcaaggactccattttactattcaccaaatcatacacaccaaggagacccagtttaagtgcgacatctgcgggaagatcttcaacaagaaaagtaacctggcttctcatcagcgaatccatacaggtgagaagccatacaaatgcaatgagtgtggaaaggtgttccacaacatgagccacctggcccagcaccgccgtatccatactggagagaagccttacaagtgcaatgaatgcgggaaggtttttaatcaaattagccaccttgcccagcatcaaagaattcatacaggcgagaagccctacaagtgcaacgagtgcggtaaagtgttccaccagattagccacctggcacagcaccggaccatccacaccggcgagaaaccttacgagtgcaacaaatgtggaaaggtctttagccggaatagctaccttgtgcagcaccttatcattcacacgggggagaaaccctaccggtgtaacgtatgtggtaaagttttccaccacatctctcacctggctcagcatcagcggatacatactggcgaaaaaccctataagtgcaatgagtgtggcaaggtgttcagccacaaatcttccctggttaaccactggcgcattcatacaggcgagaagccctataagtgtaacgagtgtggcaaagttttcagccacaaaagctctttggttaatcactggagaatccacacaggggagaaaccttataagtgcaatgaatgcggaaaggtgttcagccgcaacagctacttggctcagcacctgatcatccatgcaggtgagaagccctataagtgtgatgaatgtgataaagctttttcccagaactcacatctggtgcagcatcataggatccacacaggggaaaaaccgtacaaatgtgacgaatgcggaaaggtgttttctcagaacagctacctggcctaccactggcggattcatactggggaaaaggcctataaatgtaacgagtgcggtaaggttttcggtctgaattcctctctggcccatcatcggaagatacacaccggtgagaagcctttcaaatgcaacgaatgcgggaaggctttcagcatgcgctcttcactaacaaaccatcatgctatccatactggcgaaaagcacttcaagtgtaacgagtgcggtaagctgttcagggacaatagctatttggtgcgtcatcagaggtttcacgcagggaaaaaaagcaacacttgtaactag

SEQ ID NO: 247824 - DNA, 1551 bp, synthetic construct
  misc_feature 1..1551: note = Description of Artificial Sequence: Synthetic coding sequence
  source 1..1551: mol_type = other DNA
atgcatggacgcaaagatgatgcccaaaaacagcctgtgaaaaaccagctaggcctaaacccccagagtcacctcccggagctccaactttttcaggccgaaggtaaaatttataagtatgaccacatggagaaatccgtcaactcttcaagcctagtcagcccgccacagcggatcagcagcacggtgaaaacacatatatcgcacacttacgagtgtaactttgtggacagcttgttcacacagaaggagaaggctaatattggcactgagcactataaatgttcagaaagaggaaaagccttccatcagggcctgcattttacaatccatcagatcatccacacgaaggaaacccaatttaaatgcgatatttgcggtaagattttcaataaaaagtccaacctcgcctcacaccaacgcatccacaccggggagaagccctataaatgtaacgagtgcggcaaggtgtttcacaatatgagtcatctcgcccagcatcggaggattcacacgggtgaaaagccttacaagtgcaacgagtgcggtaaagtgtttaaccagatcagtcacctggcccagcatcaaaggatccataccggggagaagccatataagtgcaatgagtgcggcaaggtctttcaccaaataagtcacctcgcccagcaccgaacaatccatactggggaaaaaccatatgaatgtaataagtgtgggaaagtgttcagccgcaacagttatcttgtccagcacctcataattcacacaggcgagaagccatatagatgcaacgtgtgcggaaaggtattccaccatatatcccatttggcacagcatcagagaatccataccggggagaaaccttacaagtgtaatgaatgtggcaaagtattttcccacaagtcttccctcgtcaatcactggagaattcacacaggcgaaaaaccttataagtgtaacgagtgtgggaaggtgttctcacacaagagcagcctggtaaaccattggaggattcatacgggggaaaagccctataagtgcaatgagtgcggtaaggtgttttcccgaaatagctatctggctcaacacctcattattcatgccggagaaaagccctacaagtgtgacgaatgtgacaaagctttcagtcagaactcacatttagtgcaacatcaccgaatccacacaggagagaaaccctacaagtgtgatgagtgtggcaaagtcttcagtcagaactcttacctggcataccattggaggatacacactggggaaaaagcctataagtgcaacgaatgtgggaaggtatttggcttaaatagcagccttgcgcatcaccggaagatacacaccggcgagaaaccattcaagtgcaacgagtgcggtaaggctttctcaatgcgctcctccctaaccaaccaccacgctattcacaccggcgaaaaacacttcaagtgtaacgaatgtggaaagctgtttagagataatagttacctggttagacaccagcgattccacgcaggcaagaaaagtaatacctgtaattag

SEQ ID NO: 247825 - DNA, 1551 bp, synthetic construct
  misc_feature 1..1551: note = Description of Artificial Sequence: Synthetic coding sequence
  source 1..1551: mol_type = other DNA
atgcatggcaggaaagatgacgctcagaagcagcctgtcaaaaatcaactggggttaaatcctcaatcccatttgccagaactgcagctgttccaggccgagggaaagatttataagtacgatcacatggaaaaatctgttaactcatcctcgctcgtaagtccacctcagcggatttccagtactgtcaaaacacacatctcacacacatatgaatgtaacttcgtggacagtctgttcacgcaaaaagagaaggctaacattggtactgagcattacaagtgttctgagcggggaaaagcatttcaccaaggcctgcacttcacaattcaccagattatccatacaaaggaaactcaatttaaatgtgatatctgtgggaagattttcaataagaagtccaacctggccagtcatcagaggattcatacaggagagaagccatacaagtgcaacgaatgcggaaaggtcttccacaacatgtctcacctagcacagcatcgtaggattcacacgggggaaaaaccgtataagtgtaacgaatgtggtaaagtattcaaccagatttcgcatttagcccagcaccagagaatccacacaggtgagaaaccttacaagtgtaatgaatgcgggaaagtcttccaccagatctcacatctggctcagcatcgcacaatccacaccggagagaagccttacgaatgtaacaagtgtggcaaggtgttttcacggaattcgtatttagtgcagcatctgatcatccataccggagaaaagccttatcgctgcaacgtgtgtgggaaagtgtttcaccacatctctcacctggcacagcaccagcggatccacaccggagaaaaaccttataaatgtaacgagtgcggcaaggtgtttagccacaagagttctttggttaaccattggcgtattcacaccggtgagaagccatacaaatgcaatgagtgtggtaaggtcttttctcacaagtcttcactcgtgaaccattggcggatccatactggcgaaaagccgtataaatgcaatgagtgtggcaaagtttttagcaggaacagctacctggcacagcatttaatcatacacgccggtgagaagccttacaagtgcgatgaatgcgataaggctttcagccagaattcccacctggtgcagcatcacaggatacacactggtgagaagccctataaatgtgatgaatgtggcaaggttttttcacagaacagttatctggcataccactggagaattcatactggagagaaagcttataagtgcaacgagtgcggaaaagtgttcggtctgaatagctctctggcccaccaccgtaaaatacacaccggggagaagccatttaagtgtaatgagtgtggcaaggcattttccatgcgttcgtctctcaccaaccaccatgccatccatacaggggagaagcattttaagtgtaatgaatgtggcaaattgttccgggataacagttacctggttcgccatcagagatttcacgccggaaaaaagtcaaacacatgcaactag

SEQ ID NO: 247826 - DNA, 1551 bp, synthetic construct
  misc_feature 1..1551: note = Description of Artificial Sequence: Synthetic coding sequence
  source 1..1551: mol_type = other DNA
atgcacggcagaaaagatgacgcgcagaaacagccagtgaagaatcagctgggcctgaatccccagagccaccttcccgagctgcagctcttccaggcagaggggaaaatatataagtatgatcacatggaaaagagtgtgaattcaagcagcttggtcagcccccctcagcggatcagtagtaccgtgaaaactcacatcagccatacttacgaatgtaacttcgtggatagcttattcactcagaaggaaaaggctaacattggaaccgaacactacaaatgctctgaacgtggcaaggcctttcatcaggggcttcattttaccatccatcagatcatccatactaaagaaacgcagtttaagtgcgacatttgtgggaagatattcaataagaaaagtaacttagctagccaccaaaggatccacaccggcgagaagccatacaagtgtaatgaatgtggcaaagtcttccataatatgagccacctcgcccagcatagacgtattcacaccggcgaaaagccttataaatgcaatgagtgcggaaaggtgttcaatcaaatttcccacctggcccaacatcaaagaatccacaccggagagaaaccatataaatgtaatgagtgcgggaaggttttccaccaaatcagccatctcgctcaacacagaaccatccacactggcgagaagccctatgagtgtaacaaatgcggaaaggtattttcaagaaactcatacctagtccaacacctcataatccataccggagaaaaaccttataggtgtaacgtgtgtggcaaggtgttccaccatatctctcacttggcgcagcatcagcggatccacaccggagaaaaaccgtacaagtgtaacgagtgtggcaaggtcttctcacacaaaagttcattagtgaatcattggagaatacataccggggaaaagccatataagtgcaacgaatgtggcaaggtattcagccacaagtccagcttggtcaaccactggcggattcacaccggtgagaagccgtacaaatgcaatgagtgcggcaaagtttttagcagaaatagctacctcgctcagcatctaataattcacgccggagagaaaccttacaagtgtgacgagtgtgacaaggccttcagtcagaattcccatctggtgcagcaccacaggatccacacaggcgagaagccatacaaatgtgatgagtgcggcaaggttttcagccagaactcttatctggcttaccactggaggatccacactggcgaaaaggcctataaatgcaatgaatgtggcaaagttttcgggctgaatagctcactagcccatcatcgaaaaatacataccggggagaagccattcaagtgtaacgaatgcgggaaagccttcagcatgcgatcctctctcactaatcaccacgctattcacacgggggaaaaacattttaagtgcaacgagtgcggaaagctgtttcgagataattcctacctggtgagacaccagagatttcatgcaggtaagaagtctaacacatgtaactag

SEQ ID NO: 247827 - DNA, 5033 bp, synthetic construct
  misc_feature 1..5033: note = Description of Artificial Sequence: Synthetic coding sequence
  source 1..5033: mol_type = other DNA
atggaagtgcccgaaccaacttgccccgctcctcctgcccgagaccaaccagccccaacacccggaccgccaggggctccgggaggacaggcgagtccccaccttacccttggtcctgtgctgctgcctcctgagcaaggcctagccccacccacagtctttctaaaagcccttccaataccactctaccacaccgttccccctgggggactgcagcctagggctcccctggtgacgggttctctggacggaggtaatgtgccttttattctctccccagtgttgcagccagaggggcctggacctacacaggttggtaagccagctgccccaacattaacagtgaacatcgtgggtaccctccccgtgctgtctccgggactgggcccaaccttgggcagtcctggcaaggtgcgtaacgccggaaaatacctctgcccccattgtggtcgggattgtcttaagccaagtgtcctggaaaagcacataagaagccatactggagagaggccctttccgtgtgctacatgcggtattgcttttaagacccagtccaatttatataaacaccgacgcacacagactcaccttaacaacagccggctgagctctgaatccgagggagccggagggggtttgctcgaagagggtgataaagccggtgagccaccaaggcccgagggacgaggagagtcccggtgccagggaatgcacgagggagctagtgaaagacctctgagtccaggagcgcacgtgcctctgcttgctaagaacctcgacgtccgtactgaggccgcaccttgccccggaagcgccttcgctgacagggaagccccatgggattctgccccaatggcgagtccgggactgccagcggcatctacccagccctggagaaaactgcccgaacaaaaatcaccaacagctggtaaaccttgcgcactgcagcgtcaacaggccacagcggctgaaaagccctgggacgctaaagctcccgaggggagacttcgcaaatgcgaaagtacggactctggctacctgtctcgcagcgactctgctgaacagccccacgcaccttgctcccctttacatagcctatcagagcactcggccgagtcagaaggcgagggaggacctgggccaggccctggcgttgctggggcagaacctggggcacgggaggccggtttagagctggagaagaagcgactggaggagcgaatcgcacagttaatctctcataaccaggcagtggtagatgacgcccagttggacaatgtgcgcccacggaaaaccggactctcaaagcagggctcaattgaccttccaactccttacacttataaggatagcttccattttgacatacgcgcactcgaacctggacggcgaagagctccagggccagtgagaagtacctggaccccgccagataagagccgaccacttttcttccactcagtgcctacacagctcagcacaactgtcgagtgcgtgccggtgactagaagtaactctctgccttttgtggaagggtctcgcacatggctggagccaagagaaccccgtgatccttggtcccgaacacaaaaacccctgagccctcgaccagggcctgcccgtctagggtgccgtagcggtctgtcaagcacggacgttcccagcggtcaccctcgcgcactggtgcgacaagccgcagttgaggacctgccaggcaccccgatcggcgacgctttagtaccggctgaggataccgatgcaaagagaacggcggctcgggaggctatggccggaaaaggcagagctgggggaagaaaatgtggacaacgcagattgaaaatgtttagccaggagaaatggcaagtgtacggggacgaaacctttaaacggatctaccaaaagatgaaagcgtctccacatggcggaaagaaagctagggaggtggggatgggttccggagctgagcttggatttccgttacagaaagaggccgcaggctctagcggcaccgtgcccacacaggatcgcaggaccccggtgcatgaagatattagtgccggagccaccccagagccctggggcaatccacctgcactcgaagcatccctggtaaccgaacctactaagcatggtgaaactgtcgcccgacgaggagattcagacaggcctagagtcgaagaggcagtttcttcaccggctcttggagggcgagatagcccatgcagcggatccaggagccccctggtgagcccaaacggacgtttagagctgggatggcagatgcctccggctccaggtcccttgaaaggcggagatgtcgaggcccctcgcccagtttggcccgatcccaaactggaaggaggcgcaagaggagttggggacgtccaggaaacctgtctctgggcacagaccgtcctgcggtggcccagccggggatcaggcgaagacaagttgccttcagagcgcaaaaaacttaaagtggaggacctgcattcctggaagcagcccgaacccgtatctgcagagacgccaggagggcctacccagcccgcttcactttcaagccagaagcaggacgccgatcccggagaagtaccaggtggctcaaaggaaagcgctcgacaggtgggagaaccactggagagtagcggggctagtctagccgcagcgtccgtcgcactgaaacgcgtcgggccaagggataaggctacacctctgcatccagcagcaccagcaccggcagagcacccctccctggccactccgcctcaggcccctcgggttctgtccgccctcgccgacaatgccttttcaccaaagtatctcttgcgactaccccaggctgagacccctcttcccctgcctataccctggggacccagacactcccaagattctctgtgctctagcggctggcctgaagaacgggcttcattcgtgggctctggtctggggaccccacttagtcctagtccagccagtggcccaagtcccggagaagcagacagtatacttgaggacccttcatgcagccgacctcaggacgggaggaaaggagcgcagcttgggggagacaagggcgaccgcatggcgacgtccagacccgctgctcgggaacttccgatctctgccccaggcgctccaagggaggccactagttcccctcctactccgacatgcgaagctcatctagttcaggacatggagggggattcacaccggatacaccggttgtgcatgggatcaaccctggctcgggctcggctttctggggatgtgctgaacccttgggtacccaactgggaattgggtgagccacccggtaatgccccagaggatcctagcagcggtcccctggtaggccctgatccctgcagccccctgcaacctggtagcttcctgaccgcattgacccgaccacagggagtgccccctggctggccagaacttgctttgtcctcacactctggcactagccgtagtcacagcacacgctccccccacagcacacagaacccatttcccagcctgaaggcagagccccgactgacgtggtgttgtctgtcaaggtccgtgcctcttcctgcagaacagaaagccaaagcagcaagtgtgtatctggccgtccattttccagggtcctctctgagggatgagggacctaacgggccaccaggtagtaatggcggatggacttggacaagccctggggagggaggaccagcacagatgtcaaagttttcctatcccaccgtgcctggtgttatgccacagcatcaagtaagcgaacccgaatggaaaaaaggactaccctggcgagccaagatgtcccgcggaaacagtaagcagcgcaaactgaaaatcaacccgaaaaggtataaggggaactttctgcagagctgtgtgcagctccgggcttccagattaagaactcctacatgggtgcgacggaggtcacggcatccccctgctctagaaggtctgaaaccttgtcgcacgcccggacagacatccagtgagatcgctgggctgaatcttcaagaggaaccaagttgcgctacatcagagagccccccatgctgcgggaaggaagagaagaaggagggtgactgcaggcagactttaggtacacttagcctagggacgagttctcgaatcgtaagagagatggataaacgcaccgtgaaagatatttccccaagcgccggagaacacggagattgcacgactcattcgacagctgctacctcaggccttagcctgcagagcgatacttgtcttgctgttgttaacgacgtcccactgcctcccggaaaggggcttgatctggggcttcttgagacacaactgcttgcgagccaagactccgtaagtacagatcccaagccttacatattctctgatgctcagcgcccatctagtttcggatcgaaagggacctttccccaccacgacattgcaacctcagtcgccgcagtgtgtatatccttgcccgtgcgcaccgaccatatcgcccaggagatccatagcgcagagtcccgagaccactcccaaaccgcagggcgtacccttacctcgtcttctcctgatagtaaagtgaccgaggaggggcgagcccagaccctgctcccagggcgtccctcttctggacagaggatcagcgatagcgtgccattggagagcaccgagaaaacacacctggaaatacctgcaagcggaccgtcttcagctagctctcaccacaaggagggtcgacacaaaactttctttccctcgcgtggccagtatggatgcggggaaatgaccgtcccatgtccaagcctggggagcgatggacgtaagcgacaggtgagcggactcataacaagaaaagattcagtcgtgccaagtaagcccgagcagcccatagaaatccccgaagctccatcaaagagtctgaaaaagcgctccttggagggcatgcggaaacagacacgggtggaattttctgatacaagcagcgatgatgaagacaggcttgttatagagatcta

SEQ ID NO: 247828 - DNA, 264 bp, synthetic construct
  misc_feature 1..264: note = Description of Artificial Sequence: Synthetic coding sequence
  source 1..264: mol_type = other DNA
atgggaccccttaccttccgagacgtggccattgaatttagcctcaaagagtggcagtgcctcgatacagctcaaaggaatctttaccggaatgttatgctggaaaattaccgcaacctggtgtttctcggtattacagtcagcaaaccggacctgataacctgtctagaacagggcaaagaggcatggtcgatgaagcggcacgaaataatggtggccaaaccgaccgaatcttatagtgtgacccagagtggaatgcagtag

SEQ ID NO: 247829 - DNA, 1788 bp, synthetic construct
  misc_feature 1..1788: note = Description of Artificial Sequence: Synthetic coding sequence
  source 1..1788: mol_type = other DNA
atgggtcctcttaccttcagggatgtagccatcgagttctctttgaaggaatggcagtgtctagacactgctcagaggaatctttatcgcaatgttatgctagaaaattatcgcaatttggtattcctgggcatcaccgtgtccaagcctgatcttatcacctgtctggagcagggaaaagaggcctggtccatgaagagacacgaaatcatggtggccaaaccaactgtgatgtgttcccactttgcccaagatttgtggccggagcagaacatcaaggatagttttcaaaaggtgacgcttaagcgttacggcaagtgtagacatgagaatttgcctttgaggaaaggatgtgagtcaatggatgagtgcaaaatgcataaaggcggatgcaatggtctgaatcagtgtctgaccgccacccagtcaaaaatctttcaatgcgacaagtacgttaaagttgcccacaaatttagtaattccaatcgacacgaaatccgacataccaaaaaaaagccattcaagtgcaccaaatgtggtaaatcgtttggaatgatttcgtgcttgacagaacattcccgcatccatactcgggtaaacttctacaagtgtgaggaatgtggtaaagccttcaactggagctccaccctgactaaacacaagcggatccacactggagaaaaaccttataaatgcgaagaatgtggcaaggcctttaaccagtcgagtaatctaatcaaacacaaaaagattcacacaggcgagaagccctataaatgcgaagagtgtggaaagacattcaatagattcagcacattgacaacccacaaaattattcacaccggggagaaaccttataaatgtaaagaatgtggcaaagcctttaaccgttccagcacactcacaacacatcgcaaaatacacaccggcgagaagccatacaagtgtgaggaatgtggcaaggcctttaagcagtcatccaatttaactacacataagattattcacaccggagagaaaccttataagtgcaagaagtgtggtaaagccttcaatcagagcgctcatctgactactcacgaggtcattcatactggagaaaaaccatataaatgtgagaaatgtggcaaagctttcaatcactttagccacctgacgacccataaaataattcataccggtgagaaaccttacaagtgtaaggaatgcggaaaggcatttaaacacagtagtaccctgactaaacacaaaattatccataccggagaaaaaccatacaagtgtaaagagtgcgaaaaggcgtttaaccagtcctccaagctgaccgagcataagaagattcacactggcgaaaaaccttacgagtgcgagaaatgcggcaaggccttcaaccagtccagcaatttgactagacataagaagtcccatacagaagaaaaaccctacaagtgcgaggagtgtggaaaagggtttaaatggccctccactctgacaattcataagatcatccacaccggagaaaaaccttataagtgcgaagaatgtggcaaggcttttaaccagagttctaagctgaccaagcacaaaaaaattcacactggagagaagccgtacacttgcgaggagtgtggcaaggcttttaaccagagttccaacctgacgaagcataagcggatccatacaggagaaaagccgtataagtgcgaagagtgtgacaaggcttttaagtggagttccgtgcttactaaacacaaaattattcatactggggagaagttacagatctag

SEQ ID NO: 247830 - DNA, 1689 bp, synthetic construct
  misc_feature 1..1689: note = Description of Artificial Sequence: Synthetic coding sequence
  source 1..1689: mol_type = other DNA
atgggaccactgaccttcagagatgtagctatcgagttctcgctgaaagaatggcagtgtctggacacagcacagcgaaatctttaccgcaacgtcatgctggagaattatcgcaatctcgtattcctggtgatgtgttctcacttcgcccaggacctttggcctgaacaaaatataaaggactccttccagaaggtgaccctaaaacgttacggaaagtgccggcacgaaaatctgccattacgaaagggctgcgagagtatggacgagtgtaaaatgcacaaagggggatgcaacggtctcaaccagtgtctaacagcaactcagagcaagattttccagtgtgataaatacgtcaaggtcgctcataaattcagtaatagcaataggcacgaaattaggcacacaaagaagaagcccttcaaatgcaccaaatgtggcaagagttttggaatgatttcctgccttactgaacactctagaatccacaccagggtgaatttttacaagtgcgaagagtgtggcaaagccttcaactggtcgtccactttgacgaaacacaagagaatccacaccggcgagaaaccatacaagtgcgaagagtgtggtaaggcattcaatcaatccagcaaccttatcaagcacaagaagattcacacaggtgagaagccctacaaatgcgaggagtgcggtaagaccttcaatcggttctctactctaaccactcacaaaataattcatacaggtgagaaaccatataaatgtaaagagtgtgggaaagccttcaatagatctagtacgctgaccactcacaggaaaatccacacaggcgagaaaccctataagtgtgaggaatgcggtaaagcgttcaaacagtccagtaatctgactacacacaaaattatccacactggtgagaagccctacaaatgcaagaagtgcggcaaagcttttaatcagagcgcccacctcacaactcacgaagtgatccacactggcgagaaaccctataaatgtgaaaaatgtgggaaggctttcaaccatttctcccacttgacaactcacaaaatcatacacacaggcgagaagccatacaaatgcaaggaatgtggaaaagccttcaagcacagctccactctgacgaaacataaaataatccacaccggcgagaaaccttataagtgcaaagaatgcgaaaaagcctttaatcagagtagtaagctcacggagcacaagaaaatacacacaggggagaaaccctacgaatgtgagaagtgcggtaaggccttcaaccagtcctctaacctgacccggcataaaaaatctcataccgaggagaaaccttacaaatgcgaggagtgtgggaaggggtttaaatggccttcaacacttaccatccacaaaatcattcacacaggcgaaaaaccctacaagtgcgaagaatgtggcaaggctttcaaccaatcctcaaagttgaccaagcacaagaagatacacacaggcgagaaaccctacacgtgcgaagagtgcgggaaagcctttaatcaaagcagtaacctcactaagcacaagcgcatccatactggagagaagccctacaagtgcgaggaatgcgacaaagctttcaaatggtcctcagtgctgacaaagcacaagattatccacacaggagaaaagctgcagatatag

SEQ ID NO: 247831 - DNA, 1413 bp, synthetic construct
  misc_feature 1..1413: note = Description of Artificial Sequence: Synthetic coding sequence
  source 1..1413: mol_type = other DNA
atgcataaaggagggtgcaatggactcaaccagtgcctcaccgccacacaaagcaaaatattccagtgcgacaagtatgtgaaggttgctcacaaatttagcaattcaaatcgacacgagattaggcacacgaagaagaaaccttttaagtgcacaaagtgtggaaaatcattcgggatgatctcatgtctgaccgaacactcaaggatccatactagggtcaacttctacaagtgtgaagagtgtggcaaagcttttaattggtcctcgaccctcacgaaacacaaaagaatccacacaggagagaagccgtataagtgcgaagagtgcggtaaggcgttcaatcagagttcaaacctcattaagcacaaaaaaattcacacaggggagaagccttacaaatgtgaggaatgtgggaaaactttcaaccggttttcaacgctgacaacacataagattatccacacgggcgagaagccttacaagtgtaaggagtgtggcaaagcattcaatagaagctcaaccttaaccacacatagaaagatccacaccggcgaaaagccttacaagtgcgaagagtgtggtaaagcctttaagcaatcgtccaatctgactactcacaagatcatccacaccggtgagaaaccctataaatgtaagaagtgcggtaaggcatttaaccagtcggctcacctgaccactcatgaagttatacatactggtgaaaaaccttataagtgtgaaaaatgcggtaaagcatttaaccatttctctcatttgaccactcacaagatcatccataccggcgagaagccttataagtgtaaggagtgtggaaaggcattcaaacacagcagtactctgactaagcacaaaatcatccatacaggggagaagccatacaagtgtaaggagtgtgagaaggcctttaatcagtctagcaaactcaccgaacacaaaaaaatccataccggcgaaaaaccgtacgagtgtgaaaaatgcggaaaggccttcaaccagagcagcaatcttactcgtcacaaaaagagtcatacggaagaaaaaccgtacaaatgcgaagaatgtggcaagggcttcaaatggccatcgaccctaaccattcataagatcatccacacaggtgagaagccctataaatgtgaagaatgcggaaaggcctttaatcaaagttccaagctgaccaaacataaaaagattcacacgggagaaaaaccttacacatgtgaggagtgtgggaaggccttcaaccagtcctctaaccttacaaagcacaagagaatccacacaggagaaaagccctacaagtgtgaagagtgcgacaaagctttcaagtggtcaagcgtcctgacgaaacataaaattatacacacaggcgaaaaactccaaatatag

SEQ ID NO: 247832 - DNA, 1806 bp, synthetic construct
  misc_feature 1..1806: note = Description of Artificial Sequence: Synthetic coding sequence
  source 1..1806: mol_type = other DNA
atgggtcctttagagttccgggacgttgccattgagttctccctggaggaatggcactgtctcgacactgcccagcaaaacctctaccgggacgttatgctggaaaattataggcatctggtttttcttggcatcgtagtgacgaagcccgaccttatcacttgccttgaacagggcaaaaagccctttacggtgaaaaggcatgagatgattgcgaagagcccagtgatgtgcttccattttgcgcaagacctgtgccctgaacagtctctaaaggacagtttccagaaggtcatcgtgaccagatatgagaagagagagtatggaaatttggagctgaagaaggggtgcgagtctgtggacgaaggcaaggtccacaaaagggggtacaacggacttaaccagtgcctgaccgcaacccagtccaaagtgtttcagtgtgatacttacgtgaaggtttctcacatcttcagcaattctaacagacacaaaattagggataccggcaaaaagccattcaagtgtatcgaatgcggcaaggcattcaaccagagctctacactggcaacacataagaagattcacaccggcgagattacgtgcaagtgtgaggagtgcggcaaagcctttaaccgctcaagccatcttacaagccacaaacgcattcacacaggagaaaaaagatacaaatgtgaggattgtggcaaagaactgaagtactcctcaacgctcactgcacacaaacgcattcacacaggggaaaaacggtataagtgtgaggactgcgggaaagagctgaaatactcttctacactcactgcccacaaacgcatccataccggcgaaaagccctacaagtgtgacaaatgtggccgagcttttatctcttcttctattctgtatgtgcacaagatttctcacacagaggagaaaccttacaaatgcgaggagtgcgggaaagcatttaagctcagctccatcctatcaacacacaagcgaatccacacgggcgaaaagccatacaagtgcgaggaatgcggcaaagcttttaggaggagcctggtgcttaggacgcataaacgtattcataccggagaaaaaccatataagtgtgacaaatgtgggaaagctttcatttcgagcagtctgctgtacaagcataaaatttcacactccgaaaaaaagccctacaagtgcgaggaatgtggaaaggcttttaaacgatcttcaaccctgaccatccacaaaatttctcacaccgaggagaagccctacaagtgtcaggagtgcgataaggtgttcaaaagatcttctgctttgtctactcacaagatcatccatagtggcgagaaaccatacaaatgcgaagagtgcggaaaggcgtttaagagatcttcaaatctgacgacccacaagattagccataccgaggagaagttgtacaaatgtcaagaatgcgataaagcctttaaatactcttcagccctgagtacgcacaagattatccactcaggcgagaacccttacaaatgcgaagaatgtggaaaagcctttaaaagatccagtgtgttaagtaaacacaagattatccacaccggggctaaaccgtacaagtgcgaagagtgcggaaaagcctttaaaagaagcagccagcttacaagccacaagatttcacacacaggggagaagccatacaagtgtgaggagtgtggcaaggccttcaatctatccagtgatctgaacacacacaaacgcattcacatagggcaaaaagcctacatcgtaaagaacatggccaatctttag

SEQ ID NO: 247833 - DNA, 369 bp, synthetic construct
  misc_feature 1..369: note = Description of Artificial Sequence: Synthetic coding sequence
  source 1..369: mol_type = other DNA
atgaggaagcacatcaaggagcgcgagctgtcactgatggagcaaattaaggaatttatcctggagagaaataccatgaacgtaccaacagtcggtaagccattcagtggaagacactccttgctgtccatccgtgaatttactttggggagatcacccatgaatgtgatgaatgtgggcgaaccgagtgaaaagaagccgacttgcatgatcatccgagagttcatccttgaaaaaaaccctattctggttcgcaatgtcggaaaaacctctgccgaagtgcagctgctgctgaacacccgagagttcattctcgaaatcaacagcagaaatcgggagatcaaagaattcgccgagtgtttttcatag

SEQ ID NO: 247834 - DNA, 1911 bp, synthetic construct
  misc_feature 1..1911: note = Description of Artificial Sequence: Synthetic coding sequence
  source 1..1911: mol_type = other DNA
atggctccaaggccccctactgctgcaccccaggaatccgtgacctttaaggacgttagcgtagatttcacgcaagaagaatggtaccacgtcgatcctgcacaacgaagcctttatcgcgacgtcatgctggagaattactcccatcttgtctctctaggctaccaggtaagcaagccagaggtcatctttaagctggagcagggagaggaaccctggatttctgaaggcgagattcagcgtcccttctatcccgattggaagactaggcctgaagtcaaaagttcgcacctgcagcaggatgtttctgaagtctctcattgcactcatgacctgctgcatgccaccctcgaagactcatgggatgtgtctagccagcttgatcgacagcaagagaattggaagcgccacctggggagtgaagcgtctacccagaaaaaaattataacaccacaggaaaatttcgagcaaaacaagttcggagagaactccagattgaatacaaacctggtgacacagctcaacatccccgctaggattagacctagtgaatgtgagactctgggatccaatctgggccataatgctgatctactgaatgagaataatatcctcgccaaaaagaaaccctacaagtgtgataagtgcagaaaggccttcatccatagaagcagtttgaccaaacatgagaagacccacaaaggagaaggcgcatttcccaatgggacagatcagggtatatatcccggaaaaaagcaccatgagtgcaccgactgcgggaaaacattcttgtggaagacccagttaaccgagcaccagagaatccacactggggagaagcctttcgagtgtaatgtgtgcggcaaagcatttaggcacagctccagtctgggacagcatgaaaacgcccacaccggcgaaaaaccttaccagtgttcactgtgtgggaaggcctttcaacgtagctcttccttagttcagcaccagcgcatccacactggggaaaagccttaccgatgtaatctctgcggtcggtctttcaggcacggcaccagtctgacccaacacgaagttacacatagcggggaaaagcccttccagtgcaaggagtgtggaaaggcgtttagccgatgctcttcccttgtacaacacgagaggacccacactggagaaaaaccatttgagtgtagcatctgcggccgtgcattcgggcagagcccctcattatataaacacatgaggatccacaagaggggcaaaccttaccagtccagcaattatagcatagactttaagcattcaacatccctgacacaagacgaatctacccttacagaggtgaagagttaccactgtaacgattgcggagaagatttttcacacattacagatttcactgatcatcagcggatccacacagccgaaaacccctacgattgtgaacaggcttttagccagcaggcgatcagtcatcccggagagaaaccctaccagtgcaatgtttgtggaaaagccttcaagcgcagcaccagttttatcgaacatcatagaattcacacaggtgagaagccctacgagtgcaacgaatgcggggaagccttcagtcggcgaagttcattaacgcagcacgagagaacacatactggggaaaagccatatgagtgtatagactgcggcaaggcattctcgcagtctagctcacttattcagcatgagagaacacataccggagagaagccttacgagtgcaacgaatgtggaagggcgttccgtaagaaaaccaatttgcacgaccatcagaggattcatacaggagagaaaccctactcgtgtaaagagtgcggaaaaaatttcagtaggtcatctgccctgacaaagcatcaaaggattcatactagaaataagctctag

SEQ ID NO: 247835 - DNA, 3576 bp, synthetic construct
  misc_feature 1..3576: note = Description of Artificial Sequence: Synthetic coding sequence
  source 1..3576: mol_type = other DNA
atgcccggtacacctggctccctggagatgggcctgctgacattcagggatgtcgccattgaatttagcccggaggagtggcagtgtctcgacactgcccagcagaatctttaccgaaacgttatgctcgagaactataggaatctcgccttcttgggcattgctctcagtaagcccgatctgatcacatacctcgagcagggtaaggagccatggaatatgaagcagcatgaaatggtcgacgaacctaccgggatatgcccacatttcccccaggatttctggcctgagcagtctatggaggattcattccagaaggtgttgttaagaaagtacgagaaatgtggtcatgaaaacctccagctacgcaagggctgtaagtccgtggatgagtgtaaggtgcacaaagagggctacaataagctcaaccaatgcttgacaaccgcccagtcaaaagtgttccaatgtggcaagtatttgaaggtgttctacaaattcctcaattcaaatcgtcacaccatacgacataccggaaagaagtgcttcaagtgtaagaagtgtgtaaagagcttttgtattcggctgcataagactcagcataagtgcgtttatatcacagaaaaaagctgcaagtgcaaggaatgtgagaagacctttcactggtcttcaactctcaccaaccacaaggagatacacaccgaagacaagccctacaaatgcgaggagtgcggaaaagctttcaagcagctttccacactcaccacccataaaatcatctgcgccaaagaaaaaatatacaagtgcgaggagtgcggtaaagccttcctgtggtctagtaccttgacgaggcacaaacggatccatactggggaaaagccgtacaagtgcgaggaatgtgggaaagcatttagtcatagctcgactttggctaaacacaagcggattcacactggcgagaaaccctacaaatgcgaggagtgcggtaaagcttttagtaggtcgagtactctggccaagcataagaggatccatacaggagagaagccctataaatgtaaggagtgcggaaaggctttctcaaattccagtaccctcgccaatcacaaaataacccatactgaggagaagccatataaatgcaaggagtgcgacaaagcgttcaaaaggttgtcgactctgaccaagcacaaaatcattcatgccggagagaagctttataagtgcgaagaatgtggcaaggcttttaacaggtcttctaatctcaccatccacaaatttatacacactggagagaaaccttacaagtgtgaggaatgtggtaaggccttcaattggagctctagtttgacaaagcataagcgtttccacacacgtgagaagccctttaagtgtaaggaatgcggcaaggcgttcatttggagttccactttaacccgccataaaaggattcacacaggcgaaaaaccgtacaagtgtgaggaatgcggcaaggctttcaggcagagttcgactttaactaagcacaagatcattcataccggggaaaagccatacaagtttgaagagtgcggtaaggccttccgtcaatcactgaccctgaataagcacaaaatcatccattcacgagaaaaaccttataaatgtaaagaatgcgggaaggcctttaagcagttctctacactcacgacccacaaaatcattcatgctggaaagaagctgtacaagtgcgaagaatgtgggaaagccttcaaccattcatcaagccttagcacccacaagatcattcatactggggagaagagctacaagtgcgaggagtgcgggaaggcctttttatggtcctcaaccctccgtcgtcacaagagaatccataccggtgagaagccatacaagtgtgaggagtgcggcaaggcattttcccactcttctgctttggctaagcacaagcggatacacactggggagaaaccttacaaatgcaaggaatgcggtaaggctttcagcaattcctctaccttggctaaccacaaaatcactcacacagaagagaagccctataaatgtaaggagtgtgataagaccttcaaaagactgtctaccctaacgaagcataaaattattcacgcaggcgagaagctctataaatgtgaagagtgtggaaaagccttcaaccggtccagtaatctcaccatccataaatttatccatacaggggaaaaaccttacaagtgtgaggagtgtgggaaagctttcaattggtcatcctctcttacaaaacacaaacggatccacactcgtgaaaaacctttcaaatgcaaggagtgcggcaaagcttttatttggagctccacactgacacgccataagcgcattcataccggcgagaagccttacaagtgtgaagagtgtggcaaagctttttccaggagttccacgcttactaaacataagacaatccacaccggcgagaaaccttacaagtgcaaggagtgcgggaaagcattcaagcattcttcggcactggccaagcacaagatcatacacgctggcgagaaactgtacaaatgcgaggagtgcgggaaggctttcaatcaaagttctaacttaaccacacacaaaatcattcacaccaaggagaaaccctccaaatcggaggagtgcgacaaggcattcatctggtcaagcactctgactgagcacaaacgcatccacacaagagagaagacgtacaagtgcgaggagtgcggtaaagccttctctcagccctcccacttgactacccacaagcgaatgcacactggtgagaagccttataagtgcgaggagtgcggaaaagctttctcccagagtagcacactcactacccacaagatcatccacacgggcgagaagccatacaagtgcgaagagtgcggtaaggcatttaggaagagctctacactgactgaacataagattatccacaccggggagaaaccatacaagtgtgaagaatgtggcaaggcctttagtcaatcgtccaccttaacccgccacacacggatgcacacaggggagaagccatacaagtgtgaggagtgcgggaaagcctttaatcgcagttctaagctcacaacacataagattattcacacgggggaaaagccctataagtgcgaagaatgcgggaaggcttttatttccagctcaaccttgaacggccataagagaattcacactagggaaaagccgtacaagtgcgaggaatgcgggaaggccttctcacagagtagcacacttactcggcataagaggttacataccggagaaaaaccgtacaaatgcggggaatgtgggaaggcgttcaaggaaagcagtgccctgactaagcataaaatcattcatactggggaaaagccctataaatgcgaaaaatgtggcaaggcattcaaccagtcctcaattctgacgaatcacaagaaaatacacacaatcacccccgttattccactgctttgggaagcagaggccggtggaagcagaggacaagagatggagaccatcctggccaatacggtgaagcccctgctgtactag

SEQ ID NO: 247836 - DNA, 3480 bp, synthetic construct
  misc_feature 1..3480: note = Description of Artificial Sequence: Synthetic coding sequence
  source 1..3480: mol_type = other DNA
atgccaggaactccaggtagcctggaaatggggctgttaacgttccgcgatgtggccatagaattcagtccagaggagtggcagtgccttgacaccgcccagcaaaatctttatcggaacgtaatgctggagaattatcgcaatttagcattcctcgggatttgtccccatttcccccaagacttttggccggagcaatccatggaagacagctttcaaaaggtccttctgagaaagtacgaaaaatgtgggcatgaaaatcttcaacttcgtaagggctgtaagtccgttgacgaatgcaaggtgcacaaggagggatataacaaactgaaccagtgcttgactaccgctcaaagcaaagtcttccagtgcggtaagtatctaaaggttttctacaaatttttaaactctaacagacatacaatacgccacaccggtaagaagtgcttcaagtgcaaaaaatgcgtcaaatctttttgcatcaggctgcataaaacccagcataagtgtgtgtacatcacagaaaaatcctgtaagtgcaaggagtgcgagaagacatttcactggtcaagcacactcacaaatcacaaagagattcatactgaggataagccttacaagtgtgaagagtgcgggaaggccttcaaacagctatctacccttaccacacataaaatcatttgcgcgaaggagaagatttacaaatgtgaagagtgtggaaaggccttcttgtggtcaagcacccttactcggcacaaaaggatccacaccggggaaaagccctataaatgcgaagaatgcggaaaagctttctcccactcgagcaccttagcgaagcataagcggatccacacgggcgagaaaccttacaagtgtgaagagtgcgggaaggcattcagtagatcaagcacacttgcgaagcacaagaggattcacacaggggaaaaaccctacaagtgcaaggaatgtggaaaggctttctccaactcatccacgctcgccaatcataagatcacacacacagaggagaagccctacaagtgcaaagagtgcgataaggcatttaaacggttgagcacgctgacaaagcataagatcattcatgccggtgagaagctatacaaatgtgaagagtgtggcaaggcatttaaccgtagtagcaatctaacaattcacaagtttatacacacaggtgaaaagccatacaagtgtgaagaatgtggcaaagcattcaattggtccagcagcctcactaagcacaaacggttccatactcgcgagaagccgttcaaatgtaaggagtgtggaaaggcttttatctggtcatccacactgaccagacacaaacgaattcacaccggcgagaagccgtacaagtgtgaagagtgcggaaaagcattccgacaaagctctacactgacaaaacacaaaatcatccacactggcgaaaagccctacaaatttgaggagtgcgggaaggcttttaggcagtctctgacattgaataagcacaagatcatccactccagagagaaaccctataaatgcaaggaatgcgggaaggcctttaagcagttcagcactctgaccacccacaaaatcattcacgcgggaaaaaaactgtacaagtgcgaggaatgtgggaaagcctttaatcactcctctagcctgagcacacacaaaatcatccataccggagagaagagctataaatgcgaggagtgcggcaaggctttcctgtggtcctcaacactgaggcgccataaacgtattcatactggcgagaaaccatacaaatgcgaggaatgtggaaaagctttcagtcatagctccgccctggccaagcacaaacgaatccacaccggggaaaagccctataagtgcaaggaatgcggcaaagcttttagtaacagctcaacactggccaatcataaaattactcacacagaggaaaagccatataagtgtaaggagtgtgataaaacatttaaaaggctcagcacccttacaaagcacaaaataatccacgctggtgaaaaactatataagtgtgaggagtgcggaaaggccttcaatagatccagtaatctcaccatccacaaatttatacatacaggcgaaaagccttataaatgcgaggagtgcggcaaagcattcaactggagcagctcactgaccaagcacaagcgaattcacacacgcgagaagcctttcaaatgcaaagagtgcggaaaagcctttatatggtcaagcaccttaacaagacataaaaggattcataccggagaaaagccctacaagtgtgaggagtgtggtaaggctttcagccggagctcgactctgaccaaacataagacgatccacacaggcgaaaagccatataaatgtaaggagtgtggaaaggcctttaaacattcatccgctctcgctaaacataaaattatacacgccggagagaaactctacaagtgcgaagaatgtggcaaagcgttcaatcaatcctccaatttgaccacacacaaaattatccatactaaagagaagccaagcaaaagcgaagaatgtgacaaagccttcatttggtctagcacccttacggaacacaaaaggatccatacacgcgagaagacgtacaagtgtgaggagtgcgggaaggcattcagccagccaagccaccttaccacacataagaggatgcacactggcgaaaaaccatacaagtgcgaagaatgcggcaaggctttctctcagtcaagcacacttactactcacaaaatcatccacactggggagaagccctataagtgcgaggagtgtggcaaggcgttccggaaatcgtccacattaacagagcacaaaattattcatactggggagaagccttataagtgtgaggagtgcgggaaagctttcagtcagtcctctactttaaccaggcacactagaatgcacaccggcgaaaagccatacaaatgcgaggaatgtggcaaggcttttaacagaagtagcaaattgacgacccacaaaattatccatacaggagaaaaaccttataaatgcgaagagtgtggaaaggcctttattagttctagtactctgaacgggcataaaaggatccacacaagggaaaaaccttacaaatgtgaggagtgcgggaaagcattttcacagtcttcgactcttaccagacacaagaggctgcacacaggagagaagccctacaaatgcggcgagtgtggaaaggctttcaaggaatctagcgcgctgaccaaacacaagattatccacactggcgaaaaaccatacaaatgtgaaaaatgcggcaaggcctttaatcagtccagtatcctcacaaaccacaagaaaatccacaccattacacccgtgattccgctcctctgggaggccgaagctgggggatcgcgagggcaggaaatggaaactatcttggctaacactgtcaagcctcttctttattag

SEQ ID NO: 247837 - DNA, 1761 bp, synthetic construct
  misc_feature 1..1761: note = Description of Artificial Sequence: Synthetic coding sequence
  source 1..1761: mol_type = other DNA
atgggaccactcacattccgggacgttaaaattgagttctccctcgaagagtggcaatgcctggatactgcacagcgtaatttgtatagagacgttatgttggaaaactatcgtaacctagttttcctcgggattgccgtcagtaagcccgacctgattacctggctggagcagggaaaggagccttggaatctaaagagacacgaaatggtcgataagacccctgtgatgtgctctcactttgctcaggatgtttggcccgagcattcgatcaaggatagttttcagaaggttatcctgcggacatatggaaaatacggccatgagaacctgcaactgaggaaggatcataagtccgtcgatgcttgtaaggtgtacaaagggggttataatggtcttaatcagtgtctgactacaactgactctaaaatatttcagtgcgacaagtatgttaaggtctttcataagttcccaaatgtcaacaggaacaagatccggcatactggtaagaaacctttcaaatgtaagaaccggggtaaatcattttgcatgttgagtcagctgacacagcacaagaagatccatacaagagagtatagctataaatgcgaagaatgtggaaaggcatttaactggtcatccacccttaccaagcataagattattcataccggagagaagccttacaagtgcgaggagtgcggtaaagctttcaataggagctcaaatctcaccaagcataagatcatccacacaggggaaaagccatacaagtgcgaggaatgcggaaaggcatttaatcgatcttcaactctgacaaaacataagcgtattcataccgaggaaaaaccttataaatgcgaagagtgcggaaaagccttcaaccagttttctatcctgaacaagcacaaacggatccacatggaagacaaaccttataaatgcgaagagtgcggcaaggcattcagggtattttctatcctgaaaaagcacaagattatacacacaggggagaaaccatacaagtgtgaagagtgtggcaaggccttcaaccagtttagtaatctaaccaagcataagattatccatacaggagagaagccatataagtgtgatgagtgtggaaaagcttttaatcaatcgagcactctgacaaagcacaaaaggattcacactggagaaaagccttacaaatgtgaggagtgtggtaaagctttcaaacaaagttctaccttgactgaacataaaatcatccatacgggcgagaagccctataagtgcgagaagtgcggtaaagcattctcttggagctccgcgtttacgaagcacaagaggaaccatatggaagacaagccctacaagtgtgaagagtgcggcaaagccttttctgtgtttagcaccctcaccaagcataagatcatccacactcgcgaaaaaccctacaaatgcgaagagtgcggtaaggcgttcaaccaatcctccatttttaccaaacataaaatcatccataccgagggtaaatcgtacaagtgcgagaagtgcggcaacgccttcaatcagagctcgaatttgacagcacgcaagatcatctataccggggagaagccctataaatatgaggagtgcgataaagcatttaataagttctctactttgattacccaccaaattatttacacaggcgagaagccttgtaaacatgaatgcggcagagcctttaataaaagcagtaactacaccaaagagaagcttcagacttag

SEQ ID NO: 247838 - DNA, 1665 bp, synthetic construct
  misc_feature 1..1665: note = Description of Artificial Sequence: Synthetic coding sequence
  source 1..1665: mol_type = other DNA
atgggacccttgacatttcgggatgtaaagattgaatttagtctggaggagtggcagtgtctggatacagcacagcggaacctgtacagagacgtgatgctggagaattatcgcaatttggtattcctggtcatgtgcagccatttcgctcaggatgtttggcctgagcattcgatcaaggattcttttcagaaggtaatcttgagaacctacgggaagtacggacacgaaaacctgcagctcaggaaagaccacaaaagcgttgacgcctgcaaggtttacaagggcggatacaacggactcaatcagtgtttgacaaccaccgatagcaagatcttccagtgcgataagtatgtcaaggtgttccacaaatttcccaacgtgaacaggaacaagatccgccacactgggaagaaacctttcaaatgcaagaaccggggaaaatctttttgcatgctgagtcagttaacacagcacaaaaagatccacactagagagtacagttataaatgcgaggagtgcggcaaggccttcaattggtcttcaaccctcacgaagcataagattattcatactggagaaaagccctataaatgcgaagagtgcgggaaggctttcaacaggagttctaacctgactaagcacaaaatcatccacaccggagagaagccatacaagtgcgaggaatgcgggaaagcttttaataggtcctcaacgctgactaagcataagaggatccacaccgaggaaaagccctacaaatgcgaggagtgtgggaaggcttttaaccagttcagcatacttaataagcacaaacgtattcatatggaggacaaaccatataagtgcgaagaatgtggaaaggccttcagggtcttttctatattaaagaaacataaaatcatacacaccggggagaagccttataagtgcgaggagtgtggtaaggcatttaaccagttctcaaatttgacgaaacacaagattatccacacaggagaaaagccatacaagtgcgacgagtgcggaaaggcctttaaccaatcttcaacactcacgaaacataaacgaatccacactggcgagaaaccttacaagtgtgaagaatgcggtaaagcatttaaacagtccagcacgctgacggagcataaaataatccacactggggagaaaccttacaagtgcgaaaagtgtgggaaggctttttcttggtcatcagctttcacgaagcataaacgaaaccacatggaggataagccttataagtgcgaagagtgcggtaaggcttttagtgtgttcagtacattgaccaagcacaagatcattcacactagggagaaaccatacaagtgtgaggaatgtggaaaggcttttaatcagagctctatctttaccaaacacaaaatcattcacactgaaggaaaaagttataagtgtgagaaatgcggtaacgccttcaatcagtccagcaatctcaccgcccgaaaaatcatatacaccggtgagaaaccttacaagtacgaggaatgtgacaaagcattcaataaattttctaccttgataactcaccagatcatctacacgggcgaaaagccttgtaagcatgagtgcgggagagcctttaacaagtctagtaattacactaaggaaaagctgcagacctag

SEQ ID NO: 247839 - DNA, 1554 bp, synthetic construct
  misc_feature 1..1554: note = Description of Artificial Sequence: Synthetic coding sequence
  source 1..1554: mol_type = other DNA
atggtggacaagacacccgtaatgtgtagtcacttcgctcaggacgtttggccagagcacagcataaaagattcctttcagaaagtaatcctcaggacatacggtaagtatggtcacgaaaacctccagctaagaaaggaccacaagagtgtggatgcctgcaaagtttacaagggcggttataatggactgaaccagtgtctgactaccactgattctaaaatctttcagtgcgacaaatacgtcaaggtgtttcataagttccccaatgtcaaccggaacaaaattcggcacactggaaagaaacccttcaaatgcaagaatcggggaaaaagcttttgtatgctgtctcagctgacacagcataagaagatccatacaagggaatatagctacaagtgtgaggagtgcgggaaagcatttaattggtcgagtactttgaccaaacataaaattatacacacaggagagaaaccatataaatgtgaagaatgcggcaaagcattcaaccggtccagtaaccttactaaacacaagataattcacacaggcgagaagccctataagtgtgaggagtgcggtaaggccttcaatcgctctagcacactgacaaaacataagcgtattcatacagaggagaagccatacaagtgcgaagagtgcggcaaggctttcaatcaatttagcatattgaacaagcacaaacgtatccatatggaagataagccctataagtgcgaagaatgtggaaaggcatttagagttttttctattttgaagaagcataaaattatacatacaggagagaaaccctacaagtgcgaggagtgcggaaaggcatttaatcaattcagcaacctcaccaagcacaagataattcacaccggggaaaaaccctacaagtgcgacgagtgtggcaaagcgtttaatcagtcaagcaccctgacgaaacataagagaatccataccggagagaaaccgtataaatgcgaggagtgcgggaaagcttttaaacagagcagcaccttgaccgagcacaagatcatacatacaggtgaaaagccctataagtgcgaaaaatgcgggaaagccttttcctggagctccgcttttaccaagcataagcggaaccacatggaggataagccctataagtgtgaagagtgcggcaaagccttttccgtcttttctactctgacaaagcataaaataatccacacacgagagaaaccatacaagtgcgaggaatgtggcaaagcattcaaccagtcctccatttttacgaagcacaagatcatccacaccgagggaaagagttacaagtgcgagaagtgtggcaacgcgtttaatcagagctctaacctgactgctcggaagataatttataccggagagaagccttataagtacgaagagtgtgataaggccttcaataagttctcaacactgattacacatcagatcatttatacaggagaaaaaccctgcaagcacgaatgcgggcgagcgtttaataagagctctaattatacaaaagagaaactccaaacttag

SEQ ID NO: 247840 - DNA, 1863 bp, synthetic construct
  misc_feature 1..1863: note = Description of Artificial Sequence: Synthetic coding sequence
  source 1..1863: mol_type = other DNA
atggggcctttgcagtttagggacgtcgccattgaattttcactagaggagtggcactgcctcgatacggcccagagaaatttgtacagaaatgtgatgctcgagaactactcgaacctggtgtttcttggaattgtggtgtccaaacccgatctaattgcgcatctggagcaggggaagaaaccattgaccatgaagcggcacgaaatggtggccaaccccagcgttatctgttcacattttgcccaggatctgtggcctgagcagaatatcaaggactctttccagaaggtgattctgcgtcggtacgaaaagaggggccatggtaatctacagctaataaagcgctgtgagtctgtcgatgaatgcaaagttcacaccgggggttacaacggcttgaaccaatgctccacaactactcagtcaaaagtttttcagtgtgacaagtatggaaaggtgttccataaattctctaacagcaatcgtcacaacatcagacataccgagaagaagccatttaagtgtattgaatgcggcaaagccttcaaccagttcagtactctcattacacataagaagatccacacaggagaaaagccctatatttgcgaggaatgcgggaaagcttttaagtacagcagtgccctgaacacccataagcgaattcacacaggcgagaagccttacaaatgcgataaatgcgataaggcgttcatcgcgtcatccacactttccaagcacgaaataatccacactggcaagaaaccgtataagtgtgaggagtgtggaaaagccttcaatcagtcctccactctcactaaacacaaaaaaattcatacgggggagaaaccttacaagtgtgaggaatgtggcaaggctttcaaccagagctccacccttactaaacataaaaagatccatacgggtgagaaaccatatgtgtgtgaggagtgcggaaaagcctttaagtattctcggatactgactacgcataagcgcattcataccggagagaagccctacaaatgcaacaagtgcggaaaggcgtttatcgcttcgagtactctgagtaggcacgaattcattcatatgggtaaaaagcactacaagtgcgaagagtgtgggaaggcatttatctggtcctctgttctaacccgtcacaagcgggtgcacactggcgaaaagccctacaaatgcgaagagtgtgggaaggcatttaagtacagttccactttgagtagccataagcggtcacacaccggagagaagccatacaagtgcgaggaatgtggtaaggcctttgtggcttcaagcactttgtcgaaacacgaaattatacacactgggaagaagccctacaaatgcgaagagtgtggcaaagctttcaatcagagctctagccttacaaaacacaagaagatccatacaggggaaaaaccttacaagtgcgaagaatgtggcaaggccttcaaccaaagctccagtctgactaagcacaaaaaaattcacacaggtgagaaaccttacaaatgcgaagaatgtggtaaggcctttaatcagtcctctaccctcattaaacataagaaaatacacactagagagaagccctataagtgcgaggagtgcggaaaagcatttcatctgtctacacatttaaccacccataagatcttgcacactggggaaaagccttatagatgtagggaatgcggcaaggcatttaaccactcggctaccctgtcaagccacaaaaaaattcacagcggggagaagccttatgaatgtgacaagtgtgggaaggcttttatctcccccagttccttgagtagacacgagataattcacactggtgagaagccatag

SEQ ID NO: 247841 - DNA, 1779 bp, synthetic construct
  misc_feature 1..1779: note = Description of Artificial Sequence: Synthetic coding sequence
  source 1..1779: mol_type = other DNA
atgggccctctgcaatttcgcgatgtggctattgagttttcattggaggaatggcactgcctcgataccgcccagagaaacctttaccggaacgtgatgctcgaaaactactcgaatttggtattcctagggattgtcgtgagcaaacccgatctgatcgctcaccttgagcagggaaagaaacctcttactatgaaaagacacgagatggtggctaacccgagcgttatctgcagtcactttgcccaagatctctggccggagcagaacataaaagactcattccagaaggtgattctccgacggtacgagaagagaggccatggcaacctccagctgattaaaaggtgtgagagcgtggacgagtgcaaggttcacaccggtggttacaatggcctcaatcaatgcagcaccaccactcaatctaaagttttccagtgcgacaagtacggcaaagtattccataagttttctaacagtaaccgccataatatcaggcataccgaaaagaagccatttaaatgcatcgagtgcggcaaagccttcaaccaattctccaccctgatcactcacaaaaaaattcacaccggggaaaaaccttatatctgtgaggaatgtggaaaggccttcaaatattcttcagccttgaacacccacaagcggatccacacgggagagaaaccatacaagtgtgacaagtgcgacaaggccttcattgcctcctctacattgtcgaagcacgaaatcatccatacaggcaaaaaaccttacaagtgcgaggagtgcgggaaggccttcaaccaatcctcaactctgacaaaacataaaaaaatccatacaggagaaaagccttacaagtgcgaggaatgtggaaaggcctttaatcagagttccaccttgacaaagcataagaagattcacaccggagaaaaaccttacgtgtgtgaggagtgcggaaaggcatttaaatacagtcggatactcaccacacataagcgcatccacactggtgagaagccctacaaatgtaacaagtgcgggaaggcctttatagcctcatcaacgctgtcacgtcacgagtttatccacatgggaaagaagcactacaaatgcgaggaatgcgggaaggctttcatatggtcatccgtgcttacgaggcacaagagagtccatacaggcgagaagccttacaagtgtgaggaatgtggcaaggcattcgttgcctcatcaacactgtccaagcacgagattattcacactggcaaaaagccatataagtgcgaggagtgcggtaaagcattcaatcagtcatcctctctgacaaaacacaagaaaatccacaccggggagaaaccgtacaagtgcgaggaatgcggtaaagcatttaatcagagttcatccttgaccaaacacaaaaagatccatacaggcgaaaaaccatataaatgcgaagaatgcgggaaggcctttaatcaatcctccacactcatcaagcataagaaaattcacacacgagaaaaaccctataagtgcgaggagtgcggcaaagcctttcatttgagtactcatttgactactcataaaattctccatacaggagagaaaccctacaggtgtcgagaatgcggcaaggcctttaaccattccgcaacgctgagtagtcataaaaagattcattctggcgaaaaaccgtacgaatgtgacaaatgcggcaaggccttcatatctccttcgagcttgtcacgtcatgagatcatccatactggcgagaagccatag

SEQ ID NO: 247842 - DNA, 183 bp, synthetic construct
  misc_feature 1..183: note = Description of Artificial Sequence: Synthetic coding sequence
  source 1..183: mol_type = other DNA
atggttgccaatccttcagtgatctgtagtcatttcgctcaggatctatggccagagcaaaacatcaaggacagttttcaaaaggtgattctccgcagatacgagaagcgagggcacggaaatcttcagctcatcaaacgttgcgaatctacaccctctgaaaaagaaaagaagaaaaagtag

SEQ ID NO: 247843 - DNA, 1719 bp, synthetic construct
  misc_feature 1..1719: note = Description of Artificial Sequence: Synthetic coding sequence
  source 1..1719: mol_type = other DNA
atgccgggacccttgggctccctggagatgggagtgttgaccttccgggatgtagctctcgagttctcgctggaagaatggcaatgtctggacactgcccaacaaaatctctatcgcaacgtgatgctcgagaactacagaaacttagtgtttgttgggattgcagcttccaaacctgacttgatcacctgcctcgagcagggcaaagaaccttggaacgttaaacgccatgaaatggtaacagaacccccagttgtctactcctacttcgctcaggatctctggcccaagcagggaaaaaaaaattatttccagaaggtgatcctgcgcacctacaaaaagtgtggcagggagaatcttcagctgcgaaagtattgtaagtccatggatgagtgtaaagttcataaggaatgctataacggcctaaaccagtgcctgactaccacacagaataagatatttcagtatgacaaatacgtaaaagtgttccataaattcagcaattctaataggcataaaatagggcatactggaaagaaatcgttcaaatgcaaggaatgtgaaaaatcgttctgtatgctcagccatctggctcaacataagcgcatccatagcggtgagaagccctataagtgtaaggaatgtggcaaggcttacaatgaagccagcaacctctcgacacacaagagaattcatactggtaaaaagccttataaatgcgaggagtgcggtaaggccttcaatcgcctgagccacctgacgacacacaaaattattcacaccgggaaaaaaccctataagtgcgaagagtgtggcaaagccttcaaccaatcagcaaacctgacaacacacaaacgtattcacactggggagaaaccctataagtgtgaggaatgcggcagagcattttcgcagtcctctacactgaccgctcataagatcattcatgccggagagaagccttataagtgcgaagaatgcggcaaggccttcagccagtcctctactctaactacccataagatcatccatactggcgagaaattctacaaatgcgaggaatgtgggaaagccttctccagattatctcatctgactacgcataagcggattcactcaggagagaagccgtataaatgtgaggagtgcggaaaggcgtttaaacagtcttctaccctgaccacgcacaagcgtattcacgccggtgagaagttttataagtgtgaagtgtgcagcaaggccttctcccgattcagtcatcttaccacacataagcgtatccataccggggaaaagccttataagtgcgaggaatgcggcaaggccttcaacctaagctcccagctgaccactcacaaaattatccacacaggcgagaagccttataagtgcgaagaatgcggaaaagcattcaatcagtcttcaacactaagtaagcacaaggttatccacacaggcgaaaagccatataagtgcgaagaatgcgggaaagccttcaatcaaagtagccatctaactacccacaagatgatccacaccggtgaaaaaccttacaaatgtgaagagtgcggtaaggcttttaataactcaagcattctgaacaggcacaagatgatacacaccggagagaaactctataaaccggaatcttgcaacaacgcctgcgataatatagccaagatttccaaatacaagcggaattgcgccggtgaaaaatag

SEQ ID NO: 247844 - DNA, 3114 bp, synthetic construct
  misc_feature 1..3114: note = Description of Artificial Sequence: Synthetic coding sequence
  source 1..3114: mol_type = other DNA
atgtctttctggtccgagaagtgtaccaggctgattctgtatgacctaaagattgcactcaaaaatggtagtttaactttttgggatgttaccattgagtttgcactcgaggaatggcagtgcttagatatggcccaacaaaacctttacaggaacgttatgctggagaattaccgtaatttggtttttttaggaatcgcagtaagcaagctggacctcattacctgtctgaaacagggaaaagagccatggaatatgaagagacatgagatggtgaccaagccccctgtcatttcaagtcactttacccaggacttttggcccgaccagagtatcaaggattctttccaagaaatcatcctcagaacctatgcacggtgcggacataaaaacctccgcctgagaaaggattgcgagtccgtcaacgaaggaaagatgcacgaagaagcctacaacaaactgaaccagtgctggaccaccacgcagggaaaaatattccagtgcaacaagtacgtaaaggtttttcacaaatattccaatagcaataggtataaaatcattcacaccggcaaaaagccgtataaatgcgaggaatgcggaaaggccttcaagcagagttctcacctgactagacacaaagccatacatacaggggagaagccctacaaatgcgaagagtgtggtaaggcctttaatcatttttctgcccttcggaagcaccagatcatacacacaggcaaaaaaccctacaaatgtgaagagtgcgggaaggcctttagccagagttccaccctgaggaaacacgagataattcatactgaggagaagccctacaaatacgaggaatgtggcaaggcattttccaaccttagcgccctgcggaagcacgagattattcataccgggcagaaaccctataaatgtgaagagtgcggaaaagcctttaaatggtcttccaagctgaccgttcacaaggtgatacataccgctgaaaagccctgcaaatgtgaggaatgtggcaaagcctttaaacgcttttccgccctgcgaaaacacaaaatcatccatacaggaaagcaaccatataaatgtgaagaatgtagcaaggccttctccaatttctccgctctgcgcaaacatgagatcatacacaccggtgaaaaaccgtataagtgtgaggaatgcgggaaagcctttaagtggagcagcaagctaacagtgcacaaggttatccatatggaagagaaaccttgcaaatgcgaggaatgtggtaaggcctttaagcattttagcgcgcttaggaagcacaaaatcattcatactggaaagaagccgtacaaatgtgaggaatgcggaaaagcgtttaacaatagctccactctgatgaagcataagattatccatacaggcaaaaaaccctacaagtgtgaggaatgtggaaaagcattcaagcaatcaagccacctcacgcggcacaaagcaattcatactggagaaaagccctacaaatgcgaggaatgtggcaaagccttcaaccacttctccgccctgcgcaagcatcagattattcatactggtaagaagccctacaagtgtgaggagtgcggaaaagctttctctcagtcctcgacactgagaaagcatgagataattcacacgggcgagaaaccttataagtgtgaggaatgcggaaaggctttcaagtggagctcccacctgactcggcacaaggtaattcataccgaagagaagccctataagtgcgaagaatgtgggaaagcattcaaccacttctccgctctgagaaagcacaaaattatccacacagggaaaaaaccatacaagtgcgaggagtgcgggaaggccttcagccagagctcaactctgcggaaacatgaaattatccacacaggcgagaagccttacaagtgcgaggaatgcgggaaagccttcaagtggtcaagtaagttgacagttcataaggtcatccacacagcagagaagccgtgtaaatgtgaagagtgcggaaaggcctttaaacatttctccgcgctcaggaaacacaaaataatccacaccggaaaaaaaccctacaagtgcgaggagtgtgggaaggcttttaacaactcctccactttgcgcaaacatgagatcatccacaccggggagaaaagctataaatgtgaagagtgcgcccttcgcaagcacgagattattcacacaggaaaaaagccatacaaatgtgaggaatgtgggaaggctttcaacaatagctccacacttcggaaacacaaaataatttatactggaaaaaaaccatacaagtgcgaagaatgtggaaaagcattcaaacagtcctcacacctcacccgacacaaagccgtgcatactggcgagaagccatacaaatgtggggaatgcggcaaggcttttaacaactccagcactctgaaaaagcacaagctgatacacactagggaaaagagttacaaatgcgaggagtgcgggaaggcattttctaacttttctgccctgcgcaagcacaagatcatccacacaggggagaagccttataagtgtgaggagtgcgaatgcgggaaggcatttaataatagtagcactctgatgaagcacaaaattatccatactggagagaagccttataagtgcgaggagtgtgggaaaggcttcaataatttctcaaccttgatgaagcacaagatcattcacacaggcgagaaaccttataagtgtgaagagtgcggtaaagcttttaagcaatcttcacatttaactaaacacaagtccatccataccggtgagaaaccatataagtgcgaagagcgtggcaaggccttctcccacttcagtaggctgacaaaacaccggatcatccatactggcaagaagccatacaagtgcgaggaatgtggggagaaaccgtacaaatgtgaggaatgcggtaaggccttcaaccagtctagccaccttacacagcataaaaccatacatacgggcggtaaaacctataaatgtgaagaatgtgggaaagcttttaaccacctgtctgctctcactaaacataaaattatccatacaggcgaaaagccctag

SEQ ID NO: 247845 - DNA, 3021 bp, synthetic construct
  misc_feature 1..3021: note = Description of Artificial Sequence: Synthetic coding sequence
  source 1..3021: mol_type = other DNA
atgagccgtcgcaagcagtccaatccgcgtcagattaagagaagcctgggggacatggaggcccgagaagaagtgcagctcgtgggtgccagtcacatggaacagaaggccaccgccccagaggcaccctcaccgccatctgccgatgtgaactcacctcccccactgccccctcctacctcccctggtgggcctaaggagttggaaggacaggagcctgagccaaggccaactgaagaggagccgggaagtccctggtctggaccagatgagctcgaacctgtagtgcaggatggccaaagacggatcagggcccgactgagtttagctaccggactgtcttggggccctttccacgggagcgtccagacaagggcctctagcccaagacaggcagagcctagccccgctctgaccctactccttgtggacgaggcttgctggctccgaactctcccccaggcccttactgaggccgaggctaatacagagatccacagaaaggatgatgccctgtggtgccgggtaaccaaaccagtccccgctgggggactcttgagtgtgttactgacagcggagccgcatagtacaccagggcatccagtaaaaaaggaacccgcagagcccacatgtcccgcaccagcgcatgatcttcaactcctgccgcagcaggccggaatggcttctatcctcgcaacagccgtgattaacaaggacgtgttcccctgtaaagactgcggaatctggtatcggtcagagcgcaacctacaagcccatctgctctactactgtgccagccgacagggaactggatctccagccgctgccgcaaccgacgagaaacctaaggagacatacccaaacgaacgcgtctgcccttttcctcaatgtcgtaagagctgtccctctgcttcatcccttgaaatccacatgcgctcacattccggcgagcgtccattcgtatgtctgatctgcctctccgcctttacgaccaaggcaaattgtgagagacacctgaaggtgcacacagatacgttatcaggcgtgtgccacagctgtggattcattagcacaacgagagatatcctgtactctcaccttgtgacaaatcatatggtttgtcagccgggttccaaaggcgagatttactctccaggagcgggtcaccccgcaacgaagttaccgcctgattcattgggctcctttcaacagcagcacaccgctctccaggggccactcgcatccgcagacttgggactggccccaaccccatcccctggtctcgaccgaaaagcacttgccgaggctacaaacggtgaagcccgagctgaaccgctggctcagaatggcggatcctcagagccgcctgcggctccaagaagcattaaggtggaagcggtggaggaacccgaagcagcccctatcctgggcccaggcgagcccggtccacaggctccatctcgtacaccgtcccctagatcacccgctcctgccagggtgaaggctgaactctccagccccactcctggcagcagcccggtgcctggcgagctgggccttgccggagccctcttcctgccgcagtatgtttttggacccgatgcggctcctcctgcaagcgagattctcgctaaaatgagcgagctcgttcattcgcgcctgcagcagggggcaggcgcaggcgcaggcggagcccagactggcctgtttcctggggcacccaagggcgctacttgcttcgagtgtgagatcaccttttcgaatgtcaataactactacgtccataagagactctactgttccgggaggagagcccctgaagatgcacctgcggctcgtaggccaaaggcccctcccggacccgctcgtgcccctcctgggcaacccgcagaacctgatgccccacggagcagcccaggtcctggtgcaagagaagagggcgctggtggggctgctactcctgaagatggcgcaggaggacggggatctgagggaagccagagcccgggttcatctgtcgatgacgcagaggatgatcctagtcggacactgtgcgaggcgtgtaatattagattctcccgtcacgagacatacacagtacacaaaaggtattactgtgcgtcaagacacgatcctcccccaagaagacccgcagctcccccaggacccccagggccagcagcacctcctgcaccgtctcccgctgcgccagtgcgaactcgtaggagaaggaaactctacgaactgcatgccgctggggctcctcctcctccccctcctgggcatgcccctgcccctgaatcccctagaccaggttccggttcgggatccggccctggcctagcacccgcaagatccccgggaccagctgctgatgggccaattgatctgtctaaaaagcctcggcgtcccctgcctggggctcctgctccggctctcgccgactaccatgaatgtactgcctgccgtgtgtccttccattcactggaggcataccttgcacacaaaaaatatagctgcccagcagccccacctccaggcgctctgggcctacctgccgctgcgtgcccttattgccctccaaacggcccagtgagaggcgatctgcttgagcattttcgcctggctcatgggctgctgctgggagcaccattagccggaccaggggtggaggcccgtacaccagccgatcgtggcccatcacctgccccagctcctgccgcaagtcctcagcccggatcacgcggtccacgggacgggttgggaccggagccacaggagcctccccctggacccccaccaagtcccgcagctgcaccagaagcggtgcctccgccacccgctccaccaagctatagcgataagggcgttcaaacacccagcaagggtacccctgccccactgcccaacggaaatcataggtattgcaggctctgtaatattaagtttagcagtctgtctactttcattgcccataagaaatattactgctcaagtcatgctgccgagcatgtcaaatag

SEQ ID NO: 247846 - DNA, 2649 bp, synthetic construct
  misc_feature 1..2649: note = Description of Artificial Sequence: Synthetic coding sequence
  source 1..2649: mol_type = other DNA
atgtactactgtagcggtaggcagagggaggcggctccagtttccgaagaaaacgaagattctgctcaccaaattagctccctgtgtcccttccctcagtgtacaaaaagtttcagcaacgctagggccttagagatgcacctgaacagtcactctggagtaaagatggaggagttcttaccaccaggcgcaagtttgaaatgtaccgtgtgttcttacactgccgactctgtgattaattttcaccagcacttatttagccatttgacccaggctgcctttaggtgtaatcactgtcacttcggcttccaaactcaacgggagctacttcaacaccaggagcttcacgtgccgagcggtaaactgcctagagagagtgacatggagcacagtccttcagccaccgaagacagcctgcagcctgcaaccgacctgctgaccagatcagagcttccacagtctcagaaggccatgcagacgaaggatgcatcatctgacacagagctggataagtgtgagaaaaagacccagctgttcctgactaaccagcggccagagatccagcccacgaccaataagcagtccttctcctacacaaaaataaaaagtgagccctccagccctagacttgcttcttctcctgttcagcctaacattggcccatcatttcccgtcggcccttttctttctcagttcagttttcctcaggatattacaatggtgccccaggccagtgaaatcctcgccaaaatgagtgagctagtgcaccgccgactacgacatggctcgtcttcctatccaccagttatatacagtcccttaatgcctaagggtgctacctgttttgagtgcaatattacatttaacaatctggataactatctggtgcacaaaaagcactattgttcaagtcggtggcagcagatggcgaagagtccagaatttccatccgtaagcgaaaagatgccagaagctctgagcccgaacacaggtcagacctcgattaatctgctgaatcctgctgcccactcagctgaccccgagaatccactgttacaaacgtcttgcataaactccagtaccgtgctggatctgattggacccaacggaaagggccacgataaggatttcagcacccagactaaaaaattatcaacaagttcaaataacgatgataaaatcaacggaaagcccgtggatgtcaaaaacccaagcgtgccactagtcgatggcgagtctgatcctaataagaccacctgtgaggcctgcaatatcaccttctcacggcatgaaacatacatggttcacaaacaatattattgcgcaacaaggcatgatccgccactgaaacggtcggccagcaataaggttccagcgatgcagagaactatgcggacccggaaacgcaggaagatgtatgagatgtgcctgcctgaacaagaacagcgccctccactggtacaacagagattcctggacgtcgccaatctcaataacccatgtacctctacccaggaaccgaccgagggtcttggggaatgttatcatccacgatgcgatatttttccaggtatcgtgtccaagcatttggaaacatccctgactatcaataaatgtgtgcccgtgtctaaatgtgatacaacacattcttcagtctcttgcttggagatggatgtgccaattgacctgagtaagaagtgtctcagccagtcagagcgcacaaccacgagcccaaagaggctgctggactaccatgaatgtactgtgtgtaagatctcattcaacaaagttgagaactatctcgcccacaaacagaatttttgccccgtcactgcccaccagaggaacgacttaggccagctggatgggaaagtgttccccaatcccgaatcagagcgcaactctcctgacgtgagttatgagcgatccatcattaagtgcgaaaagaacggcaaccttaagcaaccgtctcctaacgggaacctcttcagttctcatctggccactctgcagggtctcaaggtattctctgaggccgctcagctcatcgccactaaagaagaaaaccgccatctctttctgccgcagtgtttgtatccaggtgccatcaagaaggccaaaggcgcagatcagctgtcaccttattacggaatcaagccttccgactatatttccggatctctggtgatccacaatactgatatagagcagagcagaaatgccgagaatgagtccccaaaaggccaagcatccagtaacgggtgcgccgcattaaagaaagattcgctccctctgctgcctaagaaccgcggtatggtgatagtgaacgggggactcaagcaggacgagagacccgcagctaacccccagcaagaaaacataagtcaaaatcctcagcatgaggacgaccacaaatcaccgtcttggatatctgaaaatccactggccgctaatgagaacgtgtccccaggtattccctctgccgaggaacaactcagctccatagcaaagggcgtgaacggatcaagccaggcgccaacatccgggaagtattgcaggctgtgcgacattcagtttaataatctctccaactttatcacacacaaaaaattctactgctccagccatgctgctgaacatgtcaagtag

SEQ ID NO: 247847 - DNA, 3456 bp, synthetic construct
  misc_feature 1..3456: note = Description of Artificial Sequence: Synthetic coding sequence
  source 1..3456: mol_type = other DNA
atgtctcgacgaaagcagagcaaaccaagacagatcaagcgaccccttgaggatgccattgaggatgaggaggaggagtgccccagcgaggaaacagacatcatttctaagggcgactttcccttagaggagtccttcagcaccgagttcgggcctgagaacctgagctgcgaggaagtggaatacttctgtaacaaaggagatgacgaaggcattcaggaaaccgccgagtccgatggggacacacaatctgagaaacccggacagcccggtgtcgagaccgatgactgggatggtccgggtgaactcgaggtgtttcagaaagatggagagcgtaagatacagtctcgccagcagttaccagtcggtaccacatggggtccattccccggtaagatggatttgaataataactcattaaaaaccaaagcacaagtaccaatggttctgactgcaggtccaaagtggctgctggacgtgacatggcaaggggtcgaggacaacaagaacaattgtatcgtgtacagcaaggggggtcaactgtggtgcacaacgacaaaggccattagtgagggagaagagctgatcgccttcgtggtggactttgacagtcgcctgcaggctgcgtcccagatgaccctgaccgaaggcatgtacccggcacgcctgctagatagtatccagctcctgcctcagcaggccgcaatggcgtcaatactccctacagcgattgttaacaaagatatttttccttgtaagagctgtgggatttggtatcgatctgagcggaatctgcaggctcacctcatgtactattgtagcggcaggcaaagagaagcagcaccagtgagcgaagagaacgaggactcagctcaccagattagcagcctctgtccttttccgcagtgtaccaagagctttagcaacgccagagctctggaaatgcatctaaatagtcattcaggagtgaaaatggaggagtttttgcccccaggggcatcactgaaatgtacggtgtgcagctacacagcagattctgtaattaatttccaccagcacctattctcccacctcacacaggcagcttttcgttgcaaccattgccactttgggtttcagactcagagggagctgctccagcatcaggagctccatgtgcctagcggcaaactgccaagagagagcgacatggaacactcacctagcgcaacggaggatagcctccagccagccacggatctgctgactaggagtgagctgccacagtcccagaaggcgatgcaaaccaaagacgcttcttcagatactgaactcgacaagtgtgagaaaaaaacccaactttttcttaccaaccagcggcctgaaatccagcctaccaccaataagcagtccttcagctacacaaaaatcaagtccgagccctcctcccccaggctggcctcttcaccagtgcagcccaatatcggacctagcttccctgtaggtccatttttaagccagttctcctttccacaggacattaccatggtgcctcaggcttctgaaattctcgctaaaatgtctgagctggtgcatcgtaggctgcgccatggcagttccagttatccccctgtcatatacagtccgcttatgcccaagggtgcaacttgctttgagtgtaatataacttttaacaatctcgacaattacctcgttcacaagaagcattattgtagtagccggtggcaacagatggctaaaagcccggagttcccttctgtgagcgagaaaatgccggaggctctgtcccccaacaccggacagacatccattaatcttctgaatccggcagcacatagtgctgatccagaaaatcctctcctccaaacatcttgcatcaattcgtcgactgtcctcgatcttattgggccaaatgggaaaggccatgataaggatttcagcacacagaccaagaagctgagtacaagcagcaacaacgatgataagataaacggcaagcccgttgatgtcaagaatcccagcgttccgttggtggatggcgaaagcgatcctaacaagacaacctgtgaagcctgcaatataactttttcacggcacgagacctatatggttcacaaacaatattattgcgccacaagacatgatcccccactgaagagatccgcgtcaaacaaggttccggcaatgcaacgcacgatgcgcactcgtaagcggcgaaaaatgtatgagatgtgcttgccggaacaggagcagcgtcctcctcttgtgcaacagcgctttctagacgtcgccaatttgaacaacccttgcacttccacacaggaacccaccgagggcctgggagaatgctatcaccctcggtgcgacatctttcctggcatagtctccaagcatttagagaccagcttgactataaacaaatgtgtaccggtctcaaagtgtgacactacacattcatccgtatcctgtctggagatggacgtacccattgacctttccaagaagtgcctgagccaaagcgagcgaaccaccacctctccaaaaagattgttagattatcatgagtgcacagtctgtaaaatcagtttcaacaaggtcgagaattatctcgcccataagcagaatttctgtccggtcacagcacaccaacgcaatgacctgggccaattggatggtaaggtttttcccaacccagagagcgaacggaattcacccgatgtctcttatgagcgcagcattatcaagtgtgagaaaaacggaaatctgaagcagcctagtcctaacgggaatctgttctcatcacacttagctacactgcaagggctgaaagtgttcagtgaagctgcgcaactgatagccaccaaggaggagaatcgccatttgtttttgccacagtgtctgtatccaggggctattaagaaggcgaagggagctgaccagctctcaccttactacggtataaagccctccgattatatctcgggcagcctcgtgatccacaatactgacatagagcaaagtaggaacgccgaaaatgagtctcccaagggacaagcatcatcgaacggctgcgccgctctcaagaaagactcattgccactgctgcccaagaaccggggtatggtcatcgtaaacgggggattaaagcaagacgaacggcctgcggcaaacccccagcaggaaaatatttcacagaaccctcaacacgaagatgaccacaagtcgcctagctggatcagcgagaatcctctggccgctaacgaaaacgttagtcctggcatcccctctgccgaggaacagctgtccagtatcgccaagggcgtcaacggcagctcacaggcccctacatctggaaagtactgcaggctgtgtgatattcagtttaacaatctgagcaattttatcactcataaaaagttttattgcagctcgcacgcagctgaacatgtgaaatag

SEQ ID NO: 247848 - DNA, 3060 bp, synthetic construct
  misc_feature 1..3060: note = Description of Artificial Sequence: Synthetic coding sequence
  source 1..3060: mol_type = other DNA
atggacctgaacaataactctctgaagactaaggcccaagtccctatggtacttaccgccggtccaaaatggctgcttgatgttacttggcaaggagtcgaggacaataagaataattgcatagtctattccaagggtggacagttatggtgtactacaaccaaggctatttctgagggcgaggagttgatcgccttcgttgtagacttcgactctcggctgcaggctgcttcacagatgaccctgaccgaaggcatgtacccggcacgtctgttggatagtatccagttactgccacagcaagcggctatggcgtccatactgcctaccgcaatcgtgaataaagacatctttccgtgtaagtcctgtggcatttggtacagatctgagcggaacctgcaggctcacctgatgtactactgctctggacgccaaagggaggcagcacccgtatcagaggagaatgaagatagcgcccatcagatcagctctctgtgcccattcccgcagtgtacgaagagtttctccaacgcaagagctctcgagatgcacctgaacagtcacagtggggtgaagatggaggagttcttgccacctggcgcttcactcaagtgtacggtctgctcctacactgcagattccgtgatcaatttccaccagcacctcttcagccatctcacgcaggcagccttccgatgtaatcactgccacttcggcttccagactcaacgcgaattgttgcaacaccaagaactccacgtgccctccggaaaactacccagggagagcgatatggagcattctcccagcgccaccgaagattctctgcagcccgcaaccgatttgttgacacgctctgaacttcctcagtctcaaaaggccatgcagacaaaagatgcctcttccgacaccgaactggataaatgcgagaaaaaaacacagctgtttttgaccaaccagagaccagagatacaacccaccacaaataaacagtccttctcttacacaaaaattaaatcagagccttccagcccccgacttgcatcctctccagtccagcctaacattggaccttctttcccagttgggccatttctgagtcaattcagctttccccaggatatcacaatggtacctcaggccagcgagatcctcgctaagatgtctgagctggtacaccggaggttgagacatggtagttcctcttatccacctgttatctattcacctctgatgccaaaaggcgctacctgcttcgaatgtaacatcacattcaataatctggacaattatttggttcataaaaaacactactgtagctctagatggcagcaaatggcgaaatcgcccgagtttcctagtgttagtgaaaagatgcccgaggccctgagccccaacactgggcagacctcaattaacctgctgaaccctgctgcacactccgctgacccagagaaccctctgttacagacatcgtgtataaactcgagtacagtgctggacctcataggcccaaacggcaagggacatgacaaggatttctcaacccagaccaagaaactgtccacatcttctaataatgacgacaaaattaacgggaagccagtggacgttaaaaatccttcagtccctctcgttgatggcgagagcgaccccaataaaactacctgtgaagcctgtaacataacattttcacggcacgaaacctacatggtacacaagcagtactattgtgcgactaggcacgaccctccgctcaagcgtagtgctagcaacaaggtgcccgcaatgcagcgcaccatgcgaacaagaaaaaggagaaaaatgtacgaaatgtgtctgccagaacaggagcaaagaccccctctggtccaacagcggttcctagatgtcgctaacttgaacaatccatgtaccagcacccaggagcctaccgagggtctgggtgaatgctaccaccccaggtgtgatatattcccagggatcgtgtcgaaacatctcgagacctcacttacgatcaataagtgcgtacccgtgagcaagtgtgatacaacacattcttccgtaagttgcctggaaatggacgtgccaatcgatttgtcgaagaagtgcctgagtcaatccgaaaggaccacgacatctcctaagagactgttggactaccatgagtgtactgtgtgcaaaatctcctttaacaaggtagagaactacctggcccacaagcagaacttctgtccagtaacagctcaccagaggaatgacctgggccagctcgatggaaaagtgttccccaatcccgagtctgaaaggaacagtcctgacgtctcttatgagcgatccatcatcaagtgtgagaagaacggaaacctgaaacagcctagtcccaatgggaatctgttctcttcccacctggcgacactgcagggactgaaggtgttctccgaggctgcgcagcttattgctacaaaggaagagaatagacacttgtttttgccacagtgtctgtatccaggggcaatcaagaaggccaagggcgctgaccaactgtcgccctactacggtataaagccatcagattacataagcggttctctggtgatccacaacaccgacatcgaacagtcacgcaacgctgagaacgaatcccctaagggacaggcgagctccaatgggtgcgccgcactgaaaaaggactcactgcccctgctgccaaagaatcgcggaatggtcatagtgaatgggggtctcaagcaagacgagcgaccagctgcaaatccccagcaggagaacatttcgcaaaacccacagcacgaagatgaccacaagagcccatcctggataagcgaaaatccacttgctgcaaacgaaaatgtgtccccaggcataccctctgccgaagaacagctgtcgagcattgcgaagggggtgaatggatcaagtcaggctcccacctctgggaagtattgtagattgtgtgatatccaattcaataacctgtctaactttatcacgcataagaaattctattgttcatctcatgccgctgagcacgtgaagtag

SEQ ID NO: 247849 - DNA, 3060 bp, synthetic construct
  misc_feature 1..3060: note = Description of Artificial Sequence: Synthetic coding sequence
  source 1..3060: mol_type = other DNA
atggatcttaacaataacagcctgaagaccaaagcccaggtgcccatggtgctgaccgccggtcctaagtggcttcttgatgtgacgtggcagggggtagaggataataagaacaattgcatagtgtatagtaaaggcggacagctgtggtgtacaactaccaaagcaatctccgaaggcgaagagctgatcgccttcgtcgtggacttcgattctagactccaggccgcttcccaaatgactttgacggagggtatgtatcctgcacggctgcttgactctattcagttactcccccagcaggccgctatggccagcatcctgccaacagctatcgttaacaaggatatattcccctgcaaatcatgcggtatctggtatcgcagcgagagaaaccttcaggctcatcttatgtactattgctcgggtaggcaacgggaagccgctccggtgagcgaggaaaacgaggattcagcccaccagatttcgtctttatgccccttcccccagtgtacaaagtcatttagcaacgcacgggcactggagatgcaccttaactctcattccggtgttaagatggaagagtttcttccccctggggcaagcttgaaatgtacagtgtgtagctacacagcagacagcgttataaattttcatcagcatctcttctcccatctgactcaagcagctttccgctgtaatcactgccacttcggattccagactcagcgtgaactccttcagcaccaggagttgcacgtgccaagtggcaagttaccacgcgaaagcgacatggaacacagccccagcgccaccgaggactcgctacagccagctaccgatctgttgacacggtctgaacttccccagagccagaaggctatgcagactaaggacgcatccagtgacacagagctggacaagtgtgagaagaagacacagctgttccttacaaaccaaaggccggagatccaaccaacaaccaacaagcaaagcttttcctacacaaagattaagtcagagcctagttcaccaaggttagcctcctcacctgttcagcctaatataggcccatctttccctgtggggccattcctttcgcaattctcttttccccaggacattacaatggtgccccaggcctccgagatcctggctaaaatgtctgaactcgtgcatagacgcctccgccacgggagttcttcttacccacccgtgatttactctccacttatgccaaagggggctacctgtttcgaatgtaacatcacctttaataaccttgataactacctcgtgcataaaaagcactactgtagctcccgttggcagcagatggctaaaagcccagagttcccatcagtgagtgaaaagatgcctgaagccttgtctcccaatacagggcaaacaagcattaaccttcttaaccctgccgcacactcggctgatccagagaaccccctcctgcagactagttgtatcaattcttcaaccgtgttagacctcatagggcctaatggcaagggacacgacaaagatttttctactcagacaaagaaattgtccactagcagtaataatgatgataagatcaatggtaagcccgtggacgtcaagaacccctcagtccccttggtcgatggcgagagtgacccaaacaagaccacatgcgaggcttgcaacattaccttctcacggcacgaaacatacatggtgcacaaacagtattactgtgcaactcggcatgaccctcctcttaaacggtccgccagcaataaggtcccagccatgcagcggacaatgagaacacggaagaggaggaaaatgtacgagatgtgcctcccagagcaggagcagagacccccactggtgcagcaacgctttctggatgtagctaatctgaacaacccatgtacaagtacccaggaaccgacagagggactgggggaatgctaccacccgcgatgtgacatttttcccggaatcgtgtcaaaacatctcgaaactagtcttactatcaacaaatgtgtgccagtgtctaagtgcgacacaacccattcaagtgtctcatgtctcgagatggatgtcccaatcgatctgagcaaaaaatgcctgtcccaaagcgagcgtactacgacatcacctaaacggctgctggactatcacgaatgcacagtatgcaagatcagcttcaacaaggtcgaaaattatctagcccacaagcaaaacttctgtcctgtaacagcccatcagagaaatgatcttggccagcttgatggcaaagtgttcccaaaccccgaatctgagcgcaattctccagatgtctcttacgaacgctccattatcaagtgcgaaaaaaacgggaatctgaagcagccgtctcctaacggcaatctgttttcctcccaccttgctactctacagggcttgaaggtgttttccgaggctgcccaacttattgccacaaaagaggagaatcgtcacttgtttctgccccagtgtctgtatcctggcgcaattaaaaaagctaaaggcgctgaccaactctcaccgtattacggcatcaaaccttccgattacatttcaggctcactggtgattcataatacagacatcgagcagagcagaaatgccgagaacgaatctccgaagggacaagcctcttccaacggttgcgccgctctcaaaaaagactccctgcccctgctgcctaaaaatagggggatggtgattgtgaacggtggtctgaagcaggatgagcgcccagccgcaaacccacagcaggagaatatatcacagaaccctcagcatgaggacgaccacaagagcccgtcatggatctccgagaaccccctggccgctaacgaaaacgtcagccctgggataccatcggctgaggaacagctgtccagcatcgctaagggcgtgaacggaagctcccaggcaccgacatccggtaagtactgtcggctgtgcgacattcagttcaacaatttaagtaacttcattacacacaagaaattctattgttccagtcacgctgctgagcacgtgaaatag

SEQ ID NO: 247850 - DNA, 2418 bp, synthetic construct
  misc_feature 1..2418: note = Description of Artificial Sequence: Synthetic coding sequence
  source 1..2418: mol_type = other DNA
atggatgaggatggactcgaacttcagcaggaaccaaactctttctttgatgcaacaggcgcagatggcacgcacatggacggggatcagatcgtcgtagaggtgcaggaaaccgtctttgtatctgacgtggtagactcagatattacagtgcataactttgttccagacgatccggatagcgtggtgattcaagatgtaatcgaagacgtcgtcatcgaggacgtgcagtgtcccgacattatggaggaagctgacgttagcgaaacagtgataatcccagagcaggtgctggattccgacgtcaccgaagaggttagtcttgcacactgtacagtacccgatgacgtattagcctcagatataaccagcgcctccatgagcatgcctgaacatgtcctaaccggcgattccattcacgtgtccgacgtcggacacgtgggccacgtcggtcatgtggagcacgtcgttcatgattctgtggttgaggccgaaatagtgaccgatcctttgacaaccgatgtagtttctgaggaggtcctggtggctgactgtgcttccgaggcggtgattgacgcaaatggcatccccgtggatcagcaggacgacgataaaggcaactgcgaggattaccttatgatctctttggacgatgcaggcaagattgaacatgatggaagctctggaatgacaatggataccgaaagcgaaatcgacccctgcaaggtggatgggacctgtccagaagtcattaaagtgtatatcttcaaagcagaccccggtgaggacgatctcggaggaacggtggacatcgtcgagtcagaacccgaaaatgaccatggagtggagctgctggaccaaaactcttccattcgcgtcccacgtgaaaagatggtatacatgaccgttaatgactcgcagcctgaggatgaagacttaaacgtcgcagagatcgccgacgaggtttatatggaggtgattgtcggagaggaggatgccgcagccgcagcggctgccgctgctgtgcatgagcaacagatggatgacaacgaaatcaagacgttcatgccgatcgcttgggccgcagcatacgggaataactccgacgggatcgagaatcgtaacggcacagcatcagccctgttgcacatcgacgagtccgcaggactgggtaggctcgcgaagcagaaaccaaaaaagaggcggcgacccgactctagacaataccagactgcaatcatcatcggtcctgacggtcatccgcttacagtgtacccttgcatgatctgcggaaaaaagttcaaaagtcggggtttcctaaaacggcacatgaagaatcatcctgaacatctcgccaagaagaaataccggtgcaccgattgcgactatactacaaacaagaaaatcagtcttcataatcatctggaatctcacaaactgacatctaaggccgagaaggcaatagagtgcgatgagtgtgggaagcatttttctcacgccggagccctctttacacacaagatggtacacaaggagaaaggagcaaataagatgcacaagtgtaagttctgtgaatacgagacagcagaacaaggtctgttaaatcgacatctgttggcggtgcacagcaaaaacttccctcatatctgtgtggagtgcgggaagggcttcagacacccatctgagctgaagaaacacatgcgaattcacactggagaaaagccctaccagtgccaatattgtgaatataggagtgctgattcttccaacctcaaaacacacgtgaagacaaaacactcgaaggagatgcccttcaagtgcgacatctgcctgctcacattttccgataccaaggaagtccaacaacatgccttaattcaccaagagagcaaaacacaccagtgccttcactgcgatcataaaagttctaattcttctgacttaaaaaggcacatcatcagcgtgcacaccaaggattatccacacaaatgcgacatgtgcgacaagggattccacaggccaagcgagctcaagaaacacgtggctgctcataagggcaaaaagatgcatcagtgtagacactgcgatttcaaaatcgctgatccattcgtgctgagcaggcatatcctgagcgtccatacaaaagaccttccattccgctgtaaacgctgccgcaagggctttaggcagcaatctgaactgaagaagcatatgaaaactcattctggcagaaaagtttaccagtgcgaatattgtgaatactccacaacagacgcttcaggattcaaacgccacgtgatttccattcatacaaaagattaccctcacagatgcgaatattgcaagaaaggattcagaaggcccagcgaaaaaaatcagcacatcatgcgtcaccataaagaggtgggcttgccctag

SEQ ID NO: 247851 - DNA, 2268 bp, synthetic construct
  misc_feature 1..2268: note = Description of Artificial Sequence: Synthetic coding sequence
  source 1..2268: mol_type = other DNA
atggacgaagatggactggagctgcagcaagaaccgaattcatttttcgacgcgaccggagccgacggaacacacatggacggcgatcagatagtcgtagaggtccaggagactgtcttcgtgtctgacgtggtagactctgacatcacagtccacaatttcgtaccagacgaccccgactccgtcgtcatccaggatgtgattgaggatgtagtgattgaagacgtgcagtgtcctgatattatggaagaggctgatgtatcggagactgtgatcatacccgagcaggtgttggactccgacgtcaccgaagaggtgtcgctagctcactgtaccgttccagacgacgttctggcatccgacattaccagtgcctctatgtcaatgccagaacacgttcttaccggggatagcatccatgttagtgacgtaggccatgtggggcacgttgggcacgtggagcatgtggttcacgatagcgtagtggaggccgaaatcgtcaccgatcccctcaccaccgacgtcgtgtctgaggaagtgcttgtggcagactgtgctagcgaggcggtcattgatgcaaacggtatccctgtcgaccaacaagatgacgacaaaggcaattgcgaggattatctaatgatatcttgtggcactgtcgacattgtggagtccgaaccagaaaatgaccacggcgtggagctcttggaccagaactcgtcaatcagggttccccgagagaagatggtgtacatgaccgttaacgactcacagcccgaggacgaggacctaaacgttgccgagattgccgacgaggtgtacatggaagtgatcgttggggaggaggatgcggctgccgcagccgcagctgctgcggtacatgagcagcagatggatgataacgaaatcaagactttcatgcctatcgcttgggccgctgcctacggcaataacagtgatggcatagagaaccggaatggaaccgcgagtgctttgctgcacattgacgaatcagcaggcctggggagactggccaagcagaagccgaaaaagaggcgaaggcccgactcaagacagtaccagacagccattataataggacccgatggccatccgttgactgtgtatccatgtatgatttgcgggaaaaagttcaagtcaagaggatttttaaagaggcatatgaaaaaccaccccgaacaccttgctaaaaagaaataccggtgtacagactgcgattacacaaccaataagaaaatcagccttcacaatcatctggagtctcataagttgacctcaaaggcggaaaaggcaatagaatgcgacgaatgtgggaaacacttctcacacgctggtgccctgtttacccacaagatggtgcataaggagaaaggtgcaaataagatgcacaaatgcaaattctgtgagtatgagacagcggaacaggggctcctgaatagacatctactggccgtccactctaaaaactttccccacatttgtgtggagtgcggaaaggggttccggcacccttctgaactgaagaaacacatgagaatccatacgggagagaaaccatatcagtgccagtactgcgagtatcggtcagccgacagctctaacctgaagacacacgtcaagacaaaacattcaaaagaaatgccttttaaatgcgacatctgcctcttaaccttctcagatacaaaggaagtgcagcaacacgccttgattcatcaggaatcgaagactcaccaatgcctgcattgtgaccataaaagtagcaactcttctgacctgaagaggcatatcatttctgtccataccaaggattatccacacaagtgtgatatgtgtgataaaggctttcatcgcccaagcgagctaaagaaacacgtcgctgcccacaagggaaagaagatgcatcagtgccgacactgcgattttaagatagcagaccccttcgtcttatcccggcatatattgtccgtgcacactaaggacctgcctttcagatgcaagaggtgccgcaaaggttttaggcagcagtctgagctgaaaaaacatatgaagacccactccgggaggaaggtctatcagtgtgaatactgcgaatattctaccactgacgcatccggatttaagcgtcatgtcatctctatacatacaaaggattacccacacaggtgcgaatattgcaagaaaggcttcagaaggccaagtgaaaagaaccagcacatcatgaggcaccataaggaagtgggcctcccttag

SEQ ID NO: 247852 - DNA, 2418 bp, synthetic construct
  misc_feature 1..2418: note = Description of Artificial Sequence: Synthetic coding sequence
  source 1..2418: mol_type = other DNA
atggacgaagacgggctcgaattgcagcaggaaccaaacagtttttttgatgcaaccggggcagatggaacgcacatggatggggaccagattgtggtagaagtgcaggagactgtgtttgtctccgacgttgtggacagtgacatcacagtgcacaatttcgtccccgacgatcctgacagcgtagtgattcaggacgtgatagaagatgtggtcatcgaagatgtccaatgcccggacataatggaggaggccgatgtcagcgaaacagtgatcatcccagagcaggtgcttgacagcgacgtcacagaggaagtgtcgcttgcgcactgtactgttcccgacgacgtgcttgcttctgatataacatctgccagcatgagcatgcctgagcacgtgcttaccggggactccattcatgtgagcgatgttggccatgtgggccacgtggggcatgtagagcatgttgtccacgatagtgtggtcgaagcggagatcgtaactgaccctttgaccaccgatgtcgtaagtgaggaagttctggtggctgattgtgcatccgaagctgtcattgatgcaaatggtatccctgttgatcagcaggacgatgacaagggtaattgtgaggactacctcatgatctccctggatgacgccggaaagattgagcatgacggaagttctggaatgacaatggatacagaatctgagatcgatccatgcaaggtggatggtacctgtcctgaggtcatcaaagtatatatcttcaaggccgaccctggagaagacgaccttgggggtacagttgatattgtggagagcgaacccgagaatgaccatggagttgaactacttgatcagaatagcagcatccgagtgcctcgcgaaaagatggtttatatgacagtgaatgacagccaacctgaggatgaagatctcaacgtggccgaaatagccgacgaggtgtacatggaggtcatagtaggcgaggaggacgcagcagccgctgcagcagccgcagccgttcatgagcaacaaatggatgataatgaaatcaagacattcatgccaattgcctgggctgcggcatacgggaataattctgacggcattgagaacagaaacggcacagcaagcgccctgttgcacatcgatgagtcggccggtttagggaggctagccaaacaaaagcccaagaaacgccgaagaccagacagcagacaataccagacagccatcatcattggcccagacggtcatcccctgaccgtctacccctgcatgatatgcggaaaaaagtttaagagccgcggtttcctaaagcgacatatgaagaatcatcctgaacacctggccaagaagaagtaccgctgcaccgattgcgactacaccactaacaaaaagatttcgttgcacaaccacttagaaagccataagctgacgtctaaggccgagaaagcaattgaatgtgatgagtgtggaaaacatttctcacacgcaggcgctctctttacccacaaaatggtgcataaggaaaagggtgctaacaagatgcacaagtgtaaattttgtgagtacgaaactgccgaacaaggactcctgaaccggcaccttcttgccgttcacagcaagaatttcccccatatctgcgtagagtgcggaaagggatttagacatcccagcgaactgaagaaacatatgaggattcacaccggtgaaaaaccgtaccagtgccagtattgcgagtatagaagcgcagattccagtaatctcaaaacacatgtgaaaaccaagcattcaaaagaaatgccgttcaagtgtgatatctgcctgctcacattctccgatacgaaggaggtccagcagcatgcgttaatccatcaggaaagcaagacccaccagtgcctgcattgcgaccacaagtcttcaaactcgtcagatctgaagaggcacataatcagtgtccatactaaggattacccacacaagtgcgatatgtgcgataaaggatttcaccgcccttcagagctaaaaaagcatgtcgcagcccacaagggtaaaaagatgcaccagtgcaggcattgcgatttcaagatagccgatccattcgtgctctctcgacatattctgtccgtgcacacgaaagatttaccctttagatgcaaacggtgtagaaagggcttccgacagcagtctgagcttaaaaagcatatgaagacacactcaggacggaaggtctaccagtgcgagtattgcgagtattccacaaccgatgctagcggatttaagcgtcatgtcattagcattcataccaaggactatccacaccgttgtgagtactgcaagaagggattcagacgcccatccgagaagaaccaacatataatgaggcaccacaaggaagtcggtctcccttag

SEQ ID NO: 247853 - DNA, 2418 bp, synthetic construct
  misc_feature 1..2418: note = Description of Artificial Sequence: Synthetic coding sequence
  source 1..2418: mol_type = other DNA
atggatgaagacggactggagctgcagcaagagcccaactcattttttgatgctaccggtgcagacggtacccacatggacggcgaccagattgtggtggaggttcaagagactgtcttcgtctccgatgtagttgacagtgatatcacagtgcataactttgtgcctgatgatccagactccgtggtcatccaagacgtcatcgaggacgtggtgattgaagacgtccagtgtcccgacattatggaagaagctgatgtaagcgaaacggtgatcatacctgaacaggtgctggattctgatgtcaccgaggaagtctctcttgctcactgcaccgtcccagacgacgtcctggcctcagatattacctccgccagtatgtcaatgcctgaacacgtcctgacaggtgacagcatccatgtaagcgatgtgggacatgtaggccacgtcggtcacgtcgaacatgtcgtccatgatagcgtagtggaggcagagatagtgactgatccattgactactgacgtggtgtctgaggaggtattagttgctgactgtgcttccgaagccgtgatagatgccaacggcatccccgttgatcagcaggacgatgataaagggaactgcgaggactacctgatgatatcgctggacgacgcaggcaaaatcgaacatgatggctcatcggggatgaccatggacacggaatccgaaattgatccatgtaaggtagatggtacttgtcccgaagttataaaggtgtatatcttcaaggccgatcccggagaggacgatctcggcggaacagtggacatcgtcgaatcagagccagaaaatgaccacggagtcgagctgctagatcagaatagtagcatcagggtaccgagggagaagatggtgtatatgactgtgaacgacagtcagcctgaggacgaagacttaaatgtcgccgaaatagccgatgaggtatatatggaggtgattgtgggtgaagaagatgccgcagctgccgctgcggcagcagccgttcatgaacagcagatggacgataatgagataaaaacgtttatgcctattgcgtgggccgcagcctatggcaacaacagtgacgggatagagaacagaaatggcacagcctccgcactcctgcatatagatgagtcagccggtctcggacggctcgcgaagcagaaaccaaaaaaaaggcgcaggcctgactctagacagtatcagacagccattataattggaccagacggtcaccctctcactgtgtacccttgcatgatttgcggcaaaaaatttaaatctcgcggttttcttaagaggcatatgaaaaaccatccggaacacctggcaaaaaagaaataccgctgcacagattgcgattacacaaccaacaagaagattagccttcataatcacctagagtcccacaaactgacatccaaagccgagaaggctatcgagtgcgatgaatgtgggaagcactttagccacgctggtgctttatttacacataagatggtccataaggaaaagggtgcgaataaaatgcataagtgtaagttttgtgaatatgagaccgcggagcagggtctgctcaataggcatctcctggcggtgcattctaagaatttccctcatatctgcgttgaatgtggtaagggctttcgccaccccagcgaactgaagaaacatatgcgcatccatactggagaaaaaccttaccaatgccagtactgcgaatatagaagtgccgactcttccaatctgaagactcatgttaagactaagcattctaaagaaatgccttttaagtgcgatatctgcctgctgacgttctcggataccaaggaggttcagcagcatgcgctgatccatcaggaatcaaagactcatcaatgtctccactgtgaccataaatccagcaatagttctgatctgaaaagacatattattagcgtgcacactaaggattatccgcataagtgcgatatgtgcgacaaaggattccacagaccatccgaacttaagaagcatgttgcagcacataagggcaaaaaaatgcaccaatgccgccactgtgactttaaaatcgctgatccctttgtgctatcacgtcacatcctgtccgtccataccaaagatctcccatttagatgcaaacgctgtagaaagggctttcgccagcaaagtgagttgaagaaacatatgaagactcacagcggccgaaaggtgtaccaatgcgaatactgtgaatactctacgactgatgcgtctggcttcaagcgacatgttatatccattcataccaaagattacccccaccgatgcgaatactgtaaaaagggtttcagacgtccctctgagaaaaaccaacacataatgaggcatcacaaggaggtggggctgccttag

SEQ ID NO: 247854 - DNA, 99 bp, synthetic construct
  misc_feature 1..99: note = Description of Artificial Sequence: Synthetic coding sequence
  source 1..99: mol_type = other DNA
atggacgaggatggtctggaattacagcaggaacccaactctttctttgatgcaactggcgcagacgggactcacatggatggggaccaaattgtttag

SEQ ID NO: 247855 - DNA, 408 bp, synthetic construct
  misc_feature 1..408: note = Description of Artificial Sequence: Synthetic coding sequence
  source 1..408: mol_type = other DNA
atggatgaggacggcctcgagcttcagcaggaacctaacagtttctttgacgccaccggtgccgacggcacccacatggacggggatcagatcgtagtggaggtgcaggagacagtcttcgtgtccgatgttgtggatagtgatatcacagttcataattttgttccagacgacccggactccgtcgttatacaggacgtaattgaagatgtcgttatcgaagacgtccagtgtcccgatattatggaggaggccgatgtcagcgagactgtgattattccggagcaagtgctggactcagatgttaccgaggaagtaagtctggcacattgtacggtgcccgatgatgtcttggcaagtgacatcacatccgcttccatgagtatgccagagcatgtccttacatag

SEQ ID NO: 247856 - DNA, 1584 bp, synthetic construct
  misc_feature 1..1584: note = Description of Artificial Sequence: Synthetic coding sequence
  source 1..1584: mol_type = other DNA
atggacacagaaagtgaaatcgacccctgtaaagtggatggcacctgcccagaagtgatcaaagtgtatatttttaaggccgaccctggtgaggacgatcttgggggaaccgttgatatcgtcgagtctgaaccggaaaacgaccacggtgttgagctgctcgatcagaactcttccatcagggtgccacgagagaaaatggtatatatgacagtgaacgacagccagccagaggatgaggatctcaatgtcgcagaaattgccgacgaggtatacatggaggtcatagtcggcgaggaggatgctgcagccgctgccgcagcagcggcagtgcatgagcagcagatggatgataatgagattaagactttcatgcccatcgcttgggccgctgcctacgcgatcataatagggcctgacgggcatccgctgactgtgtatccttgcatgatatgcgggaagaagttcaagtcacgcggttttttgaagcgccatatgaaaaaccaccccgagcacctggcaaagaagaagtacagatgcacagactgcgactacacgacaaataagaagatcagtttgcacaaccatttagaaagccataagttgactagtaaggccgaaaaggccattgaatgtgatgaatgcggtaagcacttttcacatgctggagccctgtttacccacaaaatggtacacaaagaaaagggagcgaacaagatgcataagtgcaaattttgcgagtacgaaacggccgagcagggcctgcttaatcgccacctgctggcagtgcacagtaagaacttccctcatatatgcgtagagtgcggaaagggctttcggcatccttctgaactcaagaaacacatgaggatccacaccggggaaaaaccgtaccagtgtcaatattgtgagtaccgcagcgccgactctagtaatcttaagactcatgtcaaaacaaagcacagcaaggagatgccctttaaatgtgacatttgtcttctcactttttcagatacaaaagaggtgcagcagcacgcccttatccatcaagagtccaagactcaccaatgcctccattgtgatcacaaaagttccaactcctccgacctgaagagacacatcatatccgtccacacaaaggactacccgcacaaatgcgacatgtgcgataagggtttccaccggcctagcgagcttaaaaagcacgtagcagcacataaaggcaagaaaatgcaccagtgccgccactgcgactttaaaatagcagacccctttgtgctgtcacgacatatactgtccgtgcatacaaaagatctgcccttcagatgtaagaggtgtcgcaaggggtttcgacagcagtctgagcttaaaaagcacatgaagacccactctgggaggaaggtgtaccagtgtgagtactgtgaatacagtacaacggacgcatcagggttcaagaggcacgtgatttccatccacaccaaggactatcctcaccggtgtgagtattgcaagaagggattcagaagaccaagtgagaagaaccagcacatcatgcgtcaccacaaagaagtgggccttccttag

SEQ ID NO: 247857 - DNA, 789 bp, synthetic construct
  misc_feature 1..789: note = Description of Artificial Sequence: Synthetic coding sequence
  source 1..789: mol_type = other DNA
atggacgaggatgggcttgaactacaacaggagcctaacagctttttcgatgcgaccggagcagacggcactcatatggacggtgaccagatcgtggtggaggtgcaggagaccgtgtttgtttctgacgttgtagatagcgatattaccgtgcataactttgtgccagatgatcccgatagtgtcgttattcaggacgtcattgaggacgttgtcatcgaagacgttcaatgcccagacataatggaagaggccgacgttagtgaaacagttatcatcccagaacaggttctggatagcgacgttaccgaggaagttagtctagcccactgtaccgtccctgatgatgtcctcgctagtgatataactagtgccagcatgtcaatgcctgagcacgtgctcacaggtgatagtatacacgtatcagatgttggtcatgtggggcacgttggccatgtcgagcacgtagtccacgactccgtggtcgaagccgagatcgtgactgatcctttgacgaccgacgtcgtgagcgaggaagtgttggtcgccgactgtgcatcagaagccgtgatagacgcaaacggtatcccagtggaccaacaggacgatgataaagggaattgtgaggactatttgatgatttcatgcaacaattcagatgggatcgaaaatcgcaatggaacggccagcgcccttctgcacattgatgaatcggcagggctgggacgtctagcaaaacagaaacccaagaagcgcagacgccctgacagccggcaataccaaacctag

SEQ ID NO: 247858 - DNA, 1731 bp, synthetic construct
  misc_feature 1..1731: note = Description of Artificial Sequence: Synthetic coding sequence
  source 1..1731: mol_type = other DNA
atgaccatggataccgaatccgaaatagatccttgtaaagtggacgggacctgtccagaagttatcaaagtgtatattttcaaagctgacccgggtgaggatgatctaggtggcaccgtcgacatagtggagtcggagcctgagaacgaccacggagtcgaacttttagatcagaactcttccatacgtgttccacgggagaaaatggtttacatgactgtcaacgattcccaacctgaggatgaggatctcaatgtggctgaaattgccgatgaggtgtacatggaagtgatagtaggcgaggaggatgctgccgcagccgctgcagccgctgctgtgcacgaacagcaaatggatgacaacgagatcaagactttcatgcctatagcatgggctgcagcatacggtaacaatagcgatggaatagagaaccggaacgggacagcaagcgctctcctgcatatcgatgagagtgctggacttggcaggctcgccaaacaaaaacctaagaaacgcagacgaccagattcccggcagtatcaaactgccataatcattggtcctgatggtcacccacttactgtgtacccatgtatgatttgtggaaagaagttcaagtcacgaggatttttaaagaggcacatgaaaaatcaccccgaacacttagccaagaaaaagtatagatgtactgattgtgactacaccaccaacaaaaaaatttctcttcataaccacctggagagccacaagttgacaagtaaggcagaaaaagctattgagtgtgacgagtgtgggaaacacttcagccacgccggagcactgttcactcacaagatggtgcacaaggagaaaggggcaaacaagatgcataagtgtaagttttgtgaatacgaaacagctgaacaaggacttctcaacaggcacctgctggcagtgcactcgaagaatttccctcacatttgcgttgagtgtggtaaagggttcaggcaccccagtgagctaaaaaagcacatgaggattcatacaggcgagaagccttaccaatgtcagtactgcgagtaccggtccgccgacagtagtaacttaaaaacccacgttaagacaaaacatagcaaagaaatgcctttcaaatgcgatatctgtctcctcaccttcagcgacactaaagaagtgcagcagcacgcactgattcatcaggagtccaagacacaccagtgtctccactgcgatcataagtccagcaacagttctgacctgaagagacacattatcagcgtgcatacaaaggactacccccataaatgtgacatgtgcgataagggattccatagaccttctgaattgaaaaagcacgttgccgcacacaaaggcaagaagatgcatcaatgccgacattgcgatttcaaaatcgcagatcccttcgtgctctcacgacatattcttagtgtgcatacgaaagatctcccttttcggtgcaagcgctgcagaaaggggttccgtcaacagtcagagctgaaaaaacatatgaaaacccattctggacgcaaagtctaccagtgcgagtattgtgagtacagcaccaccgacgcttctggatttaaacgacatgtgatttccatccacaccaaggattatccccatagatgtgaatattgtaagaaagggtttaggcgtccgagcgaaaagaaccagcacataatgcggcatcataaagaggtgggcctgccgtag

SEQ ID NO: 247859 - DNA, 2535 bp, synthetic construct
  misc_feature 1..2535: note = Description of Artificial Sequence: Synthetic coding sequence
  source 1..2535: mol_type = other DNA
atggacgaggacggtctggagttgcaacaggagccaaactcgttcttcgatgctaccgatagggtgtctttttgtcatccaggctggagcacggtcgcaccttctggtagtacagcaacatctgccagtcaggcccaggtaatttgcagtgccagccgcgtgaccggggctacgggggctgatggaacacatatggacggggaccagatcgtggttgaggttcaggaaaccgttttcgtctcggatgtcgtggactctgacatcacagtccataactttgtgcccgatgaccctgactcagttgtgatccaggatgtaatcgaggatgtcgtgatcgaggatgtccagtgtcccgacatcatggaagaggccgatgtttctgagacagtgataatacccgagcaggtcttggactcagatgtaactgaagaagtcagtcttgcccattgtacagtacctgacgacgttttagctagcgacatcactagcgcaagcatgtcaatgcccgagcatgttctgaccggagatagcattcacgtctctgacgtgggacacgtcggccatgtcgggcacgtggagcacgtcgtgcatgattctgtggttgaagctgaaattgtgaccgatcccttgactaccgacgtcgtgtctgaggaggttcttgtagcggattgcgcttctgaagctgtgatcgatgcaaatgggattccggtggaccaacaggatgacgacaagggaaattgtgaagactatctgatgatttcactcgatgatgccggaaagatcgagcatgacgggagcagcgggatgacaatggacactgagtcagaaatcgacccctgcaaagtggacggcacttgtccagaggtcattaaggtctatatattcaaggcggatccgggagaggacgacctcgggggaactgtagacatcgtggaaagtgagcccgagaatgaccacggcgttgagttgctcgaccaaaattcctcaattcgcgtcccccgagaaaaaatggtgtatatgaccgttaatgacagccagccagaagatgaagatctgaacgtggcggagatcgccgacgaggtatatatggaggtgattgtgggagaggaggacgccgctgccgctgcagccgcagctgctgtccatgaacagcaaatggacgacaacgagattaaaacctttatgcctatagcatgggccgcagcatatgggaataattccgatggtatcgaaaataggaacggaactgcttccgctcttttgcatatagatgagagcgcaggcttgggacgtttggccaaacagaaaccaaagaagcggcgacgccctgatagcagacaataccagacagcgattataatcggcccagacgggcatccccttacagtatacccgtgtatgatctgtggtaagaagttcaagagccggggattcttgaagcgacacatgaaaaaccaccccgaacatcttgctaagaagaaataccgctgcacagactgcgactacactacgaataagaaaatttcactgcacaaccacctggagtctcataaacttactagtaaggctgagaaggcgattgaatgtgacgagtgtggaaaacacttcagtcacgctggggcactctttacccacaaaatggtccacaaggagaagggcgctaataagatgcacaaatgcaagttctgcgagtacgagaccgccgagcaggggctgcttaataggcacttacttgctgtacacagcaagaactttccacatatctgtgtcgaatgcggtaaaggattcaggcaccccagcgagttgaagaagcacatgcggatacacacaggtgagaaaccataccagtgccagtactgtgaatataggtctgctgatagcagcaatctcaaaacacatgtaaaaactaagcattcaaaggagatgccgttcaagtgcgacatctgtctgctgactttcagcgacacaaaagaggttcagcagcacgcgctgattcatcaggaatcaaagacacaccagtgtttacactgcgaccacaagagctcaaactcatcagatttaaagcgacatataatttcagtccacaccaaggattatccccataagtgcgatatgtgtgacaagggcttccataggccttcagagctgaaaaagcatgttgcagctcacaaaggcaaaaagatgcatcagtgtcgccactgcgacttcaaaattgctgatccattcgtgctcagcagacacattctgtctgtgcataccaaggacctgccattccggtgtaagaggtgccgcaaaggattcagacagcaatctgaactaaaaaaacatatgaagacccactccggacgcaaagtataccaatgtgaatattgcgagtattcaacgacggacgcgtctggatttaagaggcacgtcattagcatacacactaaagattacccccatcgttgtgaatactgcaaaaagggattcagaagacccagcgaaaaaaatcagcatattatgagacaccataaagaggtgggtctgccatag

SEQ ID NO: 247860 - DNA, 522 bp, synthetic construct
  misc_feature 1..522: note = Description of Artificial Sequence: Synthetic coding sequence
  source 1..522: mol_type = other DNA
gggggatgcagtcaatacctgctactgttcgtggatgacgcgggaaagatcgaacacgatggctcatccggaatgactatggatacagaatctgagatagatccatgcaaagtggatggtacatgccctgaggtgatcaaggtgtacatctttaaagctgatccaggcgaagatgatctgggcggtacagtggatatagttgagagcgaacctgaaaacgatcacggcgtggaattactggaccagaatagttccatccgcgttcccagagaaaagatggtctacatgactgtcaacgatagtcaacctgaagacgaggacctcaatgtcgccgaaattgccgatgaggtttatatggaagtcatagtcggtgaggaggatgctgcagcagcagccgctgccgctgccgttcacgaacaacagatggatgataacgaaatcaaaactttcatgccgattgcgtgggctgctgcttacggcaacaatagcgacgggattgagaaccgaaatgggaccgcgtag

SEQ ID NO: 247861 - DNA, 2406 bp, synthetic construct
  misc_feature 1..2406: note = Description of Artificial Sequence: Synthetic coding sequence
  source 1..2406: mol_type = other DNA
atggacgaggatgagttcgagttgcagcctcaggagcctaactccttctttgatggaatcggtgccgacgctacacatatggacggagatcagatagttgtcgaaattcaggaagcggtgttcgtctccaacatcgtggactcggatattaccgtgcacaatttcgtgcctgatgaccctgattctgtggtgatacaggacgtcgtggaagacgttgtaatagaagaggatgtgcagtgctccgacatactggaggaagccgacgttagcgagaatgtgatcattccggaacaagttttggacagcgacgtgactgaggaggttagcctgcctcattgtacagtgcccgacgatgtgcttgcatccgatatcacttctacaagtatgtcaatgcccgaacatgtcctgacatccgaatcaatgcatgtgtgtgacatcgggcacgtggaacatatggtgcacgactcagtagtcgaggctgaaatcatcacagacccactcacctccgatattgtcagtgaggaagtcttagttgccgactgcgccccagaggccgttattgacgctagtggcatttccgttgaccagcaggacaacgataaagcatcttgtgaggattacctgatgatttccctggacgatgcagggaagatcgaacatgacgggagcactggcgtaacgattgatgccgaatccgaaatggatccatgcaaagtagattcgacttgccctgaggttatcaaggtctatatattcaaagccgacccaggggaagatgatctcgggggaaccgtggatatcgtggagtctgaacccgaaaacgatcatggtgtggagttactcgaccagaatagctccattcgggttccacgggagaagatggtgtatatgaccgttaatgactcacagcaagaagacgaggacctcaacgtagccgaaatagcagatgaagtatacatggaagtcatcgtgggagaagaagatgcggctgtggctgccgctgcggcagccgttcacgaacagcagatcgacgaagatgaaatgaaaacattcgtgcctattgcttgggccgctgcgtacggcaataattctgatgggattgaaaacagaaatggaacagcttccgccctcctccatatcgatgaaagcgccggtttgggtcggctggccaagcagaagccgaaaaagaagcgccgacccgattcccgccagtaccagaccgctatcatcatcggccctgatggtcacccgctcactgtgtacccgtgcatgatctgtggaaaaaagttcaagtcgcgtggatttctcaaacgacatatgaagaatcatcctgagcatctagcaaagaaaaaataccattgcaccgactgcgattatacgaccaataaaaagataagcctccacaatcacctggaatctcacaaactgactagtaaggctgagaaagcgatcgaatgcgacgagtgtgggaaacattttagtcacgccggagccctattcacccataaaatggtacacaaggaaaaaggagctaacaagatgcacaagtgcaaattttgcgaatatgaaaccgcagagcagggcctcttgaataggcatctgctggccgtgcacagtaagaactttcctcacatctgtgtcgagtgcggaaaggggtttcgccacccctcagagctgaggaagcatatgcggattcacaccggcgagaaaccttaccagtgccagtattgcgaatacagatcagctgacagcagtaacctcaaaacccatatcaaaaccaagcacagtaaagagatgccttttaaatgtgacatctgcctgctgaccttcagcgacacaaaggaagttcaacagcacacactggtgcatcaagagtctaagactcaccagtgtctgcattgcgaccataaatcttccaactcgtccgacttaaaacggcacgtgatttccgtgcacacaaaggactacccacataagtgtgagatgtgcgagaaaggctttcatcggccatctgagctcaaaaaacatgtcgccgtgcataagggcaagaagatgcaccaatgtaggcattgcgattttaaaatagcagaccccttcgtgctgtcacgacatatcctgagtgtgcataccaaagacctccccttccggtgcaaaaggtgtagaaaagggtttcggcagcagaacgaactgaaaaaacacatgaaaacacattccggtaggaaggtctaccagtgcgagtattgcgagtatagtacgactgacgcctctgggtttaagcgccacgtcatatcaatacacactaaagactacccccacaggtgtgagtactgcaagaaggggttcagaaggccatctgagaaaaatcaacacatcatgagacaccacaaagaggtggggctgccttag

SEQ ID NO: 247862 - DNA, 2406 bp, synthetic construct
  misc_feature 1..2406: note = Description of Artificial Sequence: Synthetic coding sequence
  source 1..2406: mol_type = other DNA
atggatgaggacgaattcgagttgcagccccaagagccaaacagcttctttgatgggattggagcagatgcaacgcacatggacggggatcagattgtcgtcgagatccaagaggctgtctttgtgtcaaatatcgtggattcggatataaccgtgcacaattttgttcccgacgaccctgatagcgtggttatccaggacgttgtggaagatgtggtcatcgaggaggacgtacagtgttctgacatcctagaggaagctgacgtgtcagaaaacgtgataatccccgagcaggtgcttgactcagatgtgaccgaagaggtctcactgccacattgtaccgtcccagatgatgttttagccagtgatatcacgagcacctcaatgtctatgcccgagcacgtactgacttcggagtccatgcacgtgtgtgacattggacacgtggaacacatggtgcatgactctgtagtggaagccgagattatcacggacccgttgacatcggacatcgtttcggaagaagtcctcgtcgctgactgtgcaccagaagccgtgatagatgccagcgggatatcagtggatcagcaggacaacgataaggcatcgtgcgaggactatcttatgatctcacttgatgatgcgggaaaaatcgaacatgatggctcgacaggcgtcaccatcgacgccgagagcgagatggatccctgcaaagtggactccacatgcccggaggtgatcaaagtgtacattttcaaagccgatcctggagaggacgatttagggggtacggtggatatagtcgagtcagagcccgaaaatgaccatggcgtggagctactggaccaaaacagctctattagggtaccacgggaaaagatggtttacatgacagtgaacgattcacagcaggaggatgaggacctgaacgtggctgaaattgctgatgaagtgtacatggaagtaattgtcggggaggaggacgccgctgtagcggctgccgctgccgctgtgcatgaacagcagatagacgaagatgagatgaagacattcgtgcccattgcttgggcagccgcatacgggaacaattcggacgggatagagaatagaaatggaactgcttctgcactgctccacattgacgagtcggccggactggggagacttgctaaacagaagcccaaaaaaaagcgtcgacctgacagtcgacagtaccagacggcgattattatcggaccggacggacatccccttaccgtctatccatgcatgatctgtggcaaaaaatttaagtccagaggatttctgaagcgacacatgaagaatcacccagaacatcttgctaagaagaagtaccattgcacagactgtgattacacgactaacaagaaaatctcgctccacaaccacttagagtctcacaagctgacaagtaaggccgaaaaggcgattgagtgcgatgaatgcggcaaacattttagccacgccggtgcccttttcacacataagatggtccataaggagaaaggtgcaaataaaatgcacaagtgcaaattttgtgagtatgagaccgccgagcagggcctgctgaaccgacacctgctggcagtgcatagtaaaaatttcccccacatttgcgtggaatgcggaaagggcttcagacacccatccgagctgcggaaacacatgagaatacacactggtgagaaaccataccagtgtcagtattgcgagtatagaagcgccgattcttccaacctcaagacacacattaagacaaaacatagcaaggaaatgcctttcaaatgcgatatctgtttgttgacattcagcgatactaaagaagtccagcagcacacccttgttcatcaggaatctaagacgcaccagtgcttgcattgcgaccataaatcaagcaacagcagtgatcttaagagacacgttatcagtgtgcatacaaaggactacccccataagtgcgagatgtgcgagaaagggttccaccggccaagcgagctcaaaaagcatgtagcagttcataaaggcaagaagatgcaccagtgccggcactgcgattttaaaattgccgatcccttcgtcttaagcagacacatcctgtcggtccataccaaagacctgccatttaggtgcaagcgctgtcgcaagggttttcggcaacaaaatgaactgaagaaacacatgaagacacattctggcaggaaagtttatcaatgcgaatattgcgagtacagtactaccgatgcctctgggttcaagcggcacgtaatcagcatccacaccaaagactatccccatcgatgcgaatactgcaagaaggggttccgtcgcccttcagagaagaaccaacatatcatgagacatcacaaggaagtgggccttccttag

SEQ ID NO: 247863 - DNA, 1833 bp, synthetic construct
  misc_feature 1..1833: note = Description of Artificial Sequence: Synthetic coding sequence
  source 1..1833: mol_type = other DNA
atggacgaagacgaattcgaattgcaaccgcaggaacctaactccttcttcgatggaatcgtcgacgatgctgggaagatcgagcacgatgggagcactggggtcacaattgacgcagagtccgagatggatccttgcaaggtagactcaacctgtcccgaggtgattaaggtatacatctttaaggcagatcctggggaggacgatcttggagggactgtcgatatcgtcgaatctgagcctgagaacgaccatggagtggaactgttggatcagaattccagcatccgggtgccgagagaaaaaatggtgtacatgaccgttaatgacagccaacaagaagacgaagacctcaatgttgctgagatcgctgatgaagtgtatatggaggtcattgtgggcgaggaagatgctgccgtggcggctgctgctgctgctgtgcacgagcaacaaatcgatgaagatgagatgaagacattcgtgccaattgcgtgggcagcggcttatggtaacaattcagatggcatagaaaacaggaacggaactgctagtgccctgttgcacatagatgaaagcgccggattaggaaggctcgcaaaacagaagccaaaaaaaaagaggcgcccagattcaaggcaatatcagacagcaattatcattggccctgacggacatccgcttacagtgtacccatgtatgatttgtggaaaaaaattcaaaagccgagggttcctcaagcgtcacatgaaaaatcacccagagcatctggcaaagaaaaagtatcactgcacggattgtgattataccacaaataagaaaattagcttgcataaccacctcgagtcccataagctgactagtaaagccgagaaggctattgaatgcgatgaatgtggaaagcactttagtcatgccggtgcgttattcacacataaaatggtacacaaggaaaagggcgcaaacaagatgcacaaatgcaaattttgtgaatacgagaccgccgaacagggactgctgaaccggcacctgctagctgtccacagtaaaaattttccccatatctgcgtggagtgtgggaaggggtttaggcacccatccgaattacggaagcatatgcgcatccatactggcgaaaaaccatatcagtgtcagtattgcgagtacaggtctgccgactcttctaatctaaaaacccacattaaaactaagcatagcaaggagatgccctttaaatgtgacatctgcctcctcactttctctgataccaaggaggttcagcaacacactctggtgcatcaagagagcaagacccaccagtgcctccattgcgaccacaaaagctcgaatagttcggatctgaaaaggcatgttattagcgtgcacacaaaagattatccacacaaatgtgagatgtgtgaaaaagggttccacagaccgtcagaactgaaaaagcacgttgccgtgcataaaggtaagaagatgcaccagtgccggcactgtgacttcaaaattgctgacccatttgtcttatcccgacacatattgtccgtgcatacaaaggacctcccttttaggtgcaagcggtgtcgcaagggctttagacagcagaatgagctaaaaaagcacatgaaaacacactctggtcggaaagtgtatcagtgtgaatattgcgaatactcgacgacagacgcaagcggttttaaacggcacgttatttccattcatacaaaggactacccccaccggtgtgagtactgtaaaaagggatttaggaggccaagcgagaagaaccaacacattatgcgccatcacaaggaggttgggctgccttag

SEQ ID NO: 247864 - DNA, 276 bp, synthetic construct
  misc_feature 1..276: note = Description of Artificial Sequence: Synthetic coding sequence
  source 1..276: mol_type = other DNA
atggatgaggacgagttcgagttgcaaccccaggagccgaacagctttttcgatggcattggcgcagacgccacacacatggacggcgatcagatcgtggtggaaatccaagaagccgtgttcgtctccaacatcgtagacagcgacataacagttcacaacttcgttcctgacgacccggacagtgtcgttattcaggacgtggtggaggacgtcgtcattgaggaagacgtgcagtgctccgatatcctggaagaggcagacgttagtgagtag

SEQ ID NO: 247865 - DNA, 2175 bp, synthetic construct
  misc_feature 1..2175: note = Description of Artificial Sequence: Synthetic coding sequence
  source 1..2175: mol_type = other DNA
atggacggggaccagatcgtcgtagagattcaggaggccgtatttgtgtcgaatattgtcgatagcgacatcaccgtccataatttcgtgcctgacgatcctgactcagtggtgattcaggacgttgtggaagatgttgtcattgaagaggatgtccagtgttctgacattctggaagaggccgatgtgtccgaaaatgtcattattcccgaacaggtgctggactctgatgtgaccgaggaagtgtctcttccccattgtaccgtacccgatgatgtgctagcgtccgatatcacttccaccagcatgtcaatgccagagcacgtgctgacctctgaatcaatgcacgtgtgcgatattgggcacgttgagcacatggttcacgatagtgtggtagaagctgaaatcattactgatccgcttaccagtgacatagttagcgaagaagtgctagtggccgattgtgccccagaagctgtgatcgatgcatcagggattagcgtggatcagcaggataacgacaaggcttcttgcgaagattatctaatgatctcactcgacgatgccggaaaaatcgagcatgacgggtccactggcgtcaccattgatgcagagagcgaaatggacccatgcaaggtagactcaacctgtccggaagtcataaaagtctacattttcaaggcagaccctggagaagatgatctgggtgggacggtggatatcgtggagagtgaacccgagaatgatcacggggttgagctcttagatcaaaattcctcaattagagtgcccagagagaaaatggtgtacatgacagtaaatgatagccaacaggaggatgaagacctgagcaacaactccgatggcatcgagaacagaaatggaaccgcctccgcattgctgcatattgatgagtctgcaggcctgggaaggctggcaaaacagaagccaaagaaaaagcgccgtcccgactcccgtcaataccagactgcgatcataattgggcctgacggacacccactgacagtgtatccttgtatgatttgtggcaagaaatttaagtctaggggatttctgaagagacatatgaagaaccacccggaacacctggccaaaaagaaatatcattgcactgactgtgattatacaactaataagaaaatcagtctgcacaaccatctagagagtcataaattaacctcgaaagcggagaaggccatcgagtgcgatgagtgcggcaaacacttcagtcacgcaggagccctgttcacacataagatggtccataaggagaaaggcgcaaataagatgcataagtgcaaattttgtgaatacgagacagccgagcaaggccttctgaaccggcatctgctggcggtgcattctaagaattttccccacatctgcgtagagtgtggcaagggcttcaggcatccgtccgagctgaggaagcatatgagaatccatacaggagaaaagccctaccagtgccagtattgcgagtatcggtccgcggatagtagcaatctgaagacacacatcaagaccaaacattcaaaagagatgcccttcaagtgtgatatttgtttactgacttttagtgacacgaaggaagttcaacagcacactctggtccaccaggaaagtaagacacatcagtgtctgcactgtgaccataaatcctctaacagtagtgacttaaaacgccacgtgatttcagtgcatactaaagactatccccacaagtgcgagatgtgtgagaaggggttccacaggccctcagagctcaagaagcatgttgcggtccacaagggcaagaagatgcatcagtgccgacactgcgattttaagatcgccgacccattcgtattgagcagacatatcctgtcggtccacaccaaggacctaccatttaggtgcaaaaggtgccgcaagggattccggcagcagaatgaactgaagaaacacatgaaaacacatagtggccgtaaagtgtaccaatgcgagtactgcgaatacagtactacggacgcttccggatttaagcggcatgtcatcagtatccacactaaggattatccacatcgctgcgagtactgtaagaagggctttcgccgaccttctgaaaagaatcagcacattatgcggcatcacaaagaagtgggactaccgtag

SEQ ID NO: 247866 - DNA, 1617 bp, synthetic construct
  misc_feature 1..1617: note = Description of Artificial Sequence: Synthetic coding sequence
  source 1..1617: mol_type = other DNA
atggcgagggaactgtccgagtcgactgccctagacgcccagagcactgaagaccaaatggaactgttggtgattaaggtggaagaggaggaagccggttttccctcatctcctgatttaggatccgagggatcgagagaaagatttcgaggctttagatatcccgaagctgccggtccacgggaggctctgtctagactccgtgaactgtgccgacagtggttgcaaccggagatgcattccaaggaacaaattcttgagttgctcgtcctggaacagttcctaacaatactgcctggaaaccttcagagttgggtgcgcgagcaacatcccgagagcggggaggaggttgtcgtgttactggaatacctcgaacgtcagctggatgagcccgctcctcaggtctctggagtggatcaggggcaagagctcttgtgttgtaaaatggcgctactcacacctgcacccggttctcaaagttctcagtttcagcttatgaaagctctgctgaaacacgagtctgtcggcagccaacccctacaggaccgcgtgttgcaagtcccggtgttagctcacggtgggtgctgccgggaagacaaagtggtggcctcaagattaacaccggagagccagggactcttgaaagtggaggacgtggctttgactctaactccagagtggacacagcaggattcctcccagggtaacctctgccgcgacgagaagcaggaaaatcacggttctctggtgagcctaggtgatgagaaacaaacaaaatcccgggatctacccccagcagaggagctgcccgaaaaagagcacgggaaaattagttgccaccttagagaagacatcgctcagatacctacatgtgctgaggcaggagagcaggaagggaggctgcagcggaagcagaaaaatgccactggaggcaggagacacatatgtcatgagtgcgggaagtcatttgctcagtcttctggactgtccaagcacaggcgaatccataccggagagaaaccctacgaatgcgaagagtgcggcaaggcgtttatcgggtctagtgctctcgttatccaccagagggttcatacaggcgaaaaaccatacgaatgcgaagagtgtggaaaggccttttcacacagtagtgatctcattaaacaccagagaactcataccggcgagaagccctacgaatgcgatgattgtggtaaaacgttctcacagagttgctcattattggagcatcacagaatccataccggggaaaaaccctaccagtgttccatgtgcggaaaggccttcagaagaagtagccacttgttgagacatcagcggatccataccggcgataaaaatgtacaggagcctgagcagggcgaggcctggaaaagcaggatggaatcccagcttgagaacgtggagactccaatgtcatataagtgtaacgaatgcgagaggtcgttcactcaaaataccggcttaatagagcaccaaaaaatccacacaggggagaaaccctatcaatgcaatgcttgtggcaaaggtttcacccgaatttcatatctcgtccagcaccagagatctcacgtgggcaagaacatcctaagccagtag

SEQ ID NO: 247867 - DNA, 1173 bp, synthetic construct
  misc_feature 1..1173: note = Description of Artificial Sequence: Synthetic coding sequence
  source 1..1173: mol_type = other DNA
atggcactgctgacacccgctcccggttctcagtcctcccagttccagctcatgaaagcactgctgaagcatgaatcagtcgggagccagcccctgcaagaccgtgtgcttcaggtgccagtgctggctcacggaggttgttgcagggaagacaaagtggtggccagcagactcaccccagagagtcaaggtctcctcaaggtcgaggacgtggccttaacactgacccccgagtggactcagcaggatagctctcagggcaatttatgtagagacgaaaagcaggagaaccacggatccttggtcagcctgggggacgaaaagcagacgaagtctcgcgacttaccccctgctgaggaactgcccgagaaggaacatggaaagatctcatgtcatctgcgggaggacattgcacagattccgacttgcgccgaagcgggtgagcaggaaggaagattgcaacgaaagcagaagaatgcgaccggcggaaggcggcacatctgtcatgaatgcgggaagtcgtttgcgcaatcctcagggctgagcaagcatcgaaggatccatacaggcgaaaagccctacgagtgcgaggagtgtggtaaagcattcattgggtcttccgcacttgtgatacaccagcgtgtgcatactggtgagaaaccttacgagtgcgaggagtgcgggaaagctttttcccatagctctgatttgataaaacatcagcgcacgcacacgggcgaaaagccttatgaatgcgatgactgtggcaaaaccttctcacagtcctgcagcttactcgagcaccaccgtattcatactggggagaaaccataccagtgttccatgtgcgggaaagcatttcgacggagtagtcatctgttgcgacaccagcggatccatacaggcgataagaatgttcaggaaccggagcagggcgaggcctggaaaagccgaatggagtcacaacttgaaaacgttgagacccctatgtcttacaaatgtaacgaatgtgaacgcagcttcacccagaatactggactgatagaacatcagaagattcatactggagaaaagccttaccagtgcaatgcgtgcggcaagggatttacccgaatatcatacttggtacagcatcagcgtagtcacgtcggaaaaaacatcttgagccagtag

SEQ ID NO: 247868 - DNA, 1617 bp, synthetic construct
  misc_feature 1..1617: note = Description of Artificial Sequence: Synthetic coding sequence
  source 1..1617: mol_type = other DNA
atggcgcgagaactatcagaatccaccgctctcgatgcccagagtacagaagatcagatggaactacttgtcattaaggtggaagaggaagaggctggattcccttcctcccccgatcttgggagcgagggcagccgggaacggttccggggttttcgatatccggaggctgccggacccagagaggccctgagccgcctccgcgaactctgtcggcagtggttacagccagaaatgcacagtaaggagcagattttagagctcttagtgcttgagcaatttctgaccatactgcctggcaacctgcaatcttgggtccgggagcagcatcccgagtcgggcgaggaggttgtggtgctgctcgagtacctggaacggcaacttgacgagcctgctccacaggtttcgggcgtggaccagggtcaggagctgctgtgttgcaagatggccttactgaccccagccccaggatcccagagttcacagttccaactgatgaaggctcttttaaagcacgagtctgttggatctcaaccgctgcaggacagggtgttgcaggtcccagttcttgcgcatgggggatgttgtcgcgaggataaggtggttgcctcacgcctgaccccggagtctcagggcctgttgaaagtagaagacgtcgccttaaccttgaccccagagtggactcaacaggactccagccagggaaatctgtgcagagatgaaaaacaagaaaaccacggtagcctcgtgtccttgggtgatgagaaacagacaaagagcagggacctgcccccagcagaggaactccccgaaaaagaacacggtaagataagctgtcacttgagagaggacatcgctcagatacccacctgcgctgaagcgggtgagcaggaagggagactccagaggaaacagaaaaatgctactgggggacgcagacacatctgccatgaatgcggaaagagcttcgcccagagcagtgggttgagcaagcatcggcgtatccatactggtgaaaaaccatatgaatgtgaggagtgcggtaaggcattcatagggagcagtgcccttgtgatccaccagcgggttcacaccggcgagaagccttacgagtgtgaggagtgtggcaaggctttttctcactcctccgatttgatcaagcatcagagaacgcacactggggagaagccatatgaatgtgacgattgcggtaagaccttttctcagtcctgttccctcttagagcaccacaggatacacacaggagaaaaaccttatcagtgttccatgtgcggtaaagcctttaggcgttcatcacacctccttcgccaccagcgaatccacactggagataagaatgtgcaggaacctgagcagggtgaagcctggaagtcgaggatggagtctcaactcgagaacgtggagacccccatgtcctacaaatgtaacgagtgcgagcggtcctttactcagaataccgggctcatcgaacaccagaaaattcacactggcgaaaagccatatcaatgtaatgcatgcgggaaaggctttactaggatttcctatctcgtgcagcatcagcggagccacgtaggaaaaaacatcttgagtcagtag

SEQ ID NO: 247869 - DNA, 537 bp, synthetic construct
  misc_feature 1..537: note = Description of Artificial Sequence: Synthetic coding sequence
  source 1..537: mol_type = other DNA
atggcgcgagaactcagcgaaagcaccgccctggacgctcagtccacggaggatcagatggagttgctggtaatcaaagtagaggaggaagaagcagggttcccgagctcccccgatttgggttccgaagggtctcgagaacgctttcgcggattccggtaccctgaggccgctggacccagagaggcgctgagcaggcttagagaactgtgtcggcagtggctgcagcccgagatgcacagcaaagaacagattctggagttgctggtcctcgagcagtttttgaccattctgcccggaaatctccaatcttgggtgagggaacagcatcccgagtcaggagaggaggtggtggtactactggagtacctcgaacgtcagcttgatgagcccgctccacaggttgaacggaccggcctggtgtccgaacgatgcggcttattcccgcctgaaatcccagaccagagcgagggccactcctttaatattcaggaattcttcatctcattcctctaccgggagcctccttggcagtag

SEQ ID NO: 247870 - DNA, 993 bp, synthetic construct
  misc_feature 1..993: note = Description of Artificial Sequence: Synthetic coding sequence
  source 1..993: mol_type = other DNA
cggcagagattcagagggtttcgttatcccgaagccgctgggcctcgggaagccctttctcgtcttcgcgaactttgtggtcagtggctgcagcccgaaatgcactccaaggagcagattctcgaactgctagtgctcgagcagtttttgacgattctgccaggcaatctacagtcctgggtgagggaacagcatccagaatccggcgaggaagtggtggtcttgttagaatatctagaaagacaactcgacgagccggctcctcaagtcgagcgcacagggctggtaagcgaacgttgtgctagaggtatcccgctaaggtccaggtcttcttccagcctgttcgttctggcttttctgccgtggcaggggataactcacagctgtagaccatttgtggtatctggtggtgagatccagacaaagtccagagatcttccaccagtgaaaaagctgcctgagaaagaacatggcaagatttgccatctccgcgaagacatcgcccagattcctactcacgcagaagccggagaacaggagggtaggctgcagcgaaaacaaaaaaatgctatcgggtcccgacgacactactgccatgaatgtgggaaatcatttgctcagagctccggtcttaccaagcaccgtagaatacacacaggcgagaagccctatgaatgcgaagactgcggaaagacctttatcggctcctctgcactcgtgatccatcagcgtgtgcatacaggggaaaaaccgtacgaatgtgaagagtgcggcaaggtcttctcacatagttccaatctcatcaaacaccaaagaacgcacaccggcgaaaaaccctatgagtgcgacgactgcggcaaaaccttctcccagagctgttccctcctcgaacaccacaagattcatacaggggagaagccgtaccagtgcaatatgtgcggtaaggcttttcgtcgcaactcccacctgctgcggcatcaacgcatacattag

SEQ ID NO: 247871 - DNA, 1638 bp, synthetic construct
  misc_feature 1..1638: note = Description of Artificial Sequence: Synthetic coding sequence
  source 1..1638: mol_type = other DNA
atggccagagagccgagaaagaatgctgctctggatgctcagagcgccgaggaccagacaggtctacttaccgtcaaggtggagaaggaagaagcatccgctctgaccgctgaggttcgggcaccctgttctcctgctcgtgggccagagcgcagtcgccagagatttcgcggtttccgatatccagaggctgccggacctcgtgaggcactgtctcgcttgcgggagttgtgcggccagtggttgcaacccgagatgcacagtaaagagcaaatcctggagctgctagttttggagcagtttttgacgatccttcctgggaacctccagtcttgggttagggaacagcaccccgagagcggcgaggaggtcgtagtcttactggaatatttggagagacagctggatgagcctgctccgcaggtgcctgtcggggaccagggccaagagttgctgtgctgcaagatggccttgttgacccaaacccaaggatcgcagagctcccagtgccaacccatgaaggcactgttcaagcatgaatccttgggctctcagccattacacgatcgtgtcttgcaggttcctggtctcgcccagggtggctgttgccgcgaggacgcgatggtcgccagtcgcctgactccaggtagtcagggtttactcaaaatggaggatgtggccctgacacttacccctggatggacacagctggattcgagccaggtgaacctgtaccgagacgagaaacaggagaatcattcatctttggtgtccctgggcggagagatccagactaaatcaagggacctcccccctgtcaagaagcttcccgagaaggagcacgggaaaatatgccatctgcgagaggatatcgcccaaattcccacacatgcagaggcaggtgagcaggagggaagattacagcggaagcagaagaacgcaatcggcagccgacgccactattgtcatgaatgcggtaagtcgttcgcccaatcctccggactgacaaagcaccgacgtattcatacaggggagaagccatacgaatgtgaggactgcggcaagactttcatcgggtccagcgcgctggttatccatcagcgggtccacactggtgagaaaccttatgagtgcgaggagtgtggtaaagtgtttagccatagtagcaacctgattaagcatcagcggacccacaccggggaaaagccatacgaatgcgatgactgtggcaaaactttcagtcaatcctgttctctgttggaacatcataagatccacacaggtgagaagccttaccagtgcaacatgtgcggaaaagcgtttagacggaactcacacctgctgcgccaccaaagaattcacggcgataagaacgtgcagaacccagagcacggagaatcatgggagagccagggtcgcaccgagtctcagtgggaaaacacagaagcaccagtttcctacaaatgcaacgagtgtgagcggtcatttactagaaacaggtctctcatcgaacatcaaaaaattcatacaggtgagaaaccttatcagtgtgatacatgtgggaagggctttacaaggacatcctacctggtgcagcaccagcggagtcacgtggggaagaagacgctcagtcagtag

SEQ ID NO: 247872 - DNA, 1173 bp, synthetic construct
  misc_feature 1..1173: note = Description of Artificial Sequence: Synthetic coding sequence
  source 1..1173: mol_type = other DNA
atggccctgttgactcagacccagggctcgcaatcctcccagtgtcagccaatgaaggcccttttcaaacacgagtcgctgggaagccaaccgctgcacgacagagtgctgcaggtgccaggcctggcgcagggcggttgctgtcgagaagatgcaatggtcgcatctcggctgaccccaggctcccaaggcttacttaaaatggaggatgtggccctgactttgacccctggttggactcagttagacagtagtcaagtcaacctttaccgcgatgagaagcaggaaaaccattccagcctggtctctcttgggggtgagattcaaacaaagagccgagacttgccccctgtgaaaaagctgcccgaaaaagagcacggaaagatctgtcacttgcgcgaggacatcgctcagatacctacccatgccgaggccggtgagcaggagggcagactgcagcggaagcagaaaaatgccattgggtccaggaggcattactgccacgaatgcggcaaatctttcgcccagagttctggcctcaccaagcaccgcagaattcacacaggtgagaagccttacgagtgtgaagactgcggcaagaccttcatcggatcatccgctctagtaatccatcagcgcgtgcacacaggggagaagccttacgaatgcgaggaatgtggcaaagtgtttagtcattccagtaatctcattaagcaccagcgcacccataccggcgagaaaccttatgaatgtgatgattgtggaaaaacgtttagtcagtcttgcagcctgctcgagcatcacaagatccacacaggcgaaaagccttaccagtgtaatatgtgtgggaaagcttttcgaagaaacagtcacttacttaggcaccagcgcatccacggggataagaatgtgcagaacccagaacacggtgagtcgtgggagagccagggcagaacagaaagtcaatgggagaatacggaggcccctgtcagctacaaatgtaacgagtgtgaacgtagctttacccgtaaccggtccctgattgaacatcagaagatccataccggtgagaaaccttatcaatgcgacacgtgcggtaagggctttacccgtacttcttatctcgttcaacatcagcgatcacacgtgggcaaaaagactctgtcgcagtag

SEQ ID NO: 247873 - DNA, 501 bp, synthetic construct
  misc_feature 1..501: note = Description of Artificial Sequence: Synthetic coding sequence
  source 1..501: mol_type = other DNA
cccactcacgcagaagccggagaacaggaaggacgactgcaaagaaaacaaaagaatgcaattggtagcaggagacactattgtcatgagtgcgggaagtcatttgcacagagttcagggctcacaaaacaccgcaggatccacactggtgaaaaaccatacgagtgtgaggattgtgggaaaaccttcatagggtcttcagctctagtaatccatcagagagtacatacaggagaaaaaccctatgaatgtgaagaatgtgggaaagtgttctcacacagcagcaaccttattaagcaccagcgtactcacaccggtgaaaagccctatgaatgcgatgattgcgggaaaacattctctcagagttgcagcctgctcgaacaccacaaaattcacaccggtgagaaaccttatcagtgcaacatgtgtgggaaagcttttagaagaaatagccatttactgagacatcagagaattcatgtggtgaccgaaatagtttag

SEQ ID NO: 247874 - DNA, 438 bp, synthetic construct
  misc_feature 1..438: note = Description of Artificial Sequence: Synthetic coding sequence
  source 1..438: mol_type = other DNA
atggagtttcctgatcttgggaagcactgtagtgaaaaaacttgcaagcaactggactttctgccagtgaaatgcgatgcctgcaaacaggacttctgcaaagatcactttccttacgccgctcacaagtgccctttcgctttccagaaggatgttcacgtgcctgtttgcccgctgtgcaatacacccatacctgtgaagaagggccagatccctgacgtggtcgttggtgaccatatcgacagggactgcgattcgcaccccggtaaaaagaaggaaaaaatttttacatatagatgcagtaaggagggatgcaaaaaaaaagagatgctccagatggtgtgcgcccagtgtcatggaaacttctgtatacaacatcgccaccctcttgaccatagctgtcgccatgggtcacgtccaacaattaaagccggatag

SEQ ID NO: 247875 - DNA, 543 bp, synthetic construct
  misc_feature 1..543: note = Description of Artificial Sequence: Synthetic coding sequence
  source 1..543: mol_type = other DNA
atggaattccccgatttgggcaagcactgttccgaaaagacgtgtaagcagctcgactttctgccggtgaaatgtgatgcttgtaagcaggacttctgcaaagaccacttcccttatgctgcccataagtgtccgttcgcatttcaaaaagacgtccatgttcctgtttgtccactttgcaatactcctattccggtaaagaaggggcagatccccgatgtggtggtgggtgatcacatagaccgagactgtgatagccacccaggaaagaaaaaggagaaaatcttcacttaccgctgttccaaagagggctgtaaaaaaaaagaaatgcttcagatggtctgcgctcagtgtcacggtaatttttgtattcagcaccggcaccccctcgatcactcttgtcgccacggatccagacctaccattaaagccggatgcagcccaatgactgtgagcgagtctagacctctcggagactttctgacgctcgccccaggtggcctagctcagcggttgggttactggtttaccaggctcatgtag

SEQ ID NO: 247876 - DNA, 774 bp, synthetic construct
  misc_feature 1..774: note = Description of Artificial Sequence: Synthetic coding sequence
  source 1..774: mol_type = other DNA
atggaattccctgatctcggggctcactgctcagaaccatcttgccagagactcgactttctcccattgaagtgtgacgcctgctcagggatattctgtgctgaccatgtggcctacgcccagcaccattgtggatctgcataccagaaggacatccaagtccccgtttgtcccctttgcaatgtgcccgtgccagtcgccaggggcgaacctccagaccgagcagtgggcgagcacatcgatcgcgattgcaggtccgatcctgcacaacaaaaaagaaaaattttcaccaataagtgcgaacgtgctggttgcagacagcgagagatgatgaagcttacttgcgaacggtgctccaggaacttttgcatcaagcaccggcatccattagatcacgattgtagcggggaagggcatccaacaagtagagccggacttgccgcaatcagcagggctcaagccgtggccagcacatctaccgtgccctccccatctcagaccatgccgtcatgcacctctccctcacgcgctactacaagatcaccctcttggacggctcccccagtaatcgccctgcagaatggcctcagcgaagacgaagccctgcagcgcgcactcgaaatgtccctggctgaaaccaaaccgcaagttccttcctgtcaagaagaggaggacttagccctggcccaggccctttcagcttccgaggccgagtatcagcggcaacaggcgcagagccggagcagcaaaccgagcaactgttcactctgctag

SEQ ID NO: 247877 - DNA, 531 bp, synthetic construct
  misc_feature 1..531: note = Description of Artificial Sequence: Synthetic coding sequence
  source 1..531: mol_type = other DNA
atggagtttcctgatctcggtgctcattgctctgagcctagctgtcaacgactcgattttctgcctctcaaatgtgacgcctgctccggaatcttctgtgcagaccacgtggcgtatgcacagcaccactgcggcagcgcctatcaaaaggacatccaagtgccagtgtgcccattgtgcaatgtgccggtgcccgttgcgaggggggagccgccagacagggctgtgggtgaacatattgatagggactgccgcagcgaccccgcacagcagaagaggaaaatcttcaccaataagtgtgagagggctggctgtcgacaacgagagatgatgaaactcacctgcgagcgttgctcgaggaacttttgcataaagcaccgccacccattggaccacgactgctcaggggagggacatccaaccagtagagccggactggctgctatttcaagggcccaggcggtggcttccacgagtaccgtcccgtcccctagccaaacaatgccatcatgtacaagcccttcccggtag

SEQ ID NO: 247878 - DNA, 774 bp, synthetic construct
  misc_feature 1..774: note = Description of Artificial Sequence: Synthetic coding sequence
  source 1..774: mol_type = other DNA
atggagtttcccgacctgggggcacattgcagtgaaccatcttgtcaaagactggacttcttgcctttaaagtgcgatgcttgcagcggaatattttgtgcagatcacgttgcctacgcgcaacaccattgcggcagtgcatatcaaaaagacattcaagtgccagtgtgcccgctttgcaatgttcctgtcccagtggcacgcggagagcctcccgatcgggcagttggagagcacatcgatcgcgactgtcggagcgatccagcacagcagaagcgcaagatcttcactaacaaatgcgagcgtgccggttgccggcaacgagaaatgatgaaactcacatgtgagcggtgctctcgcaacttctgcattaaacaccggcaccccctagaccacgattgttccggagagggtcatccaacctctagagctggcctggcagcaatatcccgcgcacaagccgtcgcatctacaagcactgtcccatctccctctcagaccatgccctcttgtacgtccccgtcaagggccacaacaagaagcccatcatggaccgcaccccctgtcattgcactccagaatggtctgagcgaggatgaggctttgcagcgggcactcgagatgagcctggctgaaacgaaaccgcaagttccaagttgtcaggaagaggaggacctagctctcgctcaagcactgtccgccagcgaagcagagtaccaaaggcaacaggcccagtcacggagcagtaagcctagcaattgctctctgtgttag

SEQ ID NO: 247879 - DNA, 531 bp, synthetic construct
  misc_feature 1..531: note = Description of Artificial Sequence: Synthetic coding sequence
  source 1..531: mol_type = other DNA
atggagttccccgatctaggggctcattgctccgagcctagctgccaacggctggatttcctgccgttgaaatgtgacgcttgttccggaattttctgtgcggaccacgtggcgtatgctcagcatcattgtggaagtgcgtatcagaaagacatacaggtgcccgtctgtcccctatgcaatgtccctgtgccagtcgctaggggggagcccccagaccgtgccgtgggagagcatatcgaccgcgactgtcggtcagatcctgcccagcagaaaagaaagatcttcaccaataaatgtgagcgcgctgggtgtagacagagagaaatgatgaaactgacatgtgagagatgtagccgaaatttttgtattaaacatcgccaccctcttgaccatgactgcagtggtgaaggtcaccccacaagccgggctggccttgcagccatttcgcgggcacaggcggtagcctccacgtctacggtccctagtccatcccagacaatgcccagctgcacatcgccctcccgatag

SEQ ID NO: 247880 - DNA, 153 bp, synthetic construct
  misc_feature 1..153: note = Description of Artificial Sequence: Synthetic coding sequence
  source 1..153: mol_type = other DNA
atggaatttcctgatctgggagcccactgctccgaaccctcgtgtcagcgcttagatttcctgcccctcaagtgtgatgcctgttctggaattttctgtgccgatcatgtggcatacgcacaacatcactgcgggtccgcttaccagaagtag

SEQ ID NO: 247881 - DNA, 678 bp, synthetic construct
  misc_feature 1..678: note = Description of Artificial Sequence: Synthetic coding sequence
  source 1..678: mol_type = other DNA
atggagttcccagacctcggtgcccattgcagcgaaccttcgtgccaacggctggattttctccccctaaaatgcgacgcatgcagcgggattttttgcgcagaccacgttgcctacgcccagcatcactgcggaagcgcataccagaaagacatccaggttcctgtgtgccctctttgcaacgtaccggtccctgtggcacgcggagaaccacccgatcgagccgtgggggagcacattgacagggattgcaggtctgacccggcacagcagaaaaggaagatcttcacaaacaaatgtgagagggccggttgcaggcaacgggagatgatgaagctgacctgcgagagatgctccaggaatttctgcatcaagcacagacaccctctcgatcacgactgctccggtgaaggacacccaaccagcagagcgggtttggccgcaataagtcgtgcccaggccgtggcctcaacatccactgtgccctcaccatcgcaaaccatgcctagttgcacttctccatcccgcgctacaactaggagcccttcctggaccgcccctccggtgatcgcactgcagaatggtctggtttcatgggcagaggtaggctggacggagaccaacactcagcgcgttaagtccaaggatgcaggcctattaagtcccttcgtcgagtag

SEQ ID NO: 247882 - DNA, 684 bp, synthetic construct
  misc_feature 1..684: note = Description of Artificial Sequence: Synthetic coding sequence
  source 1..684: mol_type = other DNA
atgggagacgcagggagcgaaaggtctaaggcccctagcctgcccccaaggtgcccatgcggcttttggggctcatccaagacaatgaatctctgttccaaatgcttcgcagatttccagaagaagcagcctgacgacgattcagccccttccacctcaaactcccaaagcgacctcttcagcgaggagacaaccagcgataataacaacacttccattacaaccccaaccttatcaccctcacagcagcccctgccaactgagctgaatgttacatcaccatcaaaggaagagtgcggcccttgcaccgatacagcacacgtgtctctcatcacacctaccaagagatcttgcggtaccgacagtcagagtgagaatgaggcctctcccgtgaaacgcccacggctcttggaaaacaccgaaagatcagaagaaacgtcccgcagtaaacagaagtccaggaggagatgtttccagtgtcagacaaagctggaactggtgcaacaggaactggggtcttgtaggtgtgggtacgtgttttgcatgctgcatcgcctgcccgaacagcatgattgcacatttgatcacatgggaaggggcagggaagaagcgatcatgaaaatggtcaagcttgacaggaaagtggggagatcttgtcagagaatcggcgaaggctgcagctag

SEQ ID NO: 247883 - DNA, 642 bp, synthetic construct
  misc_feature 1..642: note = Description of Artificial Sequence: Synthetic coding sequence
  source 1..642: mol_type = other DNA
atggcacaggagactaaccagacaccagggcctatgttatgcagtaccgggtgcggcttctacggcaatccccgtaccaatggtatgtgcagcgtatgttacaaagagcacctgcagaggcagcagaactcaggtcggatgtcccctatggggactgccagtggatctaactcacctactagtgacagcgcctccgtgcagagggctgacacatctttgaacaattgcgaaggcgcagctggcagcacctccgagaagtctaggaatgtacccgttgccgcactacccgttacacagcaaatgacagagatgagcatttcacgtgaggacaagattacaacccccaagaccgaagtatccgagcccgtggttacacagccctcccctagtgtgagccagccgtccacttctcagtccgaggagaaagcccctgagctcccaaaaccaaaaaagaatcgttgtttcatgtgcaggaagaaggtcgggctgacgggcttcgattgtagatgtggaaatctcttctgcgggttgcatcggtactccgataaacacaactgcccctatgattacaaggcggaagcagcagccaaaatcagaaaggaaaatcctgtggtggtagcagaaaagatccaacgaatctag

SEQ ID NO: 247884 - DNA, 642 bp, synthetic construct
  misc_feature 1..642: note = Description of Artificial Sequence: Synthetic coding sequence
  source 1..642: mol_type = other DNA
atggcccaggagacaaaccagacccctggccctatgctctgttcaactggatgtggcttctatgggaatccccgtactaacggaatgtgcagcgtctgttataaggagcacttacaaaggcagcaaaactccggccgtatgagccccatggggacggcctccggctcgaactcgccaacgtccgacagtgccagcgtgcagagggcagacacctcattgaacaattgcgagggcgctgccggatcaaccagcgaaaaaagtagaaacgtacccgtggcggcactacctgttactcagcagatgaccgagatgtcgatctcccgcgaagacaagatcactacaccaaaaactgaggtgagtgagcccgtcgtgacccagccctcccctagcgtttctcaaccatcaacatctcagagcgaggaaaaagccccagagctccctaagcccaagaagaatcgttgtttcatgtgccggaagaaggtgggcctaactggctttgattgcagatgcgggaacctcttctgtggcctacaccgatactccgataagcacaattgcccatatgattataaggctgaagccgcagcaaaaatacgcaaggagaatccagtcgtcgtggcggaaaagatccagcgaatctag

SEQ ID NO: 247885 - DNA, 636 bp, synthetic construct
  misc_feature 1..636: note = Description of Artificial Sequence: Synthetic coding sequence
  source 1..636: mol_type = other DNA
atggctaagcctgagcaagctgcagacggaggcgttcggggacgcggagccaggccgcctgcccaagaggcccagaggcgacgaaggcacccagtggtcgtggcccgagatctggcccctggtgtgccaggaagcctgcatagtacccagaagaacatggcccaagaaactaatcagacccccggaccaatgctctgctctaccgggtgtgggttttatggaaacccccgaacgaatggaatgtgttccgtctgctataaggaacacctgcagagacagcagaactcaggccgaatgagccctatgggcaccgcaagtggatctaattcccctacttccgattctgcttctgtacaacgcgcagacactagcctgaacaactgtgaaggcgctgcaggatccaccagcgaaaaatcaagaaatgttcctgtcgcagcgcttcctgtcactcagcagatgacggaaatgtccattagcagggaggataaaatcacaacacccaaaacggaagtgagcgagcctgtcgtcacccaaccgagtccttcagtctctcaaccatctacttctcagtcagaagaaaaagccccagagctgcctaagcccaagaagaatcggtgtttcatgtgcaggaagtag

SEQ ID NO: 247886 - DNA, 642 bp, synthetic construct
  misc_feature 1..642: note = Description of Artificial Sequence: Synthetic coding sequence
  source 1..642: mol_type = other DNA
atggcccaggaaactaaccagacccccggacccatgctgtgtagtactgggtgtggcttctatgggaatcccaggacaaacgggatgtgtagcgtgtgctataaggagcacttgcagagacagcagaactcggggagaatgtcccccatgggaacggcttctggatctaattcacctacaagtgattccgccagcgttcagagggccgacacgtcccttaataactgcgaaggggctgcagggagcaccagtgaaaaatccaggaacgtaccggtggccgctctgccagtgacccaacagatgacagagatgagtatcagccgcgaagacaagattacgactcctaagaccgaggtttctgagccagtggtgactcagccttccccttccgtctctcagccaagcacctcccagtcagaagagaaggcacccgaactccccaaaccaaaaaagaatagatgttttatgtgccggaagaaggtcggtctgaccggatttgactgtcgatgcgggaatctgttctgtgggctgcacagatacagtgataaacacaattgtccatacgactacaaggctgaagctgccgcaaagattagaaaggagaatcctgtagtggtggcggagaaaatacaaaggatctag

SEQ ID NO: 247887 - DNA, 642 bp, synthetic construct
  misc_feature 1..642: note = Description of Artificial Sequence: Synthetic coding sequence
  source 1..642: mol_type = other DNA
atggcgcaggaaaccaatcagacacctgggcctatgctgtgcagcaccggctgtggcttttacggtaaccctaggactaacggcatgtgttccgtgtgctataaggaacatctgcagaggcagcaaaacagtgggcgaatgtcccccatgggtacagcatccggctccaacagtcctacatcagattccgccagcgtacagcgggctgatacctccctgaataattgtgaaggagcagctggcagcacgagtgaaaagagccgaaatgttcctgtggccgcacttcctgtcacccagcagatgacagagatgtcaatcagtagagaggataaaatcacaacaccgaaaaccgaggttagtgagcccgttgtgacccagccctccccctcggtcagccagccctcaacttctcagtctgaggaaaaggctccagaattaccaaaacccaaaaagaaccgctgtttcatgtgccgcaagaaggtgggactgaccggctttgattgtcggtgcggcaacctcttctgtggcctgcatcgctatagcgacaaacataactgcccctacgattacaaggctgaggccgctgcgaagatccgcaaggagaaccccgtggtggtcgccgagaaaatccagcgcatttag

SEQ ID NO: 247888 - DNA, 627 bp, synthetic construct
  misc_feature 1..627: note = Description of Artificial Sequence: Synthetic coding sequence
  source 1..627: mol_type = other DNA
atggcacaggaaaccaaccattcccaagtccctatgctttgcagtacggggtgcggtttctacggcaatcccagaaccaacggcatgtgcagcgtctgttataaagaacacctgcaaagacaaaatagttcaaatggcagaatcagtcctcccgcaaccagcgtttctagccttagtgagtccctgcccgtgcagtgcaccgatgggagtgttcctgaggcacagtctgccctggattccacgtctagttctatgcaaccgagccctgttagtaaccagagcctgctgtcagagtccgtagcatctagccagctcgacagtacgagcgtggataaggccgtcccagagacagaagacgtgcaggcctccgtcagcgacacggcccagcagccctcagaagagcagtcaaagtcactggagaaacctaaacagaagaagaaccgctgctttatgtgtcgtaaaaaggttggtctaaccgggttcgagtgcagatgcgggaatgtgtattgcggcgtgcaccgttacagcgacgtgcacaactgttcttacaattataaggccgacgccgcagaaaaaatccgcaaggaaaatcctgtggtggtgggcgaaaaaatccaaaagatttag

SEQ ID NO: 247889 - DNA, 627 bp, synthetic construct
  misc_feature 1..627: note = Description of Artificial Sequence: Synthetic coding sequence
  source 1..627: mol_type = other DNA
atggcgcaagagacaaaccatagccaggtgccaatgctgtgctctactggctgcggcttttatggtaatccaagaactaatggcatgtgctccgtttgctacaaggaacacctccagaggcagaatagctctaacggcagaatatcccctccggctaccagtgttagttcattgagtgagtcacttcccgttcagtgtacggatgggtccgtgcccgaggcccagtctgctttggattccactagcagctccatgcagccatcccccgtgagtaaccagagcctgctgagtgaatctgtggcttcgtctcagctcgattctaccagtgtggacaaggccgtgccagagaccgaagacgtgcaagctagcgtgtcagatacagcacaacagccaagcgaggaacagagcaaaagcctggagaagccgaaacagaagaagaatcgttgcttcatgtgtcggaaaaaagtgggattaaccggtttcgagtgtcggtgtgggaatgtatattgcggtgtgcatcgttattccgacgtgcacaactgcagctataactacaaggctgatgccgctgagaagatcaggaaagaaaatcccgtcgttgttggagaaaagattcaaaaaatttag

SEQ ID NO: 247890 - DNA, 591 bp, synthetic construct
  misc_feature 1..591: note = Description of Artificial Sequence: Synthetic coding sequence
  source 1..591: mol_type = other DNA
atggcccaggagaccaatcattctcaggtcccaatgctctgcagcactgggtgtgggttttacgggaacccacgaaccaacggcatgtgctctgtttgttataaggagcatttgcaacggcagaactcttccaatggcagaatctccccaccagtccaatgcacagatgggagcgtgcccgaagcacagtctgcactcgacagcaccagttcatccatgcaaccgagccctgtctcaaatcagagcctgctgtcagagtccgttgcgtcctcccagcttgacagtacctctgtcgataaagccgtccccgaaacagaggacgtccaagccagtgtctctgacacagcccaacaaccatctgaggagcaaagtaagagcttggagaaaccgaagcagaagaagaatagatgctttatgtgtaggaagaaggttggactcacagggtttgagtgccggtgcggcaacgtttactgtggcgttcaccgctactctgacgtacataattgctcgtataactataaggcagatgctgccgagaagatcagaaaggagaaccccgtcgtggttggtgagaagattcagaaaatctag

SEQ ID NO: 247891 - DNA, 627 bp, synthetic construct
  misc_feature 1..627: note = Description of Artificial Sequence: Synthetic coding sequence
  source 1..627: mol_type = other DNA
atggctcaagagactaaccattctcaggttcccatgctttgctcaacagggtgcggcttttacgggaaccccagaactaacgggatgtgttccgtctgttacaaggagcatcttcaaagacagaactcaagcaacggcaggatctccccacctgccaccagcgtttcttccctgagtgagagcctgcccgtccagtgcaccgacggatctgtgcccgaggcacagtctgcactcgatagtacaagttcctccatgcaaccgtcccctgtgagtaaccagtctttgctgtctgaaagcgttgctagcagccaactggattcaacgtcagtcgacaaggcagttccagagacagaggacgtccaagcctccgtgagcgacaccgcccagcaacctagcgaagagcagagcaagtccttggaaaagccaaaacagaagaaaaatcgttgcttcatgtgtcggaagaaggtggggttgaccggctttgagtgcaggtgtggaaacgtgtactgtggagttcaccgctatagcgacgtacacaattgctcctataattataaagccgacgctgccgagaagataaggaaagaaaatcctgtagtggtcggagagaagatacaaaagatctag

SEQ ID NO: 247892 - DNA, 627 bp, synthetic construct
  misc_feature 1..627: note = Description of Artificial Sequence: Synthetic coding sequence
  source 1..627: mol_type = other DNA
atggcgcaagaaaccaatcactctcaggtgccaatgctgtgttcgaccggctgcgggttctacggtaaccctcggaccaacggcatgtgctccgtgtgttacaaggaacatctgcagcggcagaattcttctaatggcaggatcagtcccccagctacatccgtcagttctctcagtgaaagcctcccagtacagtgtacggacgggtccgtccccgaagcgcagtccgcactcgatagcactagctctagcatgcagccttctccagtgagcaaccagtcattgctgtctgaatctgttgcctcttcacaactggattcaacttcagtggacaaggctgtccctgaaactgaagacgtccaagccagcgtttccgatactgcgcagcagccttcagaagaacagtcaaagtctctcgaaaagcccaagcagaagaagaacagatgtttcatgtgtagaaagaaagtggggttgacaggattcgaatgtcgctgtggtaacgtgtactgcggtgtgcacaggtatagcgacgtccacaactgctcctacaattataaagcagatgcagccgagaagatccgcaaggagaatcccgtggtggtgggggagaagatccagaaaatatag

SEQ ID NO: 247893 - DNA, 627 bp, synthetic construct
  misc_feature 1..627: note = Description of Artificial Sequence: Synthetic coding sequence
  source 1..627: mol_type = other DNA
atggcccaagagacaaatcattcccaggttccaatgctgtgttcaacaggctgtggcttctacggaaaccctagaaccaacggtatgtgctctgtttgttataaggagcatctccaacgccagaattcctcgaacgggagaatctcacccccagctacatcagtcagttccctgtccgaatcccttcctgtccagtgtaccgacggctcagtcccggaggctcagtctgcccttgattctacatccagcagcatgcagccttcccctgtatctaatcagagtctgttgtccgagagtgtggcgagctctcagctggattctacctccgtagataaagcagtgccagagacagaggatgtgcaggcttccgtgagtgacaccgcacagcaaccaagcgaagagcagtctaagtccctcgagaagcccaagcagaagaaaaatagatgcttcatgtgccgcaaaaaagtaggtctgactggcttcgagtgtcgatgcggcaatgtgtattgcggggtacacagatacagtgatgtgcacaattgttcatataattacaaagccgacgcggcagagaagatccggaaagaaaatcccgtggtggtgggcgagaagatacagaaaatttag

SEQ ID NO: 247894 - DNA, 2085 bp, synthetic construct
  misc_feature 1..2085: note = Description of Artificial Sequence: Synthetic coding sequence
  source 1..2085: mol_type = other DNA
atggagaataagagtttggaaagctcccagactgacctgaaactcgttgcacatccgagagccaagagtaaagtctggaaatatttcgggttcgatactaacgcggaagggtgtattctgcagtggaaaaaaatctactgccggatttgtatggctcagatcgcatactccggaaataccagcaatttgtcctatcatctcgagaaaaaccatcctgaggaattctgcgagtttgtgaagagcaacaccgaacagatgcgagaagcatttgcgactgcattctccaagttaaagcccgaaagctctcaacagccgggtcaggacgctttggctgtgaaggcgggacacggatacgactcaaaaaaacagcaggagttgacggccgcagtcttgggcttgatatgcgaaggactgtatcctgcgtcaatcgttgatgagccaacgtttaaggtgttactcaaaactgccgacccaagatacgaactgccgagccgtaagtacatctccaccaaggcaatccctgagaaatatggcgctgtccgcgaggtcattcttaaagagctcgcggaggccacatggtgcgggatttcaacagatatgtggcggagcgagaatcaaaatcgcgcatacgtgacactggcggctcattttctgggcctcggcgcacctaattgcctgagcatgggcagcaggtgtttgaaaactttcgaagtgcctgaggagaatactgcagagacaattacccgggtgctgtatgaggtgtttatcgaatggggtatctcagcgaaagtttttggcgcaaccacaaattacggcaaggatatcgtgaaggcctgtagcctacttgatgtcgccgtgcatatgccatgtttggggcatacttttaatgccggaatccagcaggccttccagctgcctaagcttggcgcattgctgtctagatgtcgaaaactggtggaatattttcagcagagcgcagtcgccatgtatatgctgtacgagaaacagaaacagcaaaacgtggcccactgcatgttagtgtccaatcgggtctcgtggtggggttccactcttgcgatgcttcagcggctgaaagaacagcagtttgttatagctggtgtacttgtggaagactccaacaaccaccatctcatgttggaggcttccgaatgggccaccatagaagggctggtcgagcttctgcagccattcaagcaagttgcagagatgctctcagcatctaggtatccgaccatcagcatggtgaagccgctgctacacatgctgctgaatactactctcaatatcaaagagaccgacagcaaagagctctctatggccaaggaagtgatcgcaaaggaactcagtaagacctaccaggaaacgccagaaatagatatgttcctgaacgtggccacatttctggaccctcgatacaaaaggctgcccttcctgtctgccttcgaaaggcagcaggtggagaatcgagtggtggaggaggcgaaaggcttacttgacaaggtgaaagacgggggttacagacctgcggaggataaaatttttcctgtgcctgaagagccacccgtcaaaaagttgatgcgcacgtcgacgcctcctccggcatctgtgatcaacaatatgctggctgaaatattctgtcaaaccggtggcgttgaggatcaggaagagtggcacgcacaggtggtggaggagctcagcaatttcaaaagccagaaggtgctgggccttaatgaggatcctctgaaatggtggtccgaccgactcgctcttttcccactgctgcccaaagtgctgcagaagtactggtgcgtcacagccacgagggtggccccagagagactgtttgggagcgcggcaaatgttgtcagcgcaaaaaggaaccgactggcccctgcgcacgtggatgagcaggtctttttgtacgagaacgcgaggtccggcgctgaggcagagcccgaggaccaggacgagggtgaatggggattagaccaggaacaggtcttttctctgggcgatggagtctccggaggcttctttggtatcagggacagctcctttctttag

SEQ ID NO: 247895 - DNA, 2085 bp, synthetic construct
  misc_feature 1..2085: note = Description of Artificial Sequence: Synthetic coding sequence
  source 1..2085: mol_type = other DNA
atggagaacaagtcgctggagtcatcacagacagacctgaagctggtagctcaccctcgcgcaaaatcaaaggtgtggaagtattttggctttgacacaaatgcagagggctgtatcttgcagtggaaaaagatttactgccgcatctgtatggcccagatcgcttacagcggcaatacatccaatctaagttatcacctcgaaaagaatcaccccgaagagttctgtgaattcgtcaagtccaacaccgagcagatgagggaagccttcgccacggctttctcgaagctgaaaccggagtctagccaacagcctggccaggacgccctggccgtcaaggccggacacggctacgactccaaaaagcagcaggaactgactgccgctgtgctgggactgatttgcgagggactttaccccgcatccatagtggacgagcctacattcaaggtgcttctgaaaaccgcagatccacgctatgaactaccaagtcgtaagtacattagtactaaagcaattcctgagaaatacggggctgttcgcgaggtgatactcaaggaactggctgaagctacttggtgcggaatttcaacggatatgtggagaagcgagaaccagaacagggcctatgtaactctggccgctcactttttaggactcggcgctcccaactgtctgagtatgggaagtcggtgcttaaagaccttcgaagtgccggaggaaaacacagcagaaacaattactagagtgctgtacgaggttttcatagaatggggaatttcagccaaggtcttcggtgccacaaccaattacgggaaagatatcgtgaaggcgtgctcactgctcgacgtggccgtccacatgccttgtttgggccatacattcaacgcagggatccagcaggctttccagcttcccaagctgggcgcacttctgtcaagatgtcggaaactggtcgagtattttcagcagtcggccgttgctatgtatatgctgtacgagaagcaaaagcagcaaaacgtggcgcactgcatgctggtgagcaatagagtgtcttggtggggttcgacactagcaatgctccagcgtctcaaagaacagcagtttgtgatcgcgggagtcctggtggaagactccaacaatcaccacctgatgctggaggccagtgagtgggcgactattgaaggattggtggagttattacagcccttcaagcaagtcgccgagatgttgtcggcctctcgctaccctacaatatctatggtaaagcctctcctccatatgctccttaacacgactctgaacatcaaggaaaccgatagtaaagaactgagtatggccaaggaggttatagccaaggaactatctaagacttaccaggagaccccagagattgatatgtttctcaacgtcgctacgtttttagatccaaggtataaacggctgccattcttgtcggcttttgagaggcaacaggtagaaaatcgcgtggtcgaggaagctaagggtcttctagataaagtgaaggacggcggatataggcccgctgaggataaaatcttccctgttccagaggagccacctgtgaagaaacttatgaggacttccacacctccacctgcctcggtgatcaataacatgctggcagagattttttgtcagacggggggagtcgaagaccaggaggaatggcatgcccaagtggtcgaggaactcagcaattttaaatcccagaaagtgcttggtctgaatgaggatcccctgaaatggtggtcggacagactagcactgtttcccttgttgcccaaagtgctgcagaaatactggtgcgtgacagctacgcgggtcgcccctgagcgactttttgggagcgccgcaaatgttgtgtccgcaaaaaggaacagactagcccctgctcacgttgacgagcaggtctttttatatgagaatgctcggagtggagccgaggcagaacccgaggaccaagatgaaggggagtggggccttgatcaggagcaggttttttccttgggtgacggagtatctggaggattttttggaatccgagattcatccttcctgtag

SEQ ID NO: 247896 - DNA, 2085 bp, synthetic construct
  misc_feature 1..2085: note = Description of Artificial Sequence: Synthetic coding sequence
  source 1..2085: mol_type = other DNA
atggagaataaatccctcgagtcatcccagacagacttaaagctggttgctcacccgagagccaagagcaaggtgtggaagtacttcggctttgataccaacgcagaggggtgcatcttgcagtggaaaaaaatctattgtcgcatctgcatggcacagatcgcatactctggcaatacttccaatctgagctatcaccttgaaaaaaatcatccagaggaattttgtgagttcgtgaagtctaatactgagcagatgcgggaggcgttcgcaacagctttttctaaactgaagcctgaaagctcccagcagccagggcaggacgcactggcagtcaaggctggccatgggtacgattcaaagaaacagcaggaactgacagccgctgtgctggggcttatctgcgaaggcctttaccccgcttctatcgtggacgagccaaccttcaaagttttgctcaagaccgctgacccaaggtatgagttgccttcacgtaaatatattagcacgaaagcaattcccgagaagtacggcgcagtgagagaggtgatcttaaaggaacttgcagaggctacgtggtgtggaatttctactgacatgtggaggagcgagaaccagaatagggcctacgtaaccctagcagcacatttcctggggttgggggctcccaattgtttgagcatgggttctcgctgtttaaagacctttgaagtgcctgaagagaataccgcagaaaccatcaccagggttctctatgaggtgtttattgagtggggtataagtgcgaaggtgtttggggctacgacaaactacggtaaggacatcgtgaaggcttgctctctgctcgatgtggcagttcacatgccatgccttggccacacctttaacgcgggtatccagcaggcctttcagcttcctaaactcggagccttgctctcaagatgtagaaaactggtcgagtactttcagcagtccgctgtggcaatgtatatgctgtacgaaaaacagaaacagcagaacgttgcccactgtatgttagtgtcgaacagagttagttggtggggctccactcttgcaatgctgcagcgtctcaaggaacagcagtttgtgatcgctggggttctggtcgaggattcaaacaaccaccatctcatgctggaggcctccgaatgggcgaccatagaaggactggtagaactcctccagccttttaaacaagtcgcggagatgctgtctgcgagcagataccccaccatcagtatggtaaaaccactgctacacatgcttctcaacactacgcttaatataaaagagaccgacagcaaagagctttctatggctaaagaagtaatcgccaaagagttatctaaaacctatcaagagaccccagagatagacatgttcctaaacgtggcgacattcctcgacccaaggtacaaacgtttacccttcctcagcgctttcgaaagacagcaggttgaaaacagggtggttgaagaagccaagggactgttggataaggtgaaagatgggggatatcggccagctgaggacaaaatatttcccgtgccagaagagcctcctgttaagaaattaatgaggacttcgactccgcctcccgcttcagtaattaataacatgctagccgagattttttgccagaccggcggagtggaagaccaggaggagtggcacgcacaagtggtagaggagctgtcaaattttaaaagtcagaaggtgcttggcctcaacgaggatccattgaaatggtggtccgacaggctggctctgttccccctgcttcccaaggttttgcaaaagtactggtgcgtgacagcaaccagagttgccccagaaaggttattcgggtcagctgccaacgttgtctccgccaaacgcaatcgcctcgcccctgcccatgtggatgagcaggttttcctctacgaaaacgccagatcgggcgctgaagccgagcctgaagatcaggatgaaggagagtggggcctcgaccaggaacaggtgtttagtttgggcgacggcgtgagcgggggattctttggtatcagggacagcagttttctatag

SEQ ID NO: 247897 - DNA, 819 bp, synthetic construct
  misc_feature 1..819: note = Description of Artificial Sequence: Synthetic coding sequence
  source 1..819: mol_type = other DNA
atggagaacaagagccttgaatcaagccagacagacctgaaactggtggcccatcccagagccaagtccaaggtgtggaagtacttcggatttgacacgaatgcagagggctgcattctacaatggaaaaaaatatattgccgtatctgtatggctcagatagcgtattccggcaacacaagtaatctaagctaccaccttgagaagaatcaccccgaggagttttgtgagttcgtgaaatctaatactgagcagatgcgagaagccttcgccactgcattctcgaaactgaagccagagtcttctcaacagcccggtcaggacgctttagccgtgaaggctggacacgggtacgattcgaagaagcagcaggagcttactgccgctgtgctgggactgatctgtgagggactgtacccagcatctatcgtggacgagcccacttttaaggtattgttgaaaaccgcggacccaaggtacgagctgccctccaggaagtacatttccactaaggcaattcctgagaagtacggtgcagtgagggaggtgatcctcaaggaattggccgaagccacttggtgcggaatctcgacggacatgtggcggtccgaaaatcagaaccgcgcatatgtcactctggctgcccactttctcggactcggtgcgcctaactgcctgagcatgggctccaggtgcctgaaaacattcgaggtgcctgaggagaatactgccgaaactatcaccagagtattgtacgaggtgtttattgaatggggcatatcggctaaggtgtttggcgcaacgactaactatggttag

SEQ ID NO: 247898 - DNA, 3177 bp, synthetic construct
  misc_feature 1..3177: note = Description of Artificial Sequence: Synthetic coding sequence
  source 1..3177: mol_type = other DNA
atgaggcgaaagggccgttgtcatcgcggatcagctgctaggcaccccagctccccttgctcggtaaagcactcgccaacgagagaaactctgacttatgcccaagcacagcggatggtcgagatcgaaatcgagggtaggttgcatagaattagcatttttgacccactggaaataattttagaggatgatctgacagcacaagagatgagtgagtgtaacagtaacaaggagaatagcgaacgaccccctgtttgtctccgcaccaagcgtcataaaaacaaccgagtcaagaagaaaaacgaagctctgccatccgcgcacggcacccccgcttccgcttctgccctgccagaacctaaagtccgaatcgtcgagtattcccctccttcggctccaaggcggcctcccgtttactataagttcatcgaaaagagcgcagaggaacttgataacgaagtggagtatgacatggatgaagaggactacgcttggctcgaaattgtgaacgagaagagaaaaggtgactgcgtgcccgctgtgtcacagtctatgttcgaatttctgatggatcgattcgagaaggagtcccactgtgaaaaccagaaacagggcgagcagcaatcattaatcgacgaagatgctgtgtgttgtatctgcatggacggcgagtgtcaaaactccaacgttattcttttttgtgatatgtgtaatctcgccgttcaccaggagtgctacggggtgccctatatccccgaggggcagtggctgtgtaggcactgtctccagtctagagcacggcctgccgactgcgtcctttgtcctaataaaggaggggcattcaagaaaacggatgacgaccggtggggacacgttgtgtgtgccctgtggatccctgaggtgggatttgctaacaccgtgtttattgagccaattgatggggttaggaacatccctccagctaggtggaaactgacctgctacctctgtaaacagaaaggcgtgggggcatgtattcagtgtcataaagccaactgttacaccgcatttcacgtgacttgcgcacagaaagctggcttatatatgaaaatggaacctgtcaaagaactgactgggggaggcaccaccttttccgtcaggaaaaccgcttattgtgatgtccacacccctcctgggtgcactcgccgaccccttaatatttatggcgatgtggaaatgaaaaatggcgtgtgtcgcaaagaatcttcagtcaaaacagtccggagcacttcaaaggtgaggaagaaggctaagaaagccaagaaagctctggccgaaccttgcgcggtcctcccaacggtgtgtgcaccttacattcccccacaacggcttaatagaatagccaatcaagtagccatacaacgcaaaaagcaattcgttgaacgggctcatagctattggttgttgaagcgcctaagcaggaatggagcccctctcctcagaagactccagtcctcgcttcagtctcagcgatcctctcagcaaagggagaacgatgaagagatgaaggccgctaaggagaaacttaagtattggcagcggttgaggcatgatctggaaagagcacggctcctgatcgagctcctgcgtaaaagagaaaaactcaagcgggagcaagtgaaagttgaacaggtcgcaatggagcttcgattaacaccgctgacggtgttgctgcgctctgtgctggaccaacttcaagataaagaccctgcgagaattttcgcccagcccgtctccttaaaggaagtgccagattacttagatcatattaaacaccctatggacttcgcgaccatgcggaaacgtctcgaagctcaggggtataagaatctgcacgaattcgaggaggatttcgatctgatcatagacaactgcatgaagtacaatgctcgagacacagtgttttaccgagccgctgttagactccgggatcaagggggagtggtactgcggcaggccaggcgcgaagtggactccatcggcctcgaagaagcgtccggtatgcatcttccggaacgacccgctgcagccccacggcgacccttctcctgggaggatgtcgatagactgctcgatcccgcaaatcgagcccacctcggtcttgaagagcagcttcgcgaactgctggatatgctggatctaacgtgtgccatgaagagttccggtagtcggagcaaaagagctaagttactgaagaaggagattgctctgctgcgcaataagctgtcacaacagcacagtcagcctctccccaccggaccaggtttggaggggttcgaggaggacggcgcagcactgggcccagaggctggagaggaagttctgcctaggctggagactttgcttcagccacgcaaacgttcgcgttccacttgcggagactccgaggtagaagaagagagccctggcaaacgcctggacgccggactgacaaacgggtttggaggggctaggtccgagcaggaaccagggggaggactaggtcgaaaagctactccacgcaggcgttgtgcttctgagtccagtatttcatcgagcaacagccccctgtgtgacagctctttcaatgccccaaagtgtggccgtgggaagcctgctctggtgagacggcatactctcgaggaccgctcagagctaattagctgcatcgagaacgggaattacgcgaaagccgctagaatcgccgcagaagtcggacaaagctcaatgtggatctcgacagacgctgccgcttcggtccttgaaccactcaaggtggtctgggccaagtgcagcggatacccctcataccccgcactgattatcgatccgaaaatgccaagggtgccgggacatcataatggggtgaccattcctgccccaccgctggacgtgctgaagatcggtgagcacatgcagaccaaatctgatgagaaactgtttctggtgctcttctttgataacaagagaagttggcagtggctgcccaagtctaaaatggtcccactgggcattgatgagacaatcgataagttgaaaatgatggaaggccgtaacagttcaatcagaaaggccgtacggatcgcatttgaccgggctatgaatcatttgagtcgtgtccacggcgagccaacctctgacctgtccgacatcgattag

SEQ ID NO: 247899 - DNA, 2940 bp, synthetic construct
  misc_feature 1..2940: note = Description of Artificial Sequence: Synthetic coding sequence
  source 1..2940: mol_type = other DNA
atgtctgtgtgtaccctatctgtcccagtcagctcactgtctccaggacgcagatgcaacacctttagcgattctggaattctgggctgcgtccccataaattccaacaccgacgaagaggacgtagtggaggagaagatggtggcagaaggcgtcaataaagaagctaagcaacccgctaagaaaaagaggaagaagggtctgcgaatcaaaggcaagagaagacgtaagaaattgattctcgcaaaaaaattttccaaagatctgggctccggcaggcccgtggcggatgctcccgcattacttgccagtaatgatcccgagcaggacgaggagagcttgtttgaaagcaatattgagaagcagatttacctgccaagtactcgagcaaaaacctccattgtttggcactttttccacgtggatcctcagtatacctggagagctatttgcaatctttgtgagaaatccgtgtcccggggaaaacctgggtcacacctcggcacttccacattacaacgccacctgcaagcacggcactccccccactggaccagggccaacaagtttggcgtagcttccggcgaggaggattttaccttggatgtgagtttgtcacccagtagcggttctaatggttcgtttgagtatattccgaccgaccctctcgacgacaaccggatgggcaaaaagcacgataaatccgcaagtgacgctctccgcgctgaaaggggtagattcctaattaaatcaaatatagtgaagcacgccctcatacccggtaccagggcaaagacttccgctgtttggaattttttttatactgacccgcaacacatctcccgggcagtgtgtaatatttgtaagaggagcgtatcacggggtcgaccgggatcacacctgggcactagcacgctccagcggcatcttcaggcgacacatccaatccactgggcagtcgcaaacaaggattctggtgcggttgctaatggactagacgaggctgagaccgagcgctctgatctgctctcggataccctacatggcgaaaaaagcaccggcagccaagacctcaccgcagaagacctgagtgacagtgactctgacgaacctatgctggaggtagagaatcgctccgaatctccaatacctgtggctgaacagggtacccttatgcgggctcaagaacgcgagactacatgttgcgggaaccccgtgtcttctcatatatcccaagcaatcatccagatgatcgttgaggatatgcatccatataactatttcagcacccctgcatttcagcggtttatgcagatcgtagctcctgactacaggctgcctagcgaaacctattttttcactaaagcagtcccccaattgtacgactgcgtgagagaaaagatttttctaaccttggagaacgtccagtcccagaaaatacacctcactgttgacatttggacccacgatccatctacagattacttcatcgtaaccgtgcactgggtctcactggagaccgcctctttcctcaacaacggccgaattcctgactttaggaaatgggctgtgctctgcgttaccggccttgccaaggactgcctgatcacaaatatactgcaggaactgaacgatcagatcggcctctggttaagtcctaattttctgataccatcatttatcgtatccgataattcctccaacgttgtgcacgcaataaaggacggtggcttcacacacgtgccctgtttcctgcattgccttaacatggtgattcaggactttttctgcgagcacaagagtatcgaaaacatgttggtcgccgcaagaaaaacctgccaccatttctcgcacagcgtgaaggcgaggcaaattttgcaggaatttcagaatgaccaccaactgccttggaagaacttgaaacaggatgagacaggtcattggatctccaccttttacatgctgaagtggctgcttgaacactgttattctgtgcaccacagtctcggcagagcctcaggggtcgtgctgacgtctctgcagtggactttaatgacatatgtgtgcgatattctgaagccgttcgaggaagccactcagaaggtcagcgtcaaaactgccggtttaaatcaagtgctcccactgattcatcacttgcttttgtctttgcaaaaactcagagaggattttcaagtcagaggcattacccaggcactcaatctggttgactcgctctctctcaaactggaaacagataccctgctgtcagccatgctgaagagcaagccgtgtatcctggctacactgctggacccgtgtttcaaaaacagtctggaggacttcttccctcaaggtgcagacctggagacctataagcagttcttggccgaggaggtgtgcaattatatggagtccagtccagaaatctgccagattcccacctctgaagcctcttgcccgtctgttaccgtcggagccgattcctttacttcctccctgaaggaggggacaagctcatccgggtcagtggatagtagcgctgttgataacgtggcgctcggatccaaaagtttcatgttcccgagcgcagtggctgttgtggatgaatacttcaaagagaagtatagcgaattctctgggggtgatgatcctctaatctactggcagaggaaaatctccatctggccagcccttacccaagtggcgatccagtacctgtcttgtcctatgtgctcatggcagtctgagtgcatcttcactaaaaactctcacttccaccctaagcaaatcatgtcattggatttcgataacatagagcagttgatgtttctgaaaatgaatctaaagaatgttaattatgactacagtacactcgttttgagctgggatccagagcagaatgaagtggtgcaaagcagcgagaaggagatattaccatag

SEQ ID NO: 247900 - DNA, 4938 bp, synthetic construct
  misc_feature 1..4938: note = Description of Artificial Sequence: Synthetic coding sequence
  source 1..4938: mol_type = other DNA
atggaagaaagcaaaaccctcaagtctgagaaccatgagccaaagaaaaacgtgatatgtgaagagagcaaagcagtccaggtgattggaaaccagacactgaaagccagaaatgataaatccgttaaggagattgagaatagttcaccaaacagaaactcatccaagaagaataaacagaacgacatctgcatcgagaagaccgaggtgaagtcctgtaaggtgaacgctgccaacctcccgggaccgaaagacttgggactcgttcttagggaccaatcacactgcaaggctaagaaattccccaattcacccgtaaaagctgagaaggctactatttctcaagccaaaagcgagaaggcgacctctctccaggcgaaagcggaaaagtcccctaagagcccaaacagtgtcaaggccgaaaaagcttcctcataccaaatgaagagcgaaaaggtgccttcaagtcctgccgaggcagaaaaaggacctagtctgctgctaaaggacatgcgccaaaaaaccgaattgcaacagattgggaagaaaatcccctcaagtttcacttccgtggataaggtgaatattgaagccgtgggcggagagaaatgtgcgttgcagaactctcccaggtcccagaagcaacagacgtgcaccgacaacaccggtgactctgacgacagcgcttctggaattgaggacgtttcagacgacctgtccaagatgaaaaatgacgaaagcaacaaagagaattcatcagaaatggactacctggaaaacgccacggttattgacgagtccgcccttacccccgaacagaggctgggactcaaacaggccgaggaaaggcttgagagggatcacatttttcgactggagaaaaggtcccccgagtataccaactgtcgctacctgtgcaaactctgtctgatccatatcgagaatattcagggggctcacaagcatatcaaggagaagagacacaaaaaaaatattctggaaaaacaggaggaatccgagctgagaagtctgcctcccccttcgccggcacatctggccgctctttccgtggccgtaatagagctggctaaggaacacgggattaccgacgatgacctccgtgttagacaggagattgtggaggagatgagcaaggtcatcaccaccttcctacccgagtgctctctgcgcctatatgggagcagtttaacacgtttcgccctgaaatcatcagacgttaacattgacattaagttcccacctaaaatgaaccaccctgatctcttaatcaaagtcctcggtattcttaagaagaacgtcttgtatgtggacgttgaatctgacttccacgctaaagtcccggtggtggtctgtcgggaccgtaaatccggcctgctttgcagggtgagcgcaggcaacgacatggcctgcctcacaacagatctcctgacagctcttggcaaaatcgagccggtgttcattccactcgtacttgctttcaggtactgggcaaaactttgttacatcgactcccaaactgatggagggatcccatcatactgcttcgccctcatggtcatgttctttctgcaacagaggaaacctccgctgttgccttgcctgctagggtcttggattgagggtttcgacccaaaaaggatggatgacttccagctcaaggggatagttgaggagaagtttgtgaagtgggaatgcaatagcagtagtgccacggagaagaatagcattgctgaggagaataaggccaaggccgatcagccgaaggatgacaccaagaagacagaaacagacaatcagtctaacgcaatgaaagaaaaacatgggaagagccccttagccttagaaacacccaatcgcgtgagtctgggtcagctgtggctggagctgctcaagttttatacactcgactttgcattagaggaatacgttatctgcgttcgcatacaggatattctgacacgagaaaacaagaattggcctaagcggaggattgccatcgaggatccatttagtgtcaagcggaatgtggccagaagccttaactcccagctcgtgtacgagtacgtagtagaacgatttcgggctgcctacaggtattttgcctgtcctcagacaaagggtggcaacaaatctactgttgattttaagaaacgagagaagggcaaaatcagcaataaaaagccggtcaagtctaataatatggccacaaacgggtgtatcctgctcggggaaactactgaaaagataaatgctgagcgagagcaacctgttcagtgtgacgagatggattgtaccagccagcgatgcatcattgacaataataatctcctggtcaacgaactggactttgcggatcacgggcaggattctagctctttgtctacctctaagtcctcagaaatcgagcccaaactcgacaagaaacaggacgacctggccccttccgaaacctgccttaagaaggagctgtctcagtgcaattgcatcgatctgtcaaaatctcccgaccctgacaagagcacagggacagactgtagatccaaccttgagacagaatcatctcaccaatcagtgtgtaccgatacttcagctaccagttgcaattgcaaagcaacggaagacgcttcagacctgaacgacgatgacaacctgcctacccaggagctgtactatgtgttcgacaagttcatccttacgagtggaaagccaccgaccatagtttgcagtatttgcaagaaggacgggcattcaaagaacgactgccctgaagatttccgcaagatagatctcaagcctttgccccctatgacaaatagattccgcgagattctcgatctagtgtgcaagaggtgcttcgacgaactatccccgccatgtagcgaacaacataatagggagcagatacttattggcctcgaaaagttcatccaaaaggaatacgatgaaaaagctaggctgtgcttatttggcagctctaaaaacggcttcgggttcagggacagcgacctggacatctgtatgacactcgagggacatgaaaacgcggagaagctcaactgcaaagaaatcatcgaaaacctggcaaagattctgaagcgtcatcccggactcagaaatatcctgcctattaccaccgccaaggtgcccattgtgaaatttgaacatcgtagaagcgggcttgagggcgacatcagtttgtacaacacactagcccagcacaacacccgaatgctggcgacctacgccgctatcgaccctcgggtgcagtacctggggtacactatgaaggtctttgccaagagatgtgacataggcgacgcaagtagggggagcttaagcagctatgcctacattttgatggtcctctactttctacagcagagaaaaccacctgtcatccccgtgttacaggagatctttgacgggaaacagattcctcaacgcatggttgacggttggaacgcattcttcttcgataagaccgaggagcttaaaaagcggctgccgtctctgggtaaaaacaccgagagcctgggcgagttgtggttgggcctcttgaggttctacactgaagaattcgattttaaggaatacgtgataagtattcgtcagaaaaagctactgactacctttgagaaacagtggacttctaaatgcattgccatcgaggatccattcgaccttaatcacaatctgggggctggcgtgtccaggaaaatgacaaactttattatgaaggcctttataaatggccgtaaactgtttggtaccccattctaccccctcattggacgagaggcagaatacttctttgactctcgagtgctgactgatggcgagctggcacctaatgatcggtgttgtcgggtgtgcggaaagatagggcattacatgaaagactgccctaaaaggaaatccagtctacttttccggctcaaaaagaaagatagcgaagaggagaaggaagggaatgaggaggagaaggattcacgggatgtgctcgaccctcgggatctgcatgacacccgtgactttcgcgatccgcgagatttaaggtgctttatctgtggagatgccggtcacgtgagacgcgagtgccctgaggtcaagctggccagacagcgaaactcttccgtcgcagccgcacagctcgtaaggaatctcgttaatgcacaacaggtggcaggatctgcccagcagcagggtgaccagtcaatccgaactcgccagtcctccgagtgttcagaaagcccgtcatatagtccccagccacaacccttccctcaaaattccagccagtcagctgccatcacccagccctcatcccaacctggttcccagccaaaactgggtccccctcagcaaggcgcacagcctccacatcaggtgcagatgcccctgtataatttccctcaatcaccacctgcccagtatagtcccatgcacaacatgggacttctgcccatgcaccctctgcagatccctgcaccctcttggcctatacacggacccgtgattcacagcgccccagggtcagcacctagcaacatcggcctgaacgacccttctataatctttgcacaacccgcagcaaggcccgtcgcaattcctaacacctcccacgacggccactggcccaggaccgtggccccaaattccttagtcaattctggagctgtgggcaattccgaacctggcttcaggggcctcacccctcccataccttgggagcacgctcctagaccccactttcctctcgtgccggctagttggccttatggtctgcaccagaactttatgcatcagggaaatgccagatttcagcccaacaaacctttttacactcaggaccgctgtgcaactaggagatgccgtgagcggtgcccccaccctccacggggtaatgtgagtgaatag

SEQ ID NO: 247901 - DNA, 4935 bp, synthetic construct
  misc_feature 1..4935: note = Description of Artificial Sequence: Synthetic coding sequence
  source 1..4935: mol_type = other DNA
atggaggagtccaagaccttaaaaagtgagaatcacgagcctaagaagaatgtcatttgtgaggaatcgaaagcggtccaggtgatcggcaaccagacccttaaggcccgaaatgataagtccgtcaaggaaattgaaaactcttcacctaatcggaattcttcaaaaaagaataaacagaatgacatttgcattgagaagactgaggtgaagtcatgtaaggtgaatgctgctaacttgcccggacccaaggacttaggcctcgtccttcgggatcagtctcactgcaaggccaaaaaattcccgaatagcccagtgaaggccgagaaagcaacaatttcacaggctaagtccgagaaggccacctctctgcaggccaaggctgaaaaatcacccaaatcgccgaattccgtcaaggcagaaaaggccagcagttatcaaatgaagtcagagaaggtaccatcctctccggcagaagccgagaagggtccatctctgttgctcaaagatatgcgccagaaaaccgaattgcaacagatcggaaaaaagattccctctagtttcacaagcgtcgacaaagtgaacattgaagctgtgggaggagagaaatgcgcgcttcagaattcccctcgctcccagaaacagcagacctgtacagacaatacaggtgattccgacgattccgcttctggaatagaggacgtgagtgacgacctgtctaagatgaagaatgatgagtctaataaagagaattctagcgaaatggattaccttgagaatgcgacggtgattgatgaaagcgcactgacacctgagcagcgccttggtctgaagcaggcagaggagcggctcgagcgagaccacatcttcagattagagaagaggtcaccagagtacacgaattgtcgctacctgtgcaagctgtgtttgattcatattgagaatatacaaggagcccacaaacacattaaagaaaaacgccataaaaagaacatcttagagaaacaagaggaatcagagctgcgaagtcttccgcctccatctcctgcccacctggccgctttaagcgtggccgtcatcgagctcgctaaggaacacggaattaccgatgacgacctcagggtcaggcaagagattgtagaagaaatgagtaaggtgattactactttcctacccgagtgtagtctgagattatatggcagcagcctgacacgcttcgcactcaaaagctcagacgtgaacatcgacattaagttcccgcctaagatgaaccaccctgacttgttaattaaagttcttggcatcctgaaaaaaaacgttctgtacgtggacgttgagagcgatttccacgctaaggtgccagtcgttgtttgccgagatcgcaagagcggcctgctgtgcagagtctcagccggtaatgatatggcttgtctgacaaccgaccttttaactgctctggggaagattgagccggtctttatcccacttgtgcttgctttccgttattgggctaaactctgctatatcgactcacagaccgatggcggaatcccatcttattgctttgcacttatggtcatgtttttcctccagcaacggaaaccccctctcctcccctgcctgctagggagttggatcgagggttttgacccaaaaaggatggacgacttccagctgaaaggcatagtcgaggagaagttcgttaagtgggagtgcaattctagtagcgccaccgaaaagaattcaatcgctgaggagaataaagctaaggccgaccagcccaaggatgacaccaaaaaaacggaaactgacaaccaaagcaacgccatgaaggagaagcacggcaagagcccactcgctctcgagactcccaaccgcgtttcactgggacagttgtggctggagctcctgaaattttataccttagattttgcacttgaggagtacgtgatatgtgtgcggatacaggatatactgacacgtgaaaacaagaactggcctaagaggcggattgctatcgaggacccatttagtgttaagcgaaacgtggccaggtcgctaaactctcaattggtgtacgaatacgtggtagaaaggtttagagccgcatacaggtattttgcttgcccacaaaccaaaggcggaaataagtcaacagtggactttaagaaacgtgagaagggcaagatttctaacaaaaagccagtgaagagtaataatatggccaccaacgggtgcatcttgctcggagagactaccgagaaaatcaatgccgagcgagagcagcccgtccagtgcgatgaaatggattgcacctcacagcggtgtattatagacaacaacaatctgctggttaacgagctcgatttcgcagaccacgggcaagattccagtagtctgtctacctctaagtcctccgaaatagagcccaaacttgataagaagcaggacgacctggcgccaagtgaaacctgtctcaagaaggagctatcgcagtgtaactgcatcgacctctccaagtctccagaccccgataagtcaaccggcaccgattgccgttccaatctcgagactgagtcaagtcaccagtccgtgtgtacagatacctctgccacttcttgcaattgtaaggccactgaggatgcatctgatcttaacgatgatgataacctgccaactcaggaattatattatgtgttcgataagttcatcctgacctcggggaagcccccaaccatcgtttgctcgatctgtaagaaggacggccacagtaagaatgactgtcccgaggattttcgcaagatcgacctgaaaccactcccaccgatgaccaacaggtttagggaaatattggacctggtttgtaagcggtgtttcgatgagctatctcctccttgctctgaacagcacaatcgggaacagattctcattgggctggaaaaattcattcagaaagagtatgatgaaaaagcccgtctctgtttgttcgggagttcgaaaaacggatttggttttagggactctgacttggacatttgtatgacattggaagggcatgagaacgccgagaagttaaattgtaaggagattatagagaaccttgccaagatattgaaaaggcacccagggctccgaaatattctgcccatcacgaccgctaaggtccccatcgtgaagttcgagcacaggcgcagcgggctggaaggagacatctccttatacaatacactggctcagcataatactcgtatgttagccacatacgctgctattgatccaagagtccagtacttggggtacactatgaaggtttttgcaaaacgctgtgatataggcgacgcttctcgaggcagcctgagcagctacgcatatattctgatggtcttatattttctgcaacagcggaagccaccagttattcctgtgttgcaagagatcttcgacggaaaacagatcccgcagagaatggtggacgggtggaacgcattcttcttcgacaagactgaagaattaaagaaacggctgccgtctctgggcaaaaatacggagagtctcggggaactttggctcggtctgctgcggttctacactgaggagtttgacttcaaagaatatgttatttccatccggcagaagaaactgttgacgaccttcgagaagcaatggacgagcaagtgtatcgcaatagaggaccccttcgacctgaatcataatctgggtgcaggcgtatcacgcaagatgaccaatttcataatgaaagccttcatcaacggcaggaaactcttcggaactccattttaccccctgattggcagagaggctgaatacttctttgattcccgggtcctcaccgacggagaactggcacctaatgatcggtgctgccgggtatgcgggaaaatcgggcactacatgaaggactgtccgaaacgcaaatccctgctctttaggttgaaaaagaaagacagcgaggaagagaaggagggcaatgaggaggaaaaggattctcgcgacgtgctggatccgcgtgacctgcacgatacccgggatttccgcgatccccgagacctaagatgcttcatttgtggagatgctgggcacgtgcgaagggaatgccctgaagtgaagctggcccgacaacgcaactcatctgtggcggcagcccagttggtaagaaatctagtgaacgcgcagcaggtggccggatccgcgcagcaacagggcgatcagtcaattagaaccaggcagtcatcagagtgctcggaatcgcccagctacagccctcaaccccaaccttttcctcagaacagctcccagtctgccgcaatcacccagccctcgagccaaccaggaagccagccaaagctgggcccacctcagcagggtgcacagcctccccaccaagtgcagatgcctctatacaacttcccgcaaagccccccagctcagtatagtcctatgcacaatatgggcctgttaccaatgcaccccctgcaaattcccgctcccagctggccaatacacggaccagttattcattcggcccctggcagcgccccatcgaatataggcctgaatgacccatcgattatcttcgctcagccagctgctaggcctgttgcaatcccaaatacaagccatgatggccattggcctagaacagtcgcgcctaattctctggtaaactcgggagcggttggaaactcagaacccggattccgcggactcacccctcccatcccttgggagcacgcccctcggcctcactttccgctggtcccagccagctggccttacgggttacaccagaacttcatgcaccaagggaacgctagattccagcctaacaagcccttttacactcaggaccggtgtgccacaaggcgctgcagggaaaggtgtccacatccccctagggggaacgtttctgagtag

SEQ ID NO: 247902 - DNA, 264 bp, synthetic construct
  misc_feature 1..264: note = Description of Artificial Sequence: Synthetic coding sequence
  source 1..264: mol_type = other DNA
atggaagagtctaaaaccctcaaatctgaaaaccacgagccaaagaagaatgtcatctgcgaagagagtaaggccgtccaagttatcgggaatcaaaccttgaaggcaaggaacgacaaatctgtgaaggaaattgaaaattcttccccaaacaggaactcctccaaaaagaataaacaaaacgatatttgcatcgagaagaccgaagtaaagtcttgcaaggtgaacgctgctaacctgcctgggcctaaggaccttgggtag

SEQ ID NO: 247903 - DNA, 234 bp, synthetic construct
  misc_feature 1..234: note = Description of Artificial Sequence: Synthetic coding sequence
  source 1..234: mol_type = other DNA
atggaagagtccaagaccctgaaatctgagaaccacgagcccaaaaagaacgtgatttgtgaagagtctaaggccgttcaggtcattggtaaccagactctcaaggcacggaacgacaagagtgtcaaagaaatagagaatagctcccccaatcggaactctagtaaaaagaacaagcagaacgatatatgcatcgaaaaaacagaggtcaagtcctgtaaagtcaacgcctag

SEQ ID NO: 247904 - DNA, 1209 bp, synthetic construct
  misc_feature 1..1209: note = Description of Artificial Sequence: Synthetic coding sequence
  source 1..1209: mol_type = other DNA
atggcatccatcatcgcgcgagttgggaacagtaggcgactaaacgcacctctgcctccctgggcgcatagcatgctgagatcactgggtaggtccctcggaccaatcatggccagcatggctgatcggaacatgaagcttttctccggccgagtggtccctgcccagggggaagagacgtttgagaattggctgacacaggttaatggagttctgcccgactggaacatgtcagaagaggagaaacttaaacggctcatgaagacgcttcggggaccagcacgggaggttatgcgggtgctccaggcaacgaaccccaatctcagtgtagccgattttttgcgcgcaatgaaattagtgttcggtgagtccgagtccagcgtcaccgcccacggcaaattcttcaacacattgcaagctcaaggcgaaaaagctagcctctacgtaatccggctggaagtccaattgcagaacgccatacaagcaggtataattgctgagaaagacgccaacagaacccgacttcagcagctgctgctggggggagagctgagcagggatctccggttgcgcctgaaagattttctcagaatgtatgctaacgagcaagagcgcctcccaaactttttagagcttatccgcatggttcgcgaggaagaagattgggatgatgccttcataaagcggaaaaggcctaaaaggagcgaaagtatggtggaaagagctgtatcacccgttgcttttcaaggctcccctccgatcgtcataggctccgccgactgtaacgtaatcgagatcgacgacacactcgacgactccgatgaggacgtcattctggtggaatcccaagatccacctcttccatcctggggggctcctcccctacgtgatagggccagaccccaggatgaagtcttagtgattgactcacctcacaattctagagcccaatttcccagcactagcggagggtccggatacaagaataacgggcctggagagatgagaagggctagaaagcggaagcacactattcggtgtagctactgcggcgaggagggtcactcaaaagagacatgcgacaatgagtcagacaaggcccaagtcttcgaaaatctgataatcactctgcaggagctcacgcataccgagatggagagatccagggtggcacccggagagtacaatgatttttctgaaccactgtag

SEQ ID NO: 247905 - DNA, 1542 bp, synthetic construct
  misc_feature 1..1542: note = Description of Artificial Sequence: Synthetic coding sequence
  source 1..1542: mol_type = other DNA
atggctgcttccagaaacggcttcgaggctgtagaagctgagggatctgcaggctgtaggggtagcagcggaatggaggtggtgctccccctggatccagctgtccccgcacccctctgcccccatggacccacactgcttttcgtgaaggtgactcagggtaaggaagaaactaggcgcttctatgcctgctccgcttgtagagaccggaaggactgcaacttcttccagtgggaagatgagaagctgtcaggcgcaaggcttgccgctcgcgaagcgcacaataggcgttgccagcctcccttaagcaggacccaatgtgttgagagatatcttaaattcattgagcttccactgactcagcgaaagttctgccaaacatgtcagcagttgctgctgccggatgattggggccagcatagcgagcatcaagtgctggggaatgtgtcaatcacccagctgcgcagaccttctcagctgctgtatcccctggagaacaaaaaaacaaacgctcagtatctcttcgctgaccgatcttgtcagttcctagtggatctactctctgcacttggctttcggcgtgtgctttgtgtaggcaccccgaggctgcacgaacttatcaaattgactgcctcgggcgataagaagtccaacattaaaagtctgcttctggacatcgactttagatacagccagttttacatggaagactccttttgccattacaatatgtttaaccaccatttcttcgacgggaagactgccctggaagtgtgccgggctttcctccaagaggacaaaggagaagggattattatggtaaccgaccccccattcggaggtttagtggagccgctcgctatcacattcaagaagctcatagccatgtggaaagaagggcagtctcaggatgattcgcacaaagaactgcccattttttggatttttccctacttcttcgaaagccgtatctgccagttttttccctcttttcagatgctggattaccaggttgactacgacaatcacgcactctacaagcacggaaagaccggcagaaagcagagcccagtaagaatattcacaaatatccctcctaataagatcatcctgcccaccgaagagggttataggttctgttccccttgtcaaaggtacgtgagccttgaaaaccagcattgtgaattgtgtaacagctgcacaagtaaagatgggagaaagtggaatcattgcttcttgtgcaaaaagtgtgttaaaccttcctggattcactgttcgatctgcaatcactgcgccgttcccgatcactcgtgcgaagggcctaaacacggctgctttatttgcggagaactagatcataaaagatccacttgccctaatatcgccacatccaagagggctaacaaggctgttaggaaacagaaacaaagaaagtccaacaagatgaagatggagaccaccaaaggtcaatctatgaaccacacctcggcaacccgacgtaagaagaggcgggagcgcgctcaccagtatctcggtagctag

SEQ ID NO: 247906 - DNA, 384 bp, synthetic construct
  misc_feature 1..384: note = Description of Artificial Sequence: Synthetic coding sequence
  source 1..384: mol_type = other DNA
atggaagtcgtcctcccactggacccggctgttccggctccactctgtccacacggaccgaccctgctgtttgtgaaggtgacacaaggcaaggaggaaactcgacggttctacgcatgcagtgcctgtcgtgatcgaaaagactgtaatttctttcagtgggaagatgagaagctctcaggagcaaggctggcggctcgtgaagcacacaaccgtcggtgccagcccccacttagtcgcacccagtgtggccgttacctgaaatttattgagttgccgctgacacaacggaaattttgccaaacatgtcagcaactgctgcttccggacgactggggccagcattctgagcatcagttttgggtatgcgtgataacatcatag

SEQ ID NO: 247907 - DNA, 1479 bp, synthetic construct
  misc_feature 1..1479: note = Description of Artificial Sequence: Synthetic coding sequence
  source 1..1479: mol_type = other DNA
atggttattcttttgctgcagcatggtgccgatccaaccttgatcgatggcgaaggcttcagcagcattcacttagctgtgctgttccagcacatgcctatcattgcctacctgatttctaaaggccagtcagtgaacatgaccgatgtgaacggacaaaccccactgatgttgagtgcacacaaagtgattggccctgagcctacaggctttttactgaaattcaacccaagtctcaatgtggtagacaaaatacatcagaatacccccctgcactgggcagtcgccgcaggaaacgtgaacgccgtggacaagctcctggaggccggatctagtctcgatattcagaatgtgaaaggcgagactcccctcgatatggcacttcagaataagaaccagttaataatacatatgctgaaaacggaggcaaagatgcgcgcaaaccagaaatttagattatggagatggctccaaaagtgcgagctgtttctcctgctgatgctgtctgttataacaatgtgggcaattggctacatcctggacttcaactccgactcctggcttctcaagggatgcctcctcgtgacactgttcttccttaccagtctgttccctcggtttttggtaggttacaagaacttggtctatcttccgacagcttttttgctgagttccgtgttctggatcttcatgacatggtttatactgtttttccctgacctcgccggagcgccattttacttctcctttatcttcagtatagtagcttttttgtatttcttctacaaaacatgggccacagatcctgggttcacaaaagcaagcgaagaggaaaagaaggtcaacatcatcactctggctgagactgggtccttggattttaggacattttgcacgtcctgtctgatccgaaagccactcagatctctgcactgccacgtgtgcaattgttgtgtggctcgatatgaccagcattgcctgtggacgggtcggtgcatcggattcgggaatcatcactactatatcttttttctctttttcctttccatggtgtgtggttggattatttacggatcatttatctacctctcctcacactgcgcgactacttttaaggaggatgggctgtggacgtatcttaaccagatcgtagcatgttccccctgggtcctttacattttaatgctggccacttttcatttctcttggtccacgttcttactcctgaatcaactcttccagatagcttttctgggcttgacttcacacgagaggatcagtctgcagaagcagagcaagcatatgaagcagaccctgagcttgcgtaagaccccttataatttgggatttatgcaaaatctcgccgatttcttccaatgcgggtgctttggactcgtgaaaccatgcgtcgtggattggacgagccaatataccatggtgttccatcctgctcgagagaaagtactgagatctgtgtag

SEQ ID NO: 247908 - DNA, 1869 bp, synthetic construct
  misc_feature 1..1869: note = Description of Artificial Sequence: Synthetic coding sequence
  source 1..1869: mol_type = other DNA
atggagggtcccggactaggcagtcaatgtaggaaccattcccacgggccacacccaccaggctttggcaggtatggcatttgtgcccacgaaaacaaagagctggccaatgccagggaggcactgcctctcatcgaggactcctcaaactgtgacatagtgaaggctactcagtacgggatatttgaaagatgtaaagaactcgtcgaggctggatatgacgtacgccaacctgataaggaaaacgtatctctgctgcattgggctgccatcaataaccggctggatctggttaagttttacataagcaaaggcgctgtggtggaccaactgggtggggatttaaatagtaccccgctgcattgggccatcagacagggccatctcccaatggtgattctcctgcttcagcacggagcggaccctaccttgatcgatggagagggattttcaagcattcatcttgccgttcttttccagcatatgccaatcatcgcctacctcatatcaaagggccaatcggtgaatatgacagatgttaacgggcaaactcccctcatgctgagtgcgcacaaggtgataggtcctgagccgacaggatttctcctgaaattcaacccttctttgaatgtggtggacaagattcatcaaaacacaccattgcactgggctgtagcagccggaaacgtgaacgctgtggacaaactgctggaagccggaagctccctagacattcaaaatgtgaagggagagacgcctctggacatggctttgcaaaataagaaccaactcattatacacatgctgaaaactgaggctaaaatgcgggcaaatcagaaatttcgcctctggcgttggttgcaaaagtgcgagctgtttttgctgttgatgttatccgtgataacaatgtgggcaattgggtacatcctggatttcaacagcgattcttggctcttgaaaggatgcttgctggtgaccctgtttttcctgacctctctcttcccaagatttcttgtgggatacaaaaacctcgtctatctgccaacagccttccttctgtcatccgtgttttggatatttatgacttggtttattcttttcttcccagatctagccggtgcacccttctattttagcttcatttttagcattgtggcatttctgtacttcttctataagacttgggctaccgaccccggttttacgaaggcaagcgaagaagaaaagaaggtcaatattattacactggccgaaaccggttccttggactttaggaccttctgtactagctgcttaatacgaaagcccttaagaagccttcactgccatgtgtgtaattgttgtgtggcccgatacgaccagcactgcctatggaccggccgatgcatcggcttcggcaatcaccactactacatattcttcctgttctttctgtccatggtgtgtggttggatcatttacggctcatttatttatctgtcatcccattgtgccaccacttttaaagaggatggactttggacgtatcttaaccaaattgtggcatgcagtccctgggtactgtatatacttatgctggccacattccattttagttggagcacattcctgttgctgaatcaactatttcagatcgcctttctgggtctgacgtcgcatgagcggatctctctccaaaagcagtcaaaacatatgaagcagaccttgagcctgaggaagacaccctacaacctgggcttcatgcagaacttggctgatttttttcagtgcggctgtttcgggctagtgaaaccctgcgtggtggattggacatctcagtatacaatggtgttccaccctgccagagagaaagtcttgaggtccgtgtag

SEQ ID NO: 247909 - DNA, 564 bp, synthetic construct
  misc_feature 1..564: note = Description of Artificial Sequence: Synthetic coding sequence
  source 1..564: mol_type = other DNA
atgcgaaggggttggaagatggcgctgagcggtgggctgcggtgttgccggagagttctgagctgggtgccagttttggtaattgtactcgtggtgctgtggtcttactatgcttatgtgtttgagctgtgtcttgtgacagtactcagtcccgctgagaaggtcatatatctgatactgtatcacgccatcttcgtgttttttacttggacgtactggaagtctatctttaccctcccgcagcagccaaatcaaaagttccacctgtcttacaccgataaagaacgctatgaaaacgaagagcgcccagaggtccaaaaacaaatgctcgtggacatggccaagaaactacccgtgtacaccaggacagggtccggggcagtgaggttctgtgacaggtgccatttgatcaaacctgaccggtgtcaccattgtagtgtgtgcgctatgtgcgtgctgaagatggaccaccattgtccctggggaaattacccagtcttcgctctgagttctatgtcattctttttctcactgtggccagcatgcttcctaagcgcactgtag

SEQ ID NO: 247910 - DNA, 1014 bp, synthetic construct
  misc_feature 1..1014: note = Description of Artificial Sequence: Synthetic coding sequence
  source 1..1014: mol_type = other DNA
atgaggcgcggatggaaaatggccctgagtggcggattgagatgctgtagaagagtgctgagctgggtacctgttctcgtgatagttctcgtcgtactctggagctattatgcttacgtcttcgagctctgtttagtcaccgttctatccccagctgaaaaggttatctatctcattctctatcatgccattttcgtattttttacctggacgtactggaaaagtatctttactctcccccagcagccaaaccagaaatttcacctgtcttatacagataaggagaggtacgaaaatgaagaacggcctgaggtccagaagcaaatgctagtggatatggcgaagaaactgcccgtgtatacccgtacaggaagcggcgcagtccgcttctgcgacaggtgtcacctaattaaacctgaccgctgtcatcattgcagcgtgtgcgctatgtgcgtgctgaaaatggaccaccactgcccatgggtgaacaattgcattgggttctcaaattataaatttttcctgcagttcctcgcctactcagtgctgtattgtctgtacatcgccaccaccgttttcagctactttatcaagtactggagaggcgaactgccctcagtgagaagtaagtttcatgtcctgttcctactcttcgtcgcttgcatgttttttgtgtcattggtgatcctttttggctaccactgctggctggtgtcacggaataaaacaaccctggaggcgttttgcacccccgtgtttactagcggaccagagaaaaacggctttaacttgggtttcattaaaaacattcagcaagtttttggcgacaaaaaaaaattttggctgatcccaattggcagttccccgggagacgggcattcctttcctatgaggagcatgaacgaaagtcagaaccctcttttggccaacgaagagacctgggaagataacgaagacgataatcaggattacccagaggggagcagctccctggcggtcgagacagagacttag

SEQ ID NO: 247911 - DNA, 987 bp, synthetic construct
  misc_feature 1..987: note = Description of Artificial Sequence: Synthetic coding sequence
  source 1..987: mol_type = other DNA
atgcggcgagggtggaagatggctctttctggaggtctccgatgctgccgccgagtgctgagttgggtccccgttctagtgatagtacttgtggtactctggtcttattacgcctatgtattcgagctctgcctggttatttacttgattctctaccacgcgatttttgtgttcttcacttggacttactggaagagcatctttacactgccacagcagcccaaccagaagtttcatctatcttacactgataaggagcgatatgaaaatgaagagagacctgaggtccagaagcagatgctagtggacatggcgaagaaactgcccgtttacaccagaactggcagtggggctgtgcggttttgtgacaggtgccatctgatcaagccggaccggtgccaccattgctctgtgtgcgccatgtgcgtgctgaagatggatcaccactgtccatgggtgaataattgtatcggattctccaattataaatttttcctacagtttctggcctattcggttctttactgtctctacatcgccactaccgtcttttcctattttatcaaatattggagaggcgagcttccatctgtgcggtcgaagttccacgtactcttcctcctcttcgttgcctgcatgttcttcgtgtccctcgttatcctctttggataccattgctggcttgtgagcaggaataaaaccacattggaggcattttgtactcccgtgttcacctcagggcctgagaagaatgggtttaatcttggttttattaagaacatccagcaggtatttggcgataagaaaaaattttggctcatcccaatcgggtcctctcctggcgacggacactcttttcccatgcggtcaatgaatgagtcacagaatcccttactggctaatgaagagacgtgggaagataatgaggacgacaaccaggactatccagagggctctagtagcctggcagtagaaacagagacttag

SEQ ID NO: 247912 - DNA, 2022 bp, synthetic construct
  misc_feature 1..2022: note = Description of Artificial Sequence: Synthetic coding sequence
  source 1..2022: mol_type = other DNA
atgcctaggtctcccggaacacgactcaagcctgcgaaatatattcccgtcgcaacggccgcagcattgttagtgggcagttccacactgttctttgttttcacctgcccttggctgacgagagccgtctctcccgctgtccctgtttataatggaattatttttctctttgtcctggcgaatttctccatggctacctttatggatcccggagtcttccccagggccgatgaagatgaggacaaggaagatgatttcagagcacccctgtataaaaatgtggatgtgcggggaatccaggttcgcatgaagtggtgcgccacttgtcatttctatcgccctccccgatgtagtcactgtagtgtgtgcgataactgtgtggaagtcaccgggaagttccggggtggggtgaaccctttcaccaggggatgttgtggcaatgttgagcacgtgttatgttccccccttgcccctagatatgtagtggagccccctagactcccactcgccgttagcttgaagccacctttcctgcgaccagaactgcttgatagagccgcaccactgaaagtgaaacttagcgacaacggtctgaaagccggattgggccgaagcaaaagcaagggttccttggaccggttggatgagaagcccctcgacctgggaccgcctctgccaccaaagatagaagcgggtacattttctagcgatcttcagacaccacgcccagggtctgccgaatcagctctgtccgttcaaaggacatctccgcctaccccagccatgtataaattccgccctgcattcccgaccgggcctaaggtcccattttgtgggccaggagaacaggtgccaggcccagatagtttaacactaggcgatgactccataaggtctctagatttcgtcagcgaaccctcactggatctcccagattacggacctggaggactgcacgcagcctaccctcccagcccccctctcagcgcatccgatgctttttcaggcgctctgcgatccctatctctgaaggcatctagtcgccgaggtggcgatcatgtagccctccaaccgctcagaagtgagggtgggcctccgacaccccacaggtctatctttgcccctcacgccttgcctaatcggaatgggtccctgtcatacgacagtctgctaaatcctggctcccctggcggtcacgcctgtccagcacaccccgcagttggggtagctgggtaccattcaccatacctgcatcctggtgccaccggggatcctcccagaccactgcccaggagcttttcaccagtactggggcctcgtccccgtgagccttcaccagtgcggtacgacaatttatcaagaacaattatggctagcatacaggagaggaaggatcgtgaggagagagaacgcctcttaaggtcccaagcagattcactgttcggagactccggcgtgtacgatgccccatcctcatattctctgcagcaggcctcggtgctgagcgagggcccaagaggccctgcgcttcgctacggatctcgcgacgacctcgtcgccggacctgggtttgggggtgccagaaatcccgctctgcaaacatcattatctagcctctcttctagtgtgtctagagctcctcgtacctcctcaagctcattacaagccgatcaggctagctcgaatgcacctggaccacggccaagttccggatcccacagatcacctgcgagacaggggttgccttctcctcccggaaccccccacagtcccagctatgccggaccgaaagctgtggcgttcatacacacagacttgccagaaccacccccaagcttgactgtacaaagggaccatccccagctgaaaaccccacccagcaagcttaatgggcaatcacctgggctggccaggctgggccctgccaccggtcccccaggacccagcgcatcgcccacacggcacacattagtgaaaaaagtgagtggcgtgggtggcaccacctacgaaatatcagtttag

SEQ ID NO: 247913 - DNA, 2298 bp, synthetic construct
  misc_feature 1..2298: note = Description of Artificial Sequence: Synthetic coding sequence
  source 1..2298: mol_type = other DNA
atgcctagatcccccggtacgcgcctaaagcccgctaagtacatccccgtggctacggccgctgccttattggtggggagttctaccctgttttttgtatttacttgcccctggctgacccgcgctgtttcccctgcggtccctgtgtataacggcatcatatttctgtttgtgctggcgaatttttcaatggctactttcatggatcccggagtatttccacgggcagacgaggacgaggataaggaggatgactttcgcgctccactctacaaaaatgtcgacgtcaggggcattcaggttagaatgaaatggtgcgccacatgccacttttaccggccaccgagatgttcccattgttctgtgtgcgataactgtgtggaggactttgatcaccattgcccctgggtcaataactgtatcggcaggcgcaactaccggtattttttcttattcctcctgagtctatcagcccacatggttggcgtagtggcgttcggcctggtttatgtgctgaatcacgcagaaggcctcggagccgctcataccacaatcacaatggcagtgatgtgcgtggctgggctgttttttattcctgtgataggtctcaccgggttccatgtggtgctggtgacgaggggtagaaccacaaatgagcaggtgacaggtaaatttcggggaggagttaacccattcactcggggttgctgcggtaacgtagaacacgtcctctgcagtcctctcgctcctcgctacgtggtcgaacctcccaggttgcctctggcggtcagcctgaaacctccgttcttaagacctgagctgctggatagagcggctccactgaaagttaagctctccgataatggactgaaggcaggcctcgggcgttctaagtccaaagggtcattggaccgccttgatgagaagcctttggacctgggcccaccactcccacctaagatagaggctggcacatttagtagcgatctgcagaccccccgtccaggtagcgctgagagtgccctcagtgtgcagcggacgagcccaccaacaccagccatgtacaaatttcgcccagcgtttcccaccggccctaaagtcccattctgcggcccaggggaacaagtccccggtcctgactcactgactttgggtgatgattctattcggtccttggatttcgtcagcgaaccctctcttgacctgcccgattacgggcctgggggacttcacgccgcataccccccttctccccctctgtctgctagcgatgcatttagcggggctctgaggtcacttagtctaaaggcttcatctaggcgaggcggtgaccacgtcgccctacagcctctgaggagcgaggggggacctccgactccacaccgtagtatcttcgctccacacgcacttccgaatcgcaatggaagtctgtcctatgactccctgttaaaccccggatctcctggaggacatgcttgtcccgcacatccagccgtgggggtcgccggttatcatagtccctatttgcaccctggagcgaccggagaccccccacgcccactcccacgctcattttcgcctgtgctcgggcctagaccccgagagccctcccccgtgcgttacgacaacctgtccagaactattatggcgagtatccaggagcggaaggatagagaagagagagaaaggctacttcgttcacaggctgattccctgttcggagactccggggtgtacgacgcacccagttcctatagtctgcaacaagcatctgtactctccgaaggacctcgaggtcctgctttacggtacggctctcgggatgatttggtggcaggcccaggattcggaggcgctcgcaatccagcactgcagacctccctctcatccctgtcaagttcggtctcccgcgcacccagaacttccagctcctccctacaagccgaccaggcctctagtaatgcaccaggcccaagaccgtcctccggcagccataggtcccccgctcgacaggggctcccttcccccccaggcacgccacactctcctagctatgctgggcctaaggccgttgcattcattcatacagacctgcccgagccacctccgtcgctgactgtacagagagaccatcctcagctgaaaacccccccatccaagctcaatggtcagtcccccggtttagcgaggctgggccctgcgactgggccacccggtcctagcgcttctcccaccagacacactctggtcaagaaggtgagtggcgttgggggaaccacttacgaaattagcgtgtag

SEQ ID NO: 247914 - DNA, 2337 bp, synthetic construct
  misc_feature 1..2337: note = Description of Artificial Sequence: Synthetic coding sequence
  source 1..2337: mol_type = other DNA
atgcccagatctccaggcaccaggctgaagcctgctaaatacatcccggtcgccaccgcggctgccctcctcgtggggtcatcaaccctgtttttcgtctttacttgcccatggttgactagggcagtatcccctgccgtgcctgtgtataatgggatcattttcctgtttgtgctggctaactttagtatggcgactttcatggaccctggagttttcccaagggcagacgaagacgaagataaagaggacgattttagggcgccactgtataagaacgtggatgtcagagggatacaagtgagaatgaagtggtgtgctacatgccacttttatcgcccaccacgatgcagccactgtagcgtgtgtgataactgtgtggaagacttcgaccatcactgtccgtgggtgaacaactgcataggtcgcaggaactatcgttatttttttctcttccttctgtccctgtccgctcacatggtcggggtggttgctttcgggcttgtctatgtgctcaaccacgccgagggccttggagcagcccacaccacgataacgatggctgtgatgtgtgtagccggactctttttcatcccggtgattggactaaccggcttccacgtggtgttagtgaccagaggtaggacgaccaacgaacaggtgactggcaaattccgcggaggagttaatccgtttaccaggggatgctgcggcaacgtggaacatgtgctatgttcgccccttgcgccaaggtatgtcgtcgaaccccctaggcttcctctggccgtatctctcaagcctccctttctgaggcctgaactgctcgatcgagccgctcctcttaaggtgaaactgagtgacaacggtctcaaagccggactgggccgttccaagtccaaaggcagtctggacagactagacgagaaacctctcgacctggggccacccctgccaccaaaaatcgaagccggtacattcagttctgaccttcagactcctaggcccggtagtgcagagtcagcgctgagcgtgcagcggacctccccaccgacacctgccatgtataagttcaggccagcctttccaacaggcccaaaggtcccattttgcggaccaggagaacaggtaccgggaccagatagtttaacactgggggatgattccattcgcagccttgacttcgtgagcgagccctccctcgatctgcccgattatggcccaggcggactgcatgcagcctacccaccatcacccccactttctgctagtgacgcgtttagcggcgctctccgttcactcagtctgaaagccagctcacggaggggcggtgaccatgtcgctttgcaaccactgcggtccgagggaggtccacccacaccacaccgatctatctttgccccacatgcattaccgaatcggaacggctcacttagttacgattccttgttgaatccaggctcccccggtggacatgcctgcccagcacaccctgctgtgggagtggcaggctatcatagcccttacttgcaccccggagctaccggcgatccccctcgccctctccccagaagctttagcccagtgttaggacctcggcctagggagccatcgccagtgcgctatgataatctgagccggactatcatggcttctattcaggagaggaaggaccgggaggagcgcgagcgactcctgcggtcacaggctgatagcttgtttggcgactcaggggtctatgacgctccctcttcttactcattacagcaagcctctgttctcagcgaagggcctcgcggtccagccctacgatacgggtcaagagatgatctggttgccggaccaggcttcggaggcgcaagaaatccagccctccaaacctcactatcctctctttcctcttcggtctctcgcgctccacgtacctcctcttccagtttgcaggcagatcaggcttccagtaacgcacctgggcctcgcccatcttctggcagtcatagatcacctgccaggcagggactgccaagtccacccggaaccccgcactcccccagttacgctggccctaaggctgtcgcatttatccatacggacctgcctgagccaccaccctccctcaccgtgcagagggggagaattggcacttgcacacgaggttgggggcgaagaggacagccttgggtacctcctggcttgcatttatgccaccttgggcgaccggaggacagaccgcctctaagggctccttggtcgcaagctgcgggtgcccctcctcgaggagctatgtgccggttacacctggccgctagttccctgtttccgtcattgagtggaccttag

SEQ ID NO: 247915 - DNA, 1095 bp, synthetic construct
  misc_feature 1..1095: note = Description of Artificial Sequence: Synthetic coding sequence
  source 1..1095: mol_type = other DNA
atgtcagttatggttgtgcggaaaaaggttacccggaaatgggagaagttgcccggaagaaatactttttgctgcgatggaagggtgatgatggcgagacagaaaggcatattctacctaacactgtttctcatcctgggaacctgcactttgttcttcgcctttgagtgtaggtatctcgccgtccagttgtcaccagccattcctgtgttcgcggctatgctgttcttgttctcaatggcaacgcttctgaggacttcattctctgaccccggagtgatccccagggcactcccagatgaggctgcctttatcgagatggaaattgaagcaaccaatggagcggtacctcaaggtcaacggccaccaccacgaatcaaaaatttccagatcaacaaccagattgtcaaactcaagtactgttatacttgtaagatctttcgtcctccccgagcatctcattgtagtatctgtgacaattgtgttgagcgcttcgaccatcattgcccctgggtaggtaactgtgtggggaagaggaattataggtatttctaccttttcatcctgtcgctgagccttctcacaatttatgtttttgcgttcaatatcgtgtatgttgctctgaaatctctgaagatcggcttcctcgaaaccttgaaagagacacccggaactgtgcttgaggtactgatctgcttttttaccctgtggtctgtagtggggctgaccgggttccacacattcttggtggcactcaatcagaccaccaatgaagacatcaagggtagttggacaggaaaaaatcgagtgcaaaacccgtacagccacggaaatatcgtcaagaattgctgcgaggttctctgtggaccattaccaccatcagttctggatcgtaggggcattctgcccctggaggaaagcggaagcagacctccttcaacacaagagactagcagctcactgcttcctcagtctcctgcaccaacggaacatttgaactccaatgaaatgccggaagacagctctacgcctgaggaaatgccaccacctgaaccccctgagccaccccaggaggcggctgaagctgaaaagtag

SEQ ID NO: 247916 - DNA, 1095 bp, synthetic construct
  misc_feature 1..1095: note = Description of Artificial Sequence: Synthetic coding sequence
  source 1..1095: mol_type = other DNA
atgagcgtaatggtggtccgcaagaaggtgacgcgcaagtgggagaagctgcccggtcggaacaccttttgctgcgatggtagagtaatgatggcgcgacaaaaggggattttttacctgacgctatttttgatcctgggcacgtgcactctgttcttcgctttcgagtgtcgctacttggccgtgcagctctcacccgcaattccagtgtttgccgcaatgttgttccttttctctatggccaccctgctgagaacttcttttagcgacccaggtgtgatccctcgagccctccctgatgaagcggcatttattgagatggagatagaagcaacgaatggtgcagtccctcaaggccagcggcctcccccaaggatcaaaaattttcagattaacaatcagattgtcaagctgaagtactgctacacgtgcaagatttttcggccacccagagcatcccactgttctatctgtgataactgtgttgagcgttttgatcaccactgcccgtgggtcgggaactgcgtgggcaagcgcaattacagatatttctacctgttcatactgagcctttcccttctgacaatctacgtgtttgccttcaacattgtgtatgtggcactcaagagcttaaaaataggatttcttgagacacttaaggaaacgccgggaacagtcctggaagtcctgatttgcttctttactttgtggtccgtggttggactcacaggattccacacattccttgtggccctaaaccagacaactaacgaagatattaagggctcgtggaccggcaagaacagagtccaaaatccctattcccacgggaatattgtgaagaattgctgcgaggtgctgtgtggtccccttccaccatctgtgttggatagaagaggaattctaccactggaggagtcaggctcacggcctcctagcacccaggagacttcctcatctctgcttccacaatctccagctcctactgagcatttaaacagtaacgaaatgcccgaggactcgtctacaccagaggaaatgcctcccccagagccccctgaacccccacaagaggcggctgaggcggaaaaatag

SEQ ID NO: 247917 - DNA, 513 bp, synthetic construct
  misc_feature 1..513: note = Description of Artificial Sequence: Synthetic coding sequence
  source 1..513: mol_type = other DNA
atgtctgtgatggttgtgagaaaaaaggttacaaggaaatgggaaaaactccctggtcgtaataccttttgttgcgacggtagagtgatgatggctcgccagaagggcattttttatcttactctatttcttatcctcggaacatgtactctcttcttcgccttcgagtgcaggtacctagctgtgcagctctctcccgctatccctgtctttgccgctatgttatttctttttagcatggccactcttctccgtaccagcttttctgatcctggtgtgataccccgagccctgcccgacgaagctgccttcatcgagatggaaattgaagccaccaatggtgccgtcccacaggggcagagaccccctcctcggattaaaaacttccagattaacaatcagatagtgaaactgaagtattgctacacctgcaaaatctttagaccaccgagggcttcccactgcagcatctgcgataattgtgtggagcgattcgaccaccactgcccttag

SEQ ID NO: 247918 - DNA, 585 bp, synthetic construct
  misc_feature 1..585: note = Description of Artificial Sequence: Synthetic coding sequence
  source 1..585: mol_type = other DNA
tagctgtttttgatcctcggtacctgcaccttattctttgccttcgaatgcaggtatctggcagtacagctgtcacccgcaatacctgtgtttgccgctatgttatttctattttcaatggccaccctccttaggacatccttttctgacccaggcgtgatccctagggctttgcctgatgaagccgctttcattgaaatggaaatcgaggcaaccaatggagctgtgccccaaggccagaggcctcctcctcgcatcaagaattttcagatcaataaccaaatagtcaaactgaaatactgctatacctgtaaaatttttcgaccacctagggcgagccattgctccatctgtgataactgtgttgagtcactcaagataggctttcttgagacactgaaagaaacccctggcactgtgctggaagtacttatttgtttcttcaccttgtggtctgtggtaggcctaaccggattccacacttttctcgttgctctgaaccaaacaaccaacgaagacattaaggggtcctggactggaaagaatcgtgtgcagaatccctactctcacggtaatatagtctag

SEQ ID NO: 247919 - DNA, 897 bp, synthetic construct
  misc_feature 1..897: note = Description of Artificial Sequence: Synthetic coding sequence
  source 1..897: mol_type = other DNA
atggaaagaggcatttctgatgtcacggataggaaactaactatggaagaggaggaggctaaacggatagcagagatgggtaagccagtattgggagaacacccaaagttggaggtgatcatcgaggagtcatacgaattcaagacgactgtagacaaactgatcaaaaaaacgaacttagccctcgtagtgggaacccattcctggcgagaccagtttatggaggccatcaccgtgagtgcagctggggatgaggatgaagacgaaagcggagaggaacggctcccctcttgttttgattatgtgatgcattttctgaccgtgttctggaaagtcctcttcgcatgcgtccctcccacagagtattgtcatggctgggcctgtttcgccgtgagtatcctgattatcgggatgctgactgcaattatcggcgatctggcctctcacttcgggtgcaccatcggacttaaggactcagtgacagctgtggttttcgttgcatttggtacgagcgtcccggacacattcgcctcgaaagccgcagccctacaggatgtgtacgccgatgcttcaatcggcaacgttactggctctaacgccgttaatgtattcttaggcattgggctcgcctggtccgtggccgcaatttactgggccctgcaggggcaggaatttcatgtttctgcaggcaccttagctttttcggtcactctctttacaatatttgcattcgtttgtattagtgtcctactctacagacgcagaccccaccttggcggagaattgggaggcccaagaggatgcaagctggccacaacttggctcttcgtatccctgtggcttctctatatcctctttgccactctggaggcctattgttacatcaagggcttctag

SEQ ID NO: 247920 - DNA, 705 bp, synthetic construct
  misc_feature 1..705: note = Description of Artificial Sequence: Synthetic coding sequence
  source 1..705: mol_type = other DNA
atgagctctgaagtgtctgcccgtcgagacgccaagaaacttgtgagaagtcctagtggcctcagaatggtgcctgagcatcgagcatttggctctccgttcggactggaggaacctcagtgggtgccagataaggagtgccgtagatgcatgcaatgtgacgccaaatttgatttcctgacccgaaagcatcattgtaggagatgcggaaaatgcttttgtgacagatgctgctctcagaaggtccccttgagacggatgtgtttcgtggaccccgtaagacagtgtgctgagtgtgcattggtttctttaaaggaggccgaattttatgataaacagcttaaggtgctcctctcaggcgcaacctttctcgtcacctttggcaacagtgagaaacccgaaacaatgacctgtagattgtccaataatcagcgatacctgtttctggacggcgattcgcattacgagatagaaattgtacacattagcaccgtgcaaatcctgaccgagggattcccccctggaggtggtaacgctagggccaccggaatgttcctgcaatatacagtgccgggaacagagggagttacacagctcaaactgactgtggtggaagacgtgacagtggggaggcggcaggccgtggcctggctggtggcgatgcacaaggccgcaaagctcctgtacgagagcagagatcagtag

SEQ ID NO: 247921 - DNA, 7619 bp, synthetic construct
  misc_feature 1..7619: note = Description of Artificial Sequence: Synthetic coding sequence
  source 1..7619: mol_type = other DNA
atgaaccaccccttcggaaaggaagaggcagcgtcccagaagcagctgtttgggtttttctgtgagtgtctcagacgtggggagtgggaattggcgcaggcttgtgttccccagctgcaagaaggtcagggcgatatccccaagcgagtcgaagacattctgcaggctctggtcgtatgcccaaatctgctacgctgtggccaggacattaaccctcagagagttgcatgggtgtggttactggtgctggaaaagtggctggccagagaaaagaagctactgccggtcgtgttcagaaggaagctggagttccttctcctctcggaggacctacagggggacatcccagagaacatactcgaggaactatacgaaacacttacccagggcgcagtaggacatgttccagacggcaatccccgtcgggagtcctggacaccacgactctcttcggaagcagtctccgttctgtgggacctcctcaggcagagccctcagcccgcacaagccctgctggagctacttttggaggaagacgatggaactggactgtgtcactggccacttcaaaacgcgttggtggaccttatccggaaagcccttcgggctctacagggcccagattcggtacccccaggtgtggtcgacgcaatatacggtgccttaaggacgttgcgttgcccagctgagcccctgggcgtggagctgcacttgctgtgtgaggagctgctggaggcctgcaggacagagggctctcccctgcgtgaggagaggctactgtcctgtctgctacataaagctagtagagggctgctgtccttgtacggccatacatacgctgagaaagttactgaaaaacctccaagggccacagcttccgggaaggtgtcaccagaccacctggaccccgagagggccatgcttgcactgttcagcaaccctaaccccgcagaggcttggaaagtcgcatatttctattgtctgagtaataataaacatttcctagagcagatcctcgtgaccgccttgaccctcttgaaggaggaggacttccccaatctgggatgcctgctagacagagagttcagaccgctctcctgtctgcttgtgctgctggggtggacgcattgtcagagtctggaatcagccaagcgcctgctgcagactctccatcgcacacagggcccagggtgcgatgaactgctgagagatgcctgcgacgggctttgggctcacctcgaagtcctcgagtggtgtatccagcagtcctctaatccaatccccaagcgcgatcttttgtaccacttgcacggaggagacagccacagtgtcctctacactctgcatcaccttacaaacctccccgcacttcgagaagaggacgtgttgaagctcctgcagaaggtgcctgcgaaagatccacagcaggagccagacgctgttgacgcccctgtccccgaacatctgagtcagtgccagaatctaacactttaccaggggttttgtgcgatgaagtacgcaatctacgccttatgcgtaaatagtcaccagcatagtcagtgtcaggattgcaaggactctctgagtgaagacctggcctcagctaccgaacccgctaacgactccctgtctagcccgggagcagctaacctcttcagcacctacttagctagatgccagcagtatctgtgttctatcccagacagcctttgtctcgagctgctggagaatatctttagcctgctccttattacttctgccgacctgcacccagagccgcacctgcctgaagattatgccgaagatgatgatattgaaggcaaatcaccatctggacttaggtctccaagcgagtcaccacaacacatcgcccaccccgagcgtaaatccgagagaggaagtcttggcgtgccaaagacacttgcatatacaatgccctctcacgtcaaggcagaacctaaagactcctaccctggcccacataggcattctttcctagatctgaagcattttactagcggcataagcgggttcctggcggacgaatttgcgatcggcgcattcctgcgcttacttcaggaacagttagatgagatctcatctaggtccccccctgagaaaccaaagcaggaaagccagtcttgctccggctcacgagacggacttcagagtcgcctgcatcggctctccaaagtcgtgagcgaggcccagtggcgccataaggtcgttacatcgaaccatagatctgaggagcaaccatcacggagataccagcctgctacaagacatcctagcctcaggcggggaagaagaacacgtaggtctcaagctgacggaagagaccgtggttcaaatccctccctggagagtacatcgtctgaattgtccacctctaccagtgagggatccctgagtgccatgagtgggagaaacgagctccactcaagacttcacccacatccacagtcttctctcatccctatgatgttttccccacccgaatcgttactggcatcatgtatactccggggaaacttcgctgaagcccaccaggtgctttttacattcaacctcaagtccagtccaagctctggcgagctgatgttcatggagcggtatcaggaggtcattcaagaactggctcaggttgagcataagatcgagaaccagaatagcgacgccggaagcagcaccatccgacgaacaggttcaggacgctccaccttacaggctatcggcagcgccgcagctgccggaatggtgttctatagtatatcagacgttacagacaaactgcttaacaccagcggcgatcctatacctatgctccaggaggacttttggatcagcacagcgctggtcgagccaaccgctccgttacgggaggtgttagaggacttatctccacctgccatggcagcattcgatctggcctgttcccaatgtcagctatggaaaacctgcaagcagttgctcgagactgctgagagacgcctgaactcctctctggaacgtcgtgggcgacggattgatcacgtgctgcttaacgctgacgggattcgaggctttcctgtagtgctgcaacaaattagcaaatcacttaactatctcctgatgagtgcatcacaaactaagtcagaatccgtcgaagaaaagggcggaggcccacctcggtgctcaattaccgagttgctgcagatgtgttggccgagtttatctgaggactgcgtggcctctcacacaacactcagtcagcagctggatcaggtgctgcaaagtctacgagaggcgctagagcttcctgagccacgaactccccctcttagctcccttgttgaacaggccgctcagaaggcacccgaagccgaggctcatccagtgcagattcaaactcaactcttgcaaaaaaaccttgggaaacagaccccttccggaagcaggcagatggactatctggggaccttcttctcttactgttcaaccctggcagccgtattactgcaaagtctatcctccgaacctgaccatgtagaggtcaaggtcggtaatccgtttgtgctgttacaacagtcctcttctcaactggtgagccacctgctgtttgaaagacaggtacccccagagcgcctcgctgccctgcttgcgcaggaaaacctgagccttagcgtccctcaagtgattgtgagctgctgttgcgagcccctggctctctgtagctcaaggcaaagccaacagacaagttcactgctcacccgcctgggtacactggcccagctgcatgccagccattgcctggacgatttgcccttgagtaccccatcatccccgaggacaaccgagaatcccactctcgaacgaaaaccgtatagcagtcccagagactcgagcctgcctgccctcacctctagcgccttggctttcctgaaaagccgatccaaacttcttgctaccgtggcttgtttaggtgcctctcccagactgaaagtctctaaaccgtccctgagttggaaggaactgagagggagaagggaggttccgcttgcggctgaacaggttgcgagagagtgtgagcggcttctggagcagtttcctctgtttgaggccttcctgctggctgcctgggagcccctgagagggagcctgcagcagggtcagtcattagcagtgaacctgtgtggttgggccagcctatcgacggtgctgctaggcctgcatagccccatcgccttggacgtgctatcagaggcctttgaagagagcctagtagccagagattggagccgggcactccagctcaccgaggtgtatggacgggacgtggatgacttgagcagcatcaaagatgctgtgttgtcatgtgcagtggcatgcgataaggagggctggcagtacttgttcccggtcaaagatgcatcactccggtcccgactcgcactgcagttcgttgatagatggcccctggagagctgccttgagatactggcctactgtatcagtgataccgccgtccaagagggccttaagtgcgaactacagcgcaagctagccgaattgcaggtctaccagaaaatcctgggacttcagtcccctccagtgtggtgtgactggcagacccttaggtcctgctgcgtcgaggacccaagcacggttatgaatatgatactggaggcccaggaatatgaactttgtgaagaatggggttgtttgtatccgatcccacgcgagcacctgatttcattacaccagaagcatcttctgcatctgttggagcggagagatcacgacaaggcattacagttgttgaggcgtattccagaccctacaatgtgcctcgaggtgacagagcagtctctggatcaacacacctctttggccacatctcactttctggccaactacctgacaacccatttttacggccaacttacggctgtgagacaccgggagatccaggccctctatgtggggtctaagatcttgctcacgttaccggagcagcatcgcgcttcttactcgcatttgtcaagtaaccctctctttatgctggaacagctgttgatgaatatgaaagtcgactgggccaccgttgcagtccagacccttcagcagttattggtgggccaggagattgggttcaccatggacgaggtggactcacttctttctcgttatgcagagaaggccctggatttcccctacccacagagagagaagagatccgacagcgtcatacacttgcaggagatcgtgcaccaggctgccgacccggagacattacccagatccccaagcgccgagttttcaccggctgcaccacccggaatatcctctatccattcacccagcctgcgggagcgaagcttccctcctactcagcctagccaagagtttgtgcccccagccacacctcctgctagacatcagtgggttcccgacgagaccgagtctatatgcatggtctgttgtagagagcacttcaccatgttcaataggaggcatcactgcaggaggtgtggcagattagtgtgcagctcttgttcaacgaaaaagatggttgttgagggatgtcgagagaaccccgcaagggtctgcgaccagtgctactcctattgtaataaggatgtccccgaagagccgtctgaaaagcctgaggcactggatagcagtaaaaatgagtcgcccccatacagttttgtggtccgggttcccaaggccgacgaggtagagtggattctggacctcaaggaggaagagaacgagctcgtgagaagcgaattctactatgagcaggcaccttccgccagtctgtgcatcgcaatccttaatctccacagagatagtattgcatgcggacaccagctgattgaacactgttgtcgtttaagcaaagggctgacaaaccccgaagtggatgcagggctcctgactgatataatgaaacagttactgttctctgccaaaatgatgttcgttaaagccggacaaagccaggatctcgcgctgtgcgactcctacataagtaaagtcgatgtcctgaatattctggtggcagcagcttacagacatgtccctagtttggatcagattctgcagcccgctgccgtcacacgcctgcgtaaccagttgctggaagctgaatactatcaactgggggtagaagtttcgacaaaaactgggctcgatacgacaggggcatggcatgcgtgggggatggcgtgcttgaaggctggcaacctcaccgcagcgcgagaaaagttcagcaggtgtctgaagccccctttcgatctcaatcaactgaatcacggctcccgcttagtccaggatgtggtggagtacctggagagcacagtaagaccttttgtgtctttgcaagacgacgattacttcgcaacccttcgcgaactcgaggcgaccctgaggacacagtctctctcccttgcagtcatcccagaaggtaaaatcatgaataacacctactatcaggaatgcctcttctacttgcacaactatagcacgaatctggctattatttcgttttacgtccgccactcctgtctcagagaagcactgctacatctgctgaacaaggaatctcccccagaagtctttattgaaggtatctttcaaccttcatacaagtcaggtaagctccacaccctggagaacctgctggaatcgatagacccaactctggagagctgggggaagtatctcatagctgcctgccaacaccttcagaagaagaattattaccatatactctacgaactgcagcagttcatgaaggaccaggtgagagccgcaatgacatgtatccgcttttttagtcataaagctaaatcatacactgaattgggcgagaagctgtcctggttgctgaaggctaaggatcacttgaagatctatttgcaggagacctcccggtctagcggacgaaaaaaaaccacattttttcggaaaaaaatgaccgcggctgacgtctcgcgccacatgaataccctgcaactccagatggaggtaactcgcttccttcatagatgcgaatccgccggtaccagccagatcacaactcttccattgcctacgctgttcgggaataatcacatgaagatggatgtcgcctgtaaggtgatgctgggaggcaagaatgtggaagatgggtttggaatcgccttcagagtgctgcaagattttcaactcgatgccgcaatgacctactgtagagctgccagacagctggttgagaaagagaagtatagtgagatccaacaactgctgaagtgcgtgagcgaaagcggcatggcggcaaagagcgatggtgacacgatacttctgaactgtctcgaggcgttcaagcgaatacctcctcaggaactggaagggctcatccaggccatacacaacgatgataataaggtgagagcatatctgatatgttgtaagctccgcagtgcctacctaattgctgtgaagcaagaacactcacgcgcaactgcactggtacagcaggtacaacaggccgctaagtccagcggagacgccgtagtacaggacatctgcgcccagtggctcttgacctcccacccacgtggcgcacacgggcctggttcccggaagta

SEQ ID NO: 247922 - DNA, 7556 bp, synthetic construct
  misc_feature 1..7556: note = Description of Artificial Sequence: Synthetic coding sequence
  source 1..7556: mol_type = other DNA
atgaaccacccgtttgggaaagaggaagcggcatcccagaagcaactgtttgggttcttttgtgagtgcctgaggcgcggtgaatgggaactcgctcaggcttgtgttccccagctgcaggaaggacagggcgacattccaaagcgagttgaggatattcttcaggccttagttgtatgccctaacttgctcagatgtggacaagatataaacccccagcgtgtggcctgggtctggctgcttgttctcgaaaagtggctcgctcgtgagaaaaagctgttgccggtggtgtttcgtcggaaattggagtttctactcctgtccgaggaccttcagggcgatatcccggaaaacatcctagaggaactgtacgagaccttgacgcagggggctgtcggacatgtccctgatgggaacccgcgacgggaatcctggacacccagactctcaagtgaagccgtaagtgtgctctgggatctgttgaggcagagtcctcaacccgctcaggccctcctggagctgctgttggaggaggatgatggcacagggctgtgccactggcctctgcaaaacgcgttggtcgacctgatacgtaaggcactgaggaccctgcgatgtccagctgagcctttgggagtggagctgcacctgttatgtgaggagctgctggaggcatgtcggacagaagggtcacccttgcgagaagaaaggctgctttcatgcctgttacacaaggctagcagaggactactatccctgtacggccacacatacgcagagaaggtgacagaaaaaccccctagagcaacagcttcaggaaaagtgtcgcccgatcatctggatcctgaaagggcgatgctggcactcttcagcaacccaaatcccgcagaagcctggaaagtggcatatttctattgcctgagcaacaacaagcacttccttgagcaaattctggtgacagcacttaccctgcttaaggaggaagactttcccaatctcggctgcctgctggaccgcgagtttcgtcccttgtcctgtttgctggtactgttgggttggacacattgtcagtcacttgaaagcgctaagcgtctgcttcagacacttcatcgaacacagggtcccggttgtgacgagcttctgcgggacgcttgcgatggcctatgggcgcacctggaagtattggaatggtgcatacagcagtcttcaaatcccattccaaagcgggacctgttgtatcatttacacggcggagattctcactctgtcttatacaccctgcaccacttgacaaacctcccagcacttagggaggaggacgttctgaagctcttacaaaaggtgccagccaaagacccacaacaggagccggacgccgtggatgctccagtcccagagcacctctcacagtgccaaaatttaaccctttatcaaggcttttgcgccatgaagtacgctatctacgcgctgtgcgtgaacagccaccagcattcccaatgccaggattgcaaagactcgctgtcagaggacctggcttccgccacagaaccagcaaatgactctcttagtagccctggcgctgcgaatcttttttctacgtatctggcacggtgccagcagtacttgtgtagcatcccagattctctctgtctggaacttctggagaacatcttctccctccttctcatcacctccgcagatcttcatcctgagcctcatctgcctgaagattacgcagaagatgacgacatcgaagggaagagcccttccggcctgcgaagcccatcagaatcaccgcagcacatagcacacccagagagaaaaagcgagcggggatccctcggagtgcccaaaaccttggcctacaccatgccttcacatgttaaagccgagcccaaggatagttaccctggaccccacagacattccttcctcgacctcaaacactttaccagtggaatctccgggttcctggcagatgagttcgctattggcgcattcctgagattgctccaggagcagttggatgaaatttccagccggtcacctccagagaagcctaaacaggagagtcagagttgttccgggtcccgggacggcctccagtcacggctccatcggcttagcaaagtagtaagcgaggcacagtggagacataaggtcgtcacctcgaaccacagatctgaggaacagccctcgaggcgatatcagcctgcaacaaggcacccttctttgcggaggggcagaagaacccggagaagccaagcagacggccgagataggggctctaatccttcgctggagtccacctcttccgaactcagcacatctacatccgagggaagcctgagtgcgatgtctggcaggaacgaactgcatagccgcctgcacccacatccacagagcagcttaatcccgatgatgtttagcccccctgaatcactgttagcaagctgtatactgcggggaaactttgcagaggctcatcaggtgctctttacatttaacctaaagtcttccccgtccagtggagagctcatgtttatggagcgctatcaggaggtgatacaagaacttgcacaggtagagcataagattgagaaccagaatagcgatgccggatcatcgacaatccggaggaccggtagcgggaggagtaccctgcaggccatcggtagcgctgccgcagctggcatggtgttctacagtatctccgatgtcaccgacaagttactgaacacaagcggggaccctatccctatgctacaagaagacttttggatctcaaccgccctggtcgaacctaccgcacccctccgagaagtacttgaagaccttagtccccctgcgatggccgcatttgacctggcttgtagtcaatgccagctgtggaagacttgcaaacagttactcgagaccgcggaaagacggttgaactctagtctggaaaggagaggcaggagaatcgaccatgtcttgctcaatgccgatggcattagggggtttccagtcgttctgcagcagatttcaaaatccctgaattacctgctaatgtcagctagccagacgaaatccgagtcagtggaagagaaaggaggaggccctcctcggtgttctattactgagctgctgcagatgtgttggccttcactgtccgaagattgtgtcgcatcccacaccactctgagccagcagctggaccaggttttacagtctctcagggaagctttagagttgcctgaaccacgtacacctccacttagcagtctggtcgagcaggctgctcagaaggcccctgaggctgaagcccaccctgtccaaattcagacccaactgctgcagaagaacctcggcaaacagacaccatccggaagccgtcagatggattatctcggcacatttttttcgtactgcagtactcttgccgctgtgctgctgcaatccctaagttcagagccagatcatgtggaggtgaaggtgggcaatccctttgtcctattgcagcaatctagtagtcagctggtgagtcatctgctgttcgagaggcaggtgcccccagagcgacttgcggctctgctagcacaggaaaacctcagcctgagcgtcccacaggttatcgtgtcgtgttgctgtgagcctctcgccctctgtagcagcaggcaaagccaacagacctctagtctcctgacccgcctgggcaccctggcccagctacatgcttcacactgtcttgacgatctgccgttgtcaacaccctccagccccaggaccactgagaacccgactctggagagaaagccgtactcctcccccagagactccagtttaccagccctgacctcgtcggcactggcatttttaaaatcaaggtctaaacttctggcgacggtcgcctgcctgggcgcatcaccaagactgaaagtttcgaaaccctcgctgagctggaaggagctgcgtggtcggagagaggttccgcttgccgcagagcaggtcgcaagagagtgcgagagacttctcgagcaattccctcttttcgaggcgtttttactggccgcatgggaaccactacgcggaagcctccaacagggacaatccttagcagttaacttgtgcggctgggcctccctgtctacggtgctgctggggctgcattcacccatagccctggacgtgctgagtgaagcctttgaggagagtctggtcgctagggattggagtagggcgctgcaattgaccgaagtgtacggaagagatgttgatgacctgagctctatcaaagatgcagttctgagctgcgccgtggcgtgcgacaaggaggggtggcagtatctgtttcccgtgaaagacgcctcccttcgcagtcgtctggccctccaatttgtggacaggtggcctctcgagagctgtctggaaattttagcatactgcatctcggatactgcagtgcaggaaggcctcaagtgtgagctccagcgaaagctggcagagctacaggtataccagaagatcctcggactccagtctcccccagtgtggtgcgactggcagaccttaaggtcatgttgcgtggaggacccaagcactgttatgaacatgatactggaggcccaggaatacgagctgtgcgaagaatggggttgcctgtacccgatccccagagagcatctgattagcttacaccagaaacacttactgcacctgcttgaacggagggaccatgataaagcactgcagcttctgaggcgaataccggatcccactatgtgtttggaggtgacagaacagtcactggaccagcacacctcgcttgctacgagccacttcctggcaaactacttgaccacccacttttacggacaacttaccgctgtccgccacagggagatccaagccctctacgtgggaagcaaaatactgctgacgctgcccgaacagcacagagctagctacagtcacctctcatccaaccccctgttcatgctggaacagctgcttatgaacatgaaggtcgattgggcaacagtcgcagtccagacactgcagcagctgcttgtgggacaggagatcgggttcacaatggacgaagtggactcactcttatcccgatacgcagagaaggccttggactttccctacccgcaacgcgaaaagcgaagcgactcagtcatccacttgcaggaaatcgtgcatcaggctgcagaccctgagaccctccccaggtctccatccgctgaattcagcccggctgctccccctggcattagtagcattcattctccttctttgcgggagaggagctttcctcccactcaaccttcacaggagtttgtgccgcctgctaccccacctgcgagacatcagtgggtgccagacgagacagagagtatatgtatggtttgttgtcgggagcactttaccatgttcaatcgtagacatcattgccgcagatgcggcagattagtgtgcagctcctgctcgacaaagaagatggtggtggagggctgtcgggaaaaccccgctagggtgtgtgatcagtgctacagttactgcaataaggatgtccccgaagaaccgtccgaaaaacccgaggccttagactcttccaaaaatgagtcacccccttattcctttgttgtccgcgtgcctaaggcagatgaagttgaatggattctggacttaaaggaagaggagaatgaactcgttcggtcggaattctattatgaacaggccccaagcgcatccctgtgcatcgctatacttaatcttcacagagattctattgcctgcgggcatcaacttattgagcactgctgcagattatcaaagggactcactaatcctgaggttgacgccggtttactgactgatatcatgaagcaactcctcttttcagctaaaatgatgttcgtgaaggctggtcagagtcaggatctggccctgtgcgactcttatattagcaaggtggacgtcctgaatatactcgtcgccgcagcctaccgccatgtgccctcccttgatcagatactccaaccagccgcagtgacccgtctgcggaaccaacttcttgaagccgagtactatcaacttggggtcgaggtcagtacaaagacgggcctggacactacgggggcttggcatgcttggggaatggcctgtctgaaagccggaaatttaaccgctgccagggagaagttttctcgatgtctgaaaccccctttcgacctgaatcagttaaatcacggttcccggctggttcaggacgttgttgagtacctggaatctactgtgaggccattcgtatctctgcaggacgacgactattttgccactttgagagaactcgaagccaccttaaggactcagagtttatctttggcagtcatccctgagggcaagattatgaataacacatactaccaggagtgcctattctacctccataattattctactaacctcgcgatcatcagcttctatgtgcgtcacagctgccttagagaagccctcctccaccttctgaacaaagagagtccccctgaagtttttatcgaagggattttccaaccaagctacaagagcggaaagttgcacactctggaaaatttactggagtctatcgaccctactcttgagtcctggggcaagtacctcattgccgcttgtcagcatttgcagaaaaagaattattatcacattctgtacgaactgcagcagttcatgaaggatcaggtcagagccgctatgacctgcatccggttctttagtcacaaggcaaagtcttacacggagctcggcgagaagctcagctggttgctgaaagctaaagatcacctgaagatttacttgcaggagacctcccgttccagtggccgaaagaaaaccactttcttccgcaagaagatgacggcagctgacgtgagtaggcatatgaatacattgcaacttcagatggaggtgacccggtttctccacagatgcgagagcgctggaacatcacagataaccaccctgccactaccaaccctcttcggtaataatcacatgaaaatggatgttgcctgtaaggttatgctgggcggtaagaacgtggaggacggctttggtatcgctttccgcgtgctgcaggacttccagttagacgcggcaatgacatactgtcgggcagccaggcagctagtcgagaaagagaaatacagcgagattcagcagctgctaaaatgcgtctcggaaagcggcatggcggctaagagtgacggcgatacgatcctcctcaactgcctcgaagcctttaagcgcattcccccacaggaattggaagggctgatacaggcgatacacaacgacgacaataaagtccgagcttacctgatctgctgcaaactgcgctctgcatatcttatcgcagttaaacaggaacactcgcgggcaactgcgcttgtgcagcaggtacaacaggctgctaagagctctggagacgctgtggtacaggatatttgcgctcagtggctgctaaccagtcatcccagaggagcccatggcccaggatctcgaaagta

SEQ ID NO: 247923 - DNA, 1119 bp, synthetic construct
  misc_feature 1..1119: note = Description of Artificial Sequence: Synthetic coding sequence
  source 1..1119: mol_type = other DNA
atgcagacgtctgaacgcgaagggtcagggccagagctctcccctagtgttatgcctgaggcaccgctggagtctccgccattccccaccaagtcccccgctttcgacctgtttaacttggttttgtcgtataagagactagagatatacctggagccgctgaaagacgccggagcctggtattcagtcggcgcattgatgatctcagtccctgctttgctgggttacttgcaggaagtttgcagagctcggctacctgactctgaactgatgagacggaagtaccattccgtaaggcaagaggatctgcagagagggcgactgtctcggccagaagcagttgccgaagtaaaatcctttctgatccagctggaggctttcctgagcagactgtgctgcacctgtgaagctgcgtatcgggtgctgcactgggaaaaccctgttgtgagttcacagttttatggcgctttgctcggaaccgtgtgcatgctgtatcttctccctctatgttgggtgttaaccctgttaaactcgacgctgtttcttggaaacgttgaatttttcagagtggtgtccgagtaccgagccagtctccagcagcgtatgaatcctaagcaggaggaacacgcatttgagagcccgccacctccggacgtgggaggtaaagacggcctcatggacagcacccccgctttaactcctacagaggacttaacgccgggaagtgtggaagaagcagaagaggccgaacccgacgaagagtttaaagacgctatcgaggaggacgacgagggcgcaccttgcccggctgaagatgaattagccctccaagacaatggttttctctcaaagaatgaggtccttcggtccaaggtctcaaggctgactgagcggcttagaaagaggtaccccacgaataattttgggaattgcactggctgtagcgctacatttagcgtcctcaaaaaacgcagaagctgctccaactgcggcaattccttctgctcccggtgttgttcatttaaggtgccaaaatctagcatgggcgcaacagctccagaagctcagcgcgagactgtgtttgtttgcgcctcctgcaaccaaacgctatccaaatag

SEQ ID NO: 247924 - DNA, 1251 bp, synthetic construct
  misc_feature 1..1251: note = Description of Artificial Sequence: Synthetic coding sequence
  source 1..1251: mol_type = other DNA
atgcaaacctctgagagggagggatcaggaccagaactgtctcctagcgtgatgccagaggccccactcgaatcccctcctttccccactaagagcccagctttcgacctgttcaacctggtgttgtcctacaaaagactcgagatctatctcgagcccctgaaggacgccggagacggggtgagatatttgctgaggtggcagatgccattatgctctctgttgacgtgcctcggactgaatgttctgttcctgaccctaaatgaaggtgcgtggtattcagtcggcgcacttatgatatcagtacccgcactgctgggatatcttcaagaagtttgccgggctagactgcccgactccgaattgatgcgcaggaagtaccattccgtgcgccaagaggacctgcagagaggtcggttgtcccgccctgaggctgtggccgaagtgaagtccttcctgattcagttggaagcattcctgagcaggctgtgttgtacttgtgaggccgcttatcgggtgttgcactgggaaaaccctgtggtgagctctcagttctacggggcactgcttgggaccgtgtgcatgctctatctcctcccactgtgctgggtgctgacccttctcaatagtacactgttcttgggcaacgtggaattctttcgggtggtgagcgagtatcgggcaagcttgcagcaacgaatgaaccccaaacaagaagagcacgcttttgagtctccgccaccccctgatgtgggcggtaaggatggcttgatggactctacccccgcattgacccccacagagtcgttgtcgagccaggacttgacacctggaagcgtggaggaggcagaggaagcagagcccgacgaggagttcaaagatgctattgaagagacccatctagttgttctggaggatgacgaaggtgcaccttgccccgctgaagatgagctggccctgcaggacaatggattcctgtctaaaaatgaggtactacgcagcaaagtgtctcgactgacggagcggcttcggaaaagatatccaactaacaatttcgggaattgcaccgggtgcagcgcaacatttagcgttttgaaaaagcggagaagctgcagcaactgcggaaattcattttgctccaggtgttgctcgttcaaagtgcctaagagctccatgggggcaactgctcctgaggcgcagcgggagaccgtgttcgtctgcgccagttgtaatcagacactgtctaagtag

SEQ ID NO: 247925 - DNA, 957 bp, synthetic construct
  misc_feature 1..957: note = Description of Artificial Sequence: Synthetic coding sequence
  source 1..957: mol_type = other DNA
atgcagacttccgaaagagagggctccggcccagagttaagcccctctgtaatgcccgaggcccctctggagtcacccccatttccgacgaaaagcccagcatttgatctctttaaccttgtcttgagctacaagcgtctggaaatctatctggagcccctcaaggacgccggagatggggtaaggtatctgctttccttgattcagctggaggctttcttatccagactatgctgtacatgcgaggccgcatacagagtgctacactgggagaacccagtcgtctcctcccagttttacggagctctgctcggaacggtttgcatgctgtacctgctcccactttgttgggtgctgaccctcctgaatagcacgctgttcctgggtaatgtagaattttttcgcgtagtgtcagagtaccgagccagcctgcagcaacgcatgaatcccaagcaagaggagcacgcgttcgagtccccgccacctccggacgttgggggaaaggacggcctgatggactctacccccgctttgaccccaacggaggatcttacccccggaagcgtggaagaagctgaggaggctgagcccgacgaggagtttaaggatgcaattgaagaggatgatgaaggagctccctgcccagctgaggacgaactcgctcttcaggataacggattcctgagcaaaaacgaagtgctcaggtctaaggtaagcaggcttacagagcgtctgagaaagcggtatcccacaaacaacttcggtaactgtaccggctgcagtgccaccttcagtgttctcaagaaaagaaggagttgctctaactgcggcaattccttctgttcaaggtgttgctctttcaaagtgcccaagagtagcatgggcgctactgcccctgaagctcagcgagagacagtgtttgtgtgtgcctcctgcaaccaaacgctatccaaatag

SEQ ID NO: 247926 - DNA, 1215 bp, synthetic construct
  misc_feature 1..1215: note = Description of Artificial Sequence: Synthetic coding sequence
  source 1..1215: mol_type = other DNA
atgcaaacctcagagagagagggcagtggccctgaactctccccatccgtaatgcctgaagcacccctagaatcccccccatttcccaccaagagtccagctttcgacttgttcaatcttgtcctgagttataaaagactggaaatatacctggaaccgctcaaggatgccggtgacggggtccgttacctgttgcgctggcagatgcctctctgcagtctcctgacgtgtctagggctgaatgtcttgttcctgacactgaacgagggcgcatggtactccgtcggtgctcttatgatctccgtgccagcactgctgggatatctgcaggaagtttgtagggcccgtctcccagattcggagctcatgcgcaggaagtaccactcggtcagacaggaagatctccagagaggcagactgtcacgccctgaggccgtggctgaggtgaagagctttctgatccagctagaggcattcctgagtcgactctgttgtacatgtgaggctgcgtaccgggtactgcactgggagaaccccgttgtaagttcgcaattttacggtgctctgcttggaacagtttgtatgctgtacctgctgcccctgtgctgggttctgacccttctgaatagcaccctgtttctcggaaatgtggagttttttagggtcgtatctgagtacagggcctcattacaacaacgaatgaatcccaaacaagaggagcatgcatttgaatctcctcccccacccgacgtcggagggaaggatggcctcatggacagcacccctgccctgactcccacggaagacttgacccctgggagtgtggaagaggctgaagaggctgaacccgatgaagagtttaaggacgcgatcgaagaagatgacgaaggggcaccttgcccagccgaggatgagctggcgctgcaggataacgggtttctgtctaagaacgaggtgctgaggagcaaagtttctcggcttactgaaagattgcggaagaggtaccccaccaacaattttgggaactgtacaggctgttcagccacattttccgttctgaagaagagaaggtcatgttctaattgcggcaactccttctgtagccgatgctgcagctttaaggtgcccaaaagcagtatgggggcaacagcgccagaagcccagcgagaaactgtgtttgtttgcgcttcttgcaaccaaaccctgagtaagtag

SEQ ID NO: 247927 - DNA, 936 bp, synthetic construct
  misc_feature 1..936: note = Description of Artificial Sequence: Synthetic coding sequence
  source 1..936: mol_type = other DNA
atgatcagcgttcctgcactgttgggttatctgcaggaggtgtgtagggcaagactccctgatagtgaactcatgaggaggaaataccactcggtgaggcaggaagacctgcagcgcggtcgcctgtcccgcccagaggccgtagcggaggtgaagtcctttttgattcaattggaggcattcctgagccgattatgctgcacctgcgaagcagcgtaccgggtcctccattgggagaaccccgtggtctccagtcagttctatggtgcacttctcggcactgtttgcatgctctatctgttgcctctctgttgggtgctgaccctgctcaactccactttgttcttgggaaatgtcgaattttttcgagtggtctcagagtacagggcctccctgcagcagcggatgaacccgaagcaagaagagcacgccttcgagagtccaccaccacccgatgtgggaggaaaagatggtctgatggactctacaccggctttgacacccacggaatccttgagctcacaagatctgacgccgggatcagtggaggaggcagaagaggctgaaccggacgaggagttcaaggatgcgattgaggaggacgatgagggcgctccgtgtcctgctgaggacgaactggcactgcaagataatggcttcttaagtaagaatgaggtgttgaggtccaaggtaagccgacttactgagagattaaggaagagataccccaccaacaattttggcaattgcacaggatgctccgcaaccttctctgtcctgaagaaaagacggtcttgctcaaactgtggcaattcattctgcagtcggtgttgcagcttcaaagtgcccaaaagttccatgggagcaactgctcccgaggctcaacgggaaactgtgttcgtgtgcgctagttgtaatcagaccctttctaaatag

SEQ ID NO: 247928 - DNA, 861 bp, synthetic construct
  misc_feature 1..861: note = Description of Artificial Sequence: Synthetic coding sequence
  source 1..861: mol_type = other DNA
atgcaaacatccgagcgggaaggaagcggccctgagctttcaccttcagtgatgccagaggcgccattagaaagtcctccgtttcctaccaaatctcccgcatttgatctattcaacctggtcctgtcctacaaacgtctggagatctacttagaacccctcaaggacgcgggagatggcgtccggtatctgctcagattttatggagccttgttgggcacagtgtgcatgctgtacctcctaccgctttgctgggttctcaccctattaaattctactctgtttttgggaaatgttgaattcttccgggtagtttcggaataccgcgcttcactgcagcagcggatgaaccctaagcaggaagaacatgcatttgagtcgccacctccccctgatgtgggtgggaaagacggtctgatggattccacccccgcattgacgcctactgaagatctgacgccaggtagtgtggaggaggctgaggaggcagaacccgacgaggagtttaaggacgctatcgaggaagatgatgagggcgcaccatgtcccgctgaggatgaactggccctgcaagacaatggtttcctgtctaaaaatgaggttctccgctctaaagtgtcaaggctcactgagcgccttaggaagagatacccaacaaataactttggcaactgcacaggatgctcagccactttctccgtactgaagaaacgcagaagttgttccaactgtgggaattccttttgtagccgctgttgcagcttcaaggtcccgaaaagcagcatgggcgctactgcacctgaggcccaacgcgaaaccgtgttcgtatgcgcctcttgtaatcagaccttgagtaaatag

SEQ ID NO: 247929 - DNA, 1236 bp, synthetic construct
  misc_feature 1..1236: note = Description of Artificial Sequence: Synthetic coding sequence
  source 1..1236: mol_type = other DNA
atgcagacatccgagcgcgaggggtcaggacccgagctgtccccaagcgtaatgccagaggcaccccttgagagcccaccgttcccaacgaagtctccggcttttgatctgtttaatctggtcttgtcttataaaaggctagaaatctacttggagccattgaaggatgcaggcgacggggtgcggtaccttttaagatggcagatgcctctttgctccctgctgacttgtctggggttgaatgtgctgttcttgaccttgaatgagggtgcttggtattcggtcggggcactaatgatttctgttcccgcactgttagggtatctccaagaagtgtgccgggctcgcctgcccgactcggaactgatgcgcaggaaataccactcggtccggcaggaagacctacagcggggaagactctcccgcccagaggcggtggcggaggttaaaagcttcctgattcagcttgaggctttccttagcaggctctgctgtacgtgtgaggccgcataccgggtgctgcactgggaaaaccccgttgtgtctagtcagttctacggtgcccttctagggacggtgtgtatgctttacttactgccgctgtgctgggtgctcacactccttaacagtactctgttcctagggaacgtcgagttttttagggtggtcagcgagtaccgggcaagcctgcagcagcggatgaatcccaagcaggaggagcatgcctttgaatcacctcctcctcctgatgtcggcggtaaggacggccttatggatagcacccccgctttgactcctactgaagatcttacccccggttctgtggaggaggccgaagaggctgaacccgatgaggagtttaaagatgccattgaggagacacatctggtcgtgttggaggacgacgaaggggcaccctgtcctgctgaggacgaactagccttgcaggataatgggttcctgtcgaagaatgaggtgctgcgttccaaggtgtccaggctgacagaaagactgcgtaaacgatatccgaccaataacttcggaaattgtaccggttgcagtgcgaccttttctgtgttaaagaagagacggtcctgctcaaactgtggtaactctttctgctcaagatgttgttcttttaaggttcccaagtcaagcatgggcgcaaccgcccctgaagcccaaagggaaacagtgttcgtgtgcgcatcctgtaatcagaccctgagcaagtag

SEQ ID NO: 247930 - DNA, 1185 bp, synthetic construct
  misc_feature 1..1185: note = Description of Artificial Sequence: Synthetic coding sequence
  source 1..1185: mol_type = other DNA
ttagagagcccacctttcccgaccaagtcccccgctttcgacctgtttaatctcgtgctatcatacaagcgcctggaaatctacctggagcccctgaaagatgccggagacggggtaaggtatcttctacggtggcagatgccgctgtgctccttattaacctgtcttggtctcaacgtgctgtttttaaccctgaacgagggcgcttggtatagtgtaggcgcattaatgataagcgtaccggcattgctcggataccttcaagaggtatgccgggcacggcttccggactcagagttaatgcgcaggaagtaccattctgtaagacaggaagatttgcagcggggaagattgtcccgaccagaggcagtggcagaagtgaaaagcttcctgatccagctcgaggcattcttatctcggctgtgttgtacttgtgaggctgcttaccgagtcctccactgggaaaacccggttgtgtctagccagttctacggggcattgcttggaaccgtttgtatgctgtaccttctgccactttgctgggtcttaacactacttaattcaacactattcctcgggaacgtagaatttttccgagttgtttctgaatatcgtgcatctctgcagcagcgcatgaaccctaagcaggaggagcatgcctttgagagccctccccctcccgatgttggaggcaaggatgggctgatggactcaactcctgccttaacccctacagaatccctgtcaagccaagacctgactccagggagcgtggaagaggccgaagaggccgaacccgatgaagagttcaaggatgcaatcgaagagactcacctggtggttctggaggacgacgaaggggcaccttgccccgctgaggacgaacttgccctccaggataacggctttctgagtaaaaatgaggtgctgaggagcaaagtgtctaggctgacggaaaggctgagaaagcgttatcctactaataactttggcaactgcaccggctgttcggccacattctccgtgctcaaaaagagaagatcttgctctaattgtggcaattcattttgcagtaggtgttgctctttcaaagtgcctaagagttccatgggagctacagcccctgaagctcagcgagagactgtgttcgtctgcgctagctgcaaccaaactctgtctaagtag

SEQ ID NO: 247931 - DNA, 1047 bp, synthetic construct
  misc_feature 1..1047: note = Description of Artificial Sequence: Synthetic coding sequence
  source 1..1047: mol_type = other DNA
atgcagacaagtgaaagagagggaagcggcccagagctgtctcccagtgtgatgccagaagctcccctcgaatccccgccatttcccactaaatctccggcatttgacctgtttaacttggtcttaagttacaagcggctggaaatctacctcgagcccctgaaggacgccggtgacggcgtccgctacctccttcggtggcaaatgcctctttgtagcctactcacatgcctgggcttgaatgtgctgttcctgactctaaacgagggagcctggtactccgtcggagcacttatgatctctgtaccagctctgcttgggtatctgcaggaggtgtgccgagcccgacttccagactcggaattgatgcgcaggaagtaccatagcgtccggcaggaggacctccagaggggaagactctctcggcctgaagccgtggcagaggtcaagtcgtttttgatccagttagaagccttcctctcccgcctgtgttgtacatgcgaagcagcttacagagtcctgcactgggaaaaccctgtcgtgtcgtcccagttctacggggctttgctgggaacagtttgcatgttgtatttgctcccactgtgctgggttcttaccttactaaactccacattattcctgggtaacgtggaattcttcagagtggttagtgagtatcgggcttccctgcaacagagaatgaacccgaagcaggaagaacacgcttttgagagccctcctccccctgatgtgggaggtaaggacggcctgatggactctactcccgctctcacccctaccgaggatctgacgccaggctctgtcgaggaagcagaggaagctgaaccagatgaggagttcaaagacgccattgaggaagatgacgagggagctccctgccccgcagaagacgagctggccctgcaagacaacggattcctttcgaaaaacgaggtgctgcggtccaaggtgtcacgtttaaccgagcggttgcgaaaacgctatcctactaacaatttcggggtcaccggtgccggtagttcatag

SEQ ID NO: 247932 - DNA, 2664 bp, synthetic construct
  misc_feature 1..2664: note = Description of Artificial Sequence: Synthetic coding sequence
  source 1..2664: mol_type = other DNA
atgatgaatagattccgaaaatggctgtataaaccaaaaagatctgacccacaactgcttgcacggttttactatgccgatgaggagctgaaccaggtggccgctgaattggactctctcgacgggagaaaggatccacagcggtgcaccctgctcgtgtcccaattccgttcatgccaggataacgtgctgaatatcatcaaccagatcatggatgaatgtattcctcaagatcgtgccccacgcgatttctgcgtgaaatttcctgaggagatacggcacgacaacctcgccggacaactgtggttcggtgcagagtgcctggctgctggctccataatcatgaatcgagaattggagtccatggccatgaggcccctggcaaaagagttaaccagaagtttggaggacgtgcgcggagccttacgggaccaggcccttagagacctgaatacgtacaccgagaagatgagggaggccttgaggcatttcgatgtgctgtttgcagaatttgaactgagctatgtgtccgccatggttcctgtgaagtccccaagagagtattacgtacagcaggaggtgatcgtgctgttctgcgaaaccgtcgagcgcgctctcgacttcgggtatttgacccaagatatgattgatgattatgagcccgcactgatgttttccatccctcgcctggccattgtctgcgggcttgtggtgtatgcagatggcccacttaatctcgatcggaaagttgaggatatgtccgagctgttccggccattccacaccttgttaaggaagataagagatctgctgcagacactcactgaggaagagctgcacacgctcgagcggaacttgtgtatctcacaggacgtggagtttcccatcagggcagacgtacagggccctgcggctctcgctcctgcactatccgccccactcccacccgaaggtccacttagcgccaaggccaaagatcccgacgctgagttggcctgctctatgcagtatgacgatcaggaactagagcagcttagccggatggtgcatagagcgggtgatgagatgagctctttgctctccccacctatagcctgtcaaagccctgcccaccgcccaggagctgaagggtcccccggaggcgaggccagccctggcagacctagactgagatcaggtagcgatgaggaggaacgggttttttttatggacgacgtggagggcacggccgaggctcttgcacgccctgagtcccccgcaggtcccttcggctgggctggttctacttgggcagacccacaggagaaaggccagggtggaccaggcggagctgctggcatcagcctgcctgcctccgagaaggaagaggacctgtctaacaataatcttgaagccgaaggcacagacggtgcctccttggctggtacaagcagttgtagctgccttgactcgcgattgcacctggacggatgggaggtaggggctgacgacgcggagaccgccgaaatgattgctcaccgcactggtggaatgaagctgagcgcaacggtcatctttaatcccaagtctcctacttcgttggattccgccgtggccacacaagaggcagcaagcgagcccgtcgccgaaggcatggacggcggacctcataaacttagtaccggtgcgaccaactgcttgcttcatagttgcgtgtgttgcggcagctgcggagattctcgagaagacgtggtcgaacgcctgagggagaagtgctcccccggaggagtgatcggcgcttcatatgcagcaggcctggccaaagcgagtgatagggccccagaaaggcaggaagaggctcctccgccttccgaagacgcgtccaacggacgtgagcccaaggctccaacatccgataagtgtctcccccataccagcggcagccaggtggacacagctagtgggttacagggagaggctggtgtggcaggccagcaggaacctgaagcgcgagagctgcatgcgggttccccatccgcccatgaggcaccccaggcgctgtctggcagttcctcctcaaccgcagggtcctgttcttccgacaagatgggtcccgaggccgcaccagccgcaactcatgcagcaccacaggcaactcgagaaaaaattagatcgagatttcatggttcgcatgaccttattcatcggcttttcgtgtgcattagcggcgttgctgatcagctacagacaaattacgctagcgatctccggtccatcttgaaaacattgtttgaggtgatggccacgaagccggaaaccgacgataaggaaaagctccgcaaggtcacccagactctgagaagcgccgctctggaggactgtgcactttgccaggagactttgagctcctctgagctggctgccaagaccagggacggcgacttcgaggaccctccagaatgggtccctgatgaggcctgcgggttctgcactgcatgcaaggcaccctttactgtcattaggcgtaaacaccactgccgcagttgcggcaagatcttttgttctcgctgctcctctcacagcgccccattgccacggtatggccaagtgaaacctgtgcgtgtatgcactcactgctatatgtttcatgtgacaccattctattccgacaaggctgggctatag

SEQ ID NO: 247933 - DNA, 2574 bp, synthetic construct
  misc_feature 1..2574: note = Description of Artificial Sequence: Synthetic coding sequence
  source 1..2574: mol_type = other DNA
atgatgaatcgctttaggaagtggctgtacaagcctaaaaggtcggacccacagcttttggccaggttctactacgccgatgaggagcttaatcaggtggccgcagagctggattccttggacgggaggaaagatcctcagcgatgtaccctgctggtgtctcagttccgctcatgccaggacaacgtccttaatatcatcaatcagataatggacgagtgtatcccacaggaccgggcaccgcgagatttttgcgtcaagttccctgaagagatcagacatgacaatctggccggacagttatggttcggagccgagtgcctcgccgctggctccattattatgaatcgagagctggagtccatggctatgcggcctttggccaaagagttgactcggagcctggaagatgttcgtggagcactaagagaccaggccctccgcgaccttaacacatataccgaaaaaatgagggaggccctccgccatttcgacgtgctttttgccgagttcgagctatcttacgtatcggcaatggtcccagtcaagtcccctagggaatactacgtccagcaggaggtgattgttctcttttgtgaaacggtggaatccggcctggtggtctatgccgacggccctctcaacttggatcgtaaggtggaagacatgagcgaactgttccgtccttttcacaccctcctgcgcaagattagggatctgctgcagacactgaccgaggaggaactgcacaccctggagcgcaacttgtgtattagccaagacgtggagttcccgattagggccgacgtgcaggggcctgccgctcttgcccctgcccttagcgcgcctctgcctcctgagggaccactgtccgctaaggctaaggacccggacgctgagctcgcctgctctatgcagtatgacgaccaagagctggagcagttgagtcgtatggttcatcgtgccggtgatgagatgtcttctctccttagcccaccaatagcatgccagagtcccgctcataggcctggggcagagggtagccctggaggtgaagctagccccggaagaccccgtctaaggtccggctcagacgaggaggagcgagtcttcttcatggatgatgtggaggggacggccgaggcactggccagaccagaatctccagccggaccttttggttgggccggttcaacttgggctgatccacaggagaagggtcaggggggacccggtggcgctgcaggcatcagcctccccgctagcgaaaaggaggaggatctgtcgaataacaacctagaggccgagggcaccgatggcgctagccttgccggaacgtccagctgttcatgcctagactccagattgcacttagacgggtgggaagtgggggctgacgacgccgaaaccgcagagatgatcgctcacagaacagggggtatgaagctcagtgctacagtgatcttcaacccaaaatccccaacttccctggactccgccgtggcaactcaagaggctgcctccgagcccgttgcggaaggcatggatggtggtccacataagctgtctactggagcaacaaactgtctgctccattcctgcgtgtgttgtggtagttgtggggacagtagagaggatgtagtggagaggctgcgggagaagtgttcaccgggaggggtcattggggcatcctacgccgcaggactggccaaagcatccgaccgcgcaccagaacgacaggaggaggcaccccctccttccgaggacgcctccaacggacgagaaccaaaggctccaaccagcgataagtgcctgccacatacatctggcagtcaggtagatacagcctccgggctacagggcgaagcaggtgtcgctgggcaacaggaaccggaggccagagagctacatgcaggtagcccaagtgcgcatgaagcaccacaggctctgagcgggtccagctcttccactgccggttcatgctcaagcgataagatgggacccgaggcagctcccgcagcgacacatgcagccccacaggcaacaagagaaaaaattagatccagatttcatggatcacatgatcttatccaccgtctctttgtgtgcatcagcggcgtggccgaccagctccaaactaactacgcttcagacctccgttctattctgaagacactctttgaggtaatggccacgaagccagaaacggatgataaagagaaactgcgcaaggtcacacaaactcttaggtccgctgctcttgaagactgcgcactgtgccaggagaccctatcgagcagcgagttagccgctaaaacacgggacggcgatttcgaggacccgccagaatgggtgcccgacgaagcgtgcggattttgcaccgcgtgcaaggccccattcactgtgatacgcagaaaacaccattgccggtcttgtgggaaaatcttttgctcccgttgttcaagccattccgctccattgcctagatacgggcaggttaagcccgtgagagtctgcactcattgctacatgttccatgttacacctttttacagcgacaaggccggtctctag

SEQ ID NO: 247934 - DNA, 2454 bp, synthetic construct
  misc_feature 1..2454: note = Description of Artificial Sequence: Synthetic coding sequence
  source 1..2454: mol_type = other DNA
atggacgagtgcatcccccaggatagggcgcctcgcgacttctgcgtgaaattccctgaagagataagacatgataacctggctgggcagctgtggttcggggctgagtgtctggccgctggttccattatcatgaaccgtgaactggagagtatggctatgcgcccactggcgaaggagctcactcgcagtctagaagacgtacgtggcgcattgcgtgatcaagcccttcgcgatctgaatacttacactgagaagatgagagaagcactgcggcatttcgatgtgctgtttgccgaatttgaattgagctacgtaagcgctatggtccctgtaaaatccccaagagagtattatgttcagcaggaagttattgtcttattctgtgaaaccgtggagagagctttagactttggttacctgactcaagacatgatcgacgattatgagcccgctctgatgttttcaattcctcgtctcgccattgtgtgcgggctggtggtgtacgccgacgggcctttgaacctggaccgcaaggtagaggacatgagtgaactgttccgtcctttccatacactgctcagaaagattcgtgatttactgcagacccttactgaagaagaactgcatacattggagaggaatctgtgcatctctcaagatgttgagttccccataagggcagatgtacaggggccagctgcactagcgcctgcactgtccgcaccgctgccacctgaaggccctctctcagccaaggccaaggacccagacgccgagctcgcttgcagtatgcaatatgatgatcaagagttggagcagctgagtcgtatggtccacagagctggagacgaaatgtcttccctgttatcaccgccaattgcttgtcagagccccgctcacaggcccggtgctgagggatcacctggcggagaagcaagccccggtcgaccgcgattgcggagtggatcagatgaagaggagagggtctttttcatggatgacgtcgagggaaccgccgaagccctcgcccgacctgaatctcctgccggtccatttggttgggctggctccacgtgggcagatcctcaggaaaaaggtcagggaggaccaggaggcgcagccggtatttctctgcccgcttcagagaaggaagaagatctgagcaataacaacctggaagcagaagggacagacggggcaagcctggctggtaccagttcctgttcatgtctcgattctagactccacctggacggctgggaagttggggctgacgatgctgaaacagctgaaatgatcgctcatcgaaccgggggaatgaaactctcagcaaccgtcatatttaaccccaagagtcctacgagcctcgacagcgccgtggcaacgcaagaggctgcgtccgaacctgtcgccgaggggatggatgggggtccccataaactcagtaccggcgcaactaattgtctactccactcatgtgtgtgttgcgggtcttgtggcgacagcagagaggacgtcgtcgagcgtttgagagagaagtgctcccctgggggagtgatcggagcttcatacgccgcaggactggcaaaggcgtccgatagagcccctgaacggcaagaagaggctcccccaccgagtgaggatgccagcaatggaagagagcctaaggctcctactagcgacaaatgtttaccccatacctccggctcgcaggttgataccgcgtccggactgcagggagaagcaggggtggcaggccagcaggaacccgaagccagggaactccacgcgggttcacccagcgctcacgaagcccctcaggccctgtccggtagcagcagcagtaccgcgggaagctgttctagcgataagatggggcctgaggcggcacctgccgcaactcatgcggctccacaggctactcgggagaagatccgatcacgattccacgggtcccacgacttaattcacaggctgttcgtttgcatttcaggcgtggccgaccagttacagactaattacgcgtcggatttgaggtcaatccttaagaccctgtttgaggtcatggcgaccaagcctgagacagatgacaaggaaaaactacgcaaggtgacccagacactaagaagtgctgcattagaggactgtgccctgtgtcaggaaactctctcttctagcgaacttgcagccaaaacacgagatggagatttcgaggacccccctgagtgggttcccgacgaggcttgtggattttgtacggcgtgcaaggctccttttacagtcatccgcaggaagcaccattgcaggagttgtggcaaaatcttctgcagccgttgcagtagccactccgcccctctcccccgatatgggcaggtgaagcccgtccgggtctgtacccactgttacatgtttcacgtcacccccttctattccgataaggcgggtctatag

SEQ ID NO: 247935 - DNA, 1212 bp, synthetic construct
  misc_feature 1..1212: note = Description of Artificial Sequence: Synthetic coding sequence
  source 1..1212: mol_type = other DNA
atggaacctgcagggccttgtgggttctgtccagctggtgaggtgcaaccggctcggtacacatgcccacgctgtaatgcgccttactgttcactccgctgctacagaacacacggcacctgcgccgagaatttctacagagatcaggtgctaggcgagttgcggggttgctctgcccctcccagcaggttggcttctgcgctgaggagacttaggcaacagagagaaactgaggacgagcctggcgaggctggcctgagtagcggcccagctccgggtggcctgtcgggtctatgggaaagactggctcctggtgagaaagcggcttttgagagactgcttagcagaggggaagccggtagactgctaccaccatggaggccctggtggtggaaccgcggagctggcccacagcttctcgaggaattggataatgctccaggatctgatgcagcagaactggagctcgcccctgcaaggacccctcccgactccgtgaaagacgcctccgccgctgagcccgcagctgccgaaagggtccttggcgacgttccgggtgcttgcacacctgtggtgcctacccgtattccagctatagtgagcctgagcaggggcccagtttcgccgttagtacgctttcagctgcctaacgtcctatttgcctatgcccatacactggcactctaccatggaggggacgacgcgttactaagtgatttttgcgctacacttctgggtgtttctggggcactgggcgctcagcaggtgtttgcatctgccgaggaagcattacaggctgccgctcacgtccttgaggcaggtgagcacccaccagggcctctgggaacacggggagctatgcacgaggtggcgaggatcctgctcggcgaaggccctacaaaccagaagggttataccttggcggcacttggtgatctggcacagacactcggcagggcccgaaagcaggccgttgcccgagaggagcgggatcacctatatcgagccagaaaaaaatgccagttcctgctcgcgtggacaaatgagaatgaggccgctctcacgcctctggccctggattgcgctagagcccatcaggctcacgccgtggttgcggaggaagttgcagcactcactggcgaactggagcgcctgtgggggggaccggtgccaccagcccctagaactttaatagaagaactgccctcatag

SEQ ID NO: 247936 - DNA, 1683 bp, synthetic construct
  misc_feature 1..1683: note = Description of Artificial Sequence: Synthetic coding sequence
  source 1..1683: mol_type = other DNA
atggcaggtccacagcctttggccttgcagttggagcaacttctcaatcctcgtccctccgaggcagatcccgaggcagacccagaagaggccaccgctgctagggtcatcgacaggttcgacgaaggtgaggacggcgagggcgactttttagttgtgggctctatcagaaagctggccagcgcctcactcctcgacacagataagcggtattgtggaaaaactacatctaggaaggcctggaatgaagatcactgggagcagaccctacctggatcttctgatgaagagatatccgatgaagagggaagtggagatgaggatagcgaaggacttggcctggaggagtatgatgaggacgacctaggcgctgctgaggaacaagagtgtggggaccacagagagtccaagaaatcccgatcacattcagcgaagaccccaggtttctctgtgcagagtatttccgactttgagaagttcactaagggcatggacgatctggggagttccgaagaggaggaggatgaagaatctggtatggaggaaggcgacgatgcagaggattctcagggagagagcgaggaagatagagcaggtgaccgaaactcggaggatgatggcgtggtcatgacattttccagcgttaaggtcagcgaagaggtggagaaaggaagggccgtcaaaaaccagattgccttgtgggatcagctgcttgaagggagaataaagctgcagaaagccctcctcaccactaaccagttaccacagcccgatgtgttccctttgttcaaggacaaagggggaccagagttctcttccgccctgaagaatagtcataaagcccttaaagcactattgcgtagcttggttgggctccaggaggaactgttgttccagtaccctgacactcgttacttagtagatggaacgaaacccaatgctggcagtgaggaaataagttctgaggatgacgagctcgtggaagagaaaaaacagcagcgcagacgggtgcccgctaaaaggaaattggaaatggaagattacccgtcatttatggccaagcggtttgctgatttcacggtctaccggaacaggacactccagaagtggcatgataaaaccaaactcgctagcggaaaactgggaaaaggattcggagccttcgaacggtccatactgactcagattgaccatattctgatggataaagagcgtcttctgcgcagaacccaaactaagaggagcgtctatcgtgtgctgggaaagcctgagcccgcagcacagcccgttcctgaaagtttacccggagagcccgaaattttgccccaggccccagctaatgcgcatctgaaggacttagatgaagagatatttgatgatgacgatttttaccatcagctcttgcgtgagttgatcgagcggaagacttctagcctggatcctaatgatcaagtggccatggggcgacaatggctggcgattcagaaactgcgttccaagattcacaaaaaagtagaccgaaaggcctctaagggcaggaagctccgctttcacgtgctgtccaaattgttgtcgttcatggccccaatcgaccacacgactatgaatgacgatgccaggacagaattatatagaagtctgttcgggcagctgcacccgcctgacgagggtcatggcgactag

SEQ ID NO: 247937 - DNA, 4134 bp, synthetic construct
  misc_feature 1..4134: note = Description of Artificial Sequence: Synthetic coding sequence
  source 1..4134: mol_type = other DNA
atggatacatccagcgtcgggggactagaactgactgatcagacgccagtactcctgggcagtactgcaatggcaacaagcctcacgaacgtgggcaactcattcagtgggccagccaatccattggtgtcacggtctaataagttccagaattcatcagtagaagacgatgatgacgtagtcttcatcgagcctgtgcagccccctcccccatccgtccctgtggtggcagatcagcgcacaataaccttcacttctagtaagaatgaagagctgcaaggtaatgactccaagataacgccttcgagcaaggagttagcttcccagaaaggaagcgtgtccgagaccatagtgatcgacgatgaggaggacatggagaccaatcagggtcaggagaaaaatagcagtaacttcatcgagaggcgccctcctgaaaccaagaacaggacgaacgacgttgacttcagcaccagcagtttcagcagatcgaaagtgaatgcaggcatgggaaattccggcatcactaccgagcccgattctgaaatacaaattgcaaacgttaccacacttgagacaggagtctcatctgtgaatgatggccagctcgagaatacagacggcagagatatgaatctgatgattacgcacgtcactagcctgcagaatacaaatctaggcgacgtctcgaatggactgcagtctagcaattttggcgtcaacattcagacctacactccctcactcacctcccaaactaagacaggtgttggaccctttaaccctggccgtatgaatgtggctggcgacgtctttcagaatggtgagtcggccacccaccacaatccagactcatggatttcccagtccgcttctttccctcgcaaccagaagcaacctggagtggactccctgtctccagtagcgagtttacctaagcagatcttccagccatccgtgcaacagcagcccactaagcccgtcaaagtgacctgcgctaattgcaagaaacctctgcagaaaggccagaccgcataccagcgcaagggctcagcccacttgttctgtagtaccacatgcctgagctctttcagccacaagcctgctcctaagaagttatgcgtgatgtgtaaaaaggacatcacaacaatgaagggtaccatcgtggcacaggtagatagtagtgaatcttttcaggagttttgctccactagctgcctttctctgtatgaggacaaacagaatcccaccaagggcgctttgaataagtcacgctgcaccatctgtgggaaactgacagaaatacgacatgaggtgagcttcaagaacatgacacataaattatgtagtgaccactgcttcaatcggtacagaatggctaatgggttgatcatgaattgttgtgaacagtgcggggaatatttgcccagtaagggcgcagggaacaatgtcttggtgattgatggccaacagaaacgcttctgttgccaatcgtgcgtgagcgagtataagcaggtcggatcccacccttccttccttaaggaagtgagggatcacatgcaggactcttttcttatgcagcctgaaaagtatgggaaactcactacctgtaccggttgcagaacacagtgccgtttctttgatatgactcagtgcatcggcccaaacggatacatggagccctactgttcaacggcctgtatgaattctcacaaaacaaagtatgctaaaagtcagagtctgggcataatctgccacttctgcaagcgtaactctttaccccagtatcaggccaccatgcccgatgggaagctgtacaacttctgtaactctagctgcgtcgctaagttccaagctttgtcaatgcagtcttctcctaatggccaatttgttgcaccttccgacattcaattgaagtgtaactactgtaagaactccttttgttctaaacccgagattctggaatgggagaacaaagtgcaccagttttgctccaaaacatgcagtgatgattataagaaattacattgtatcgtgacttactgcgagtactgtcaggaggaaaagacactgcatgaaaccgttaacttcagcggagtcaagcgcccattttgtagcgaagggtgcaaactgctatataaacaggattttgcacgacgtttaggcttgaggtgcgtgacgtgcaattactgttcgcagctgtgtaagaagggcgcaaccaaggaattagatggggtcgttcgcgatttttgtagcgaggactgctgtaagaagttccaggactggtactataaggcggctagatgcgactgttgtaagagtcaggggaccctgaaagagcgcgtgcaatggaggggcgagatgaaacatttttgtgatcagcattgcctccttaggttctattgccagcagaacgagcctaatatgaccacccaaaagggtcctgagaacctccactacgaccagggctgtcagacctcccgcacaaagatgacggggtccgctcctccacctagccccacccctaataaagaaatgaaaaacaaagccgtattatgtaagccgctcacaatgactaaggcgacctactgcaaacctcacatgcaaaccaaatcctgtcagactgacgacacttggcggacagagtacgtgccagtgccaatccctgtaccagtgtatatccccgtaccaatgcatatgtattctcagaacatcccggtgcccactacagtgcctgtgcctgtgccagtgcctgtgtttctgccagctcctctggatagctcagaaaagatcccagcagcaatcgaagaactgaaatccaaggtgagctccgatgctctcgacactgagctgctgaccatgaccgatatgatgagcgaggatgaaggtaagaccgagaccaccaacatcaattccgtgataatcgagacagacatcatcgggtccgacctactcaagaactctgaccccgagactcagtctagtatgcctgatgtgccctacgagcctgatctcgatatcgagattgattttcctcgggcagcggaggagctcgatatggaaaacgagttcttgctcccccctgtatttggtgaagaatatgaagagcaacctcggcctcgctccaagaaaaaaggcgctaagaggaaggcagtaagcgggtatcagagccacgacgatagttccgataattcagagtgctcatttccttttaaatacacatacggggttaatgcttggaaacattgggtgaaaaccagacagctggatgaagacctgctggtgctggacgaactcaagagctccaaaagtgttaaactcaaggaggatctgctcagtcacaccacggcggaactgaactatgggctggcccattttgtgaacgagattcggcgtcctaatggtgagaattacgctcccgattctatctattacctctgtctcggcatccaggaatatttgtgtgggagtaatcgaaaagacaatatcttcatcgatcccggatatcagacattcgagcaggaactgaacaaaattttacgctcatggcagccaagtattctgccagacggaagcatcttcagccgcgtggaagaggattacctgtggagaattaagcagctgggatcccattcaccagtggccctcctgaataccctcttctactttaacaccaaatacttcggcctaaagaccgtggaacaacatctgcgcttatcgttcgggaccgtgttcaggcattggaagaagaatccactcacgatggaaaataaggcctgtcttcggtaccaggtcagctcactttgtgggacggataatgaggataaaataaccacaggaaagagaaaacacgaggatgacgagcctgtttttgagcagattgagaacacagccaatccctcaaggtgccctgttaagatgtttgagtgctatctgtccaaatctccccagaacttaaatcagagaatggatgtgttttacttacaacccgagtgtagcagtagtaccgatagtccagtgtggtacacttccacctccctcgataggaatactctcgaaaatatgctggtccgagtcttgctagttaaagatatctacgacaaagataactacgagctcgatgaagatacggattag

SEQ ID NO: 247938 - DNA, 4128 bp, synthetic construct
  misc_feature 1..4128: note = Description of Artificial Sequence: Synthetic coding sequence
  source 1..4128: mol_type = other DNA
atggatacctccagcgtcggagggctggaactcacggatcagacgccggtgctcctaggatctactgcaatggccacaagcctgactaacgtggggaatagcttctctggcccagccaatcccctggtgtccagatccaataaattccaaaactcatcagttgaggatgatgatgatgtggtgtttatagagcctgttcaacctccgccaccttccgtacccgtagtggccgaccaacggaccatcacctttactagcagtaaaaacgaggaattacaaggaaatgacagtaaaatcaccccttctagcaaggaactcgccagccagaagggaagtgtcagtgagacaatcgtcatcgatgacgaggaagacatggagaccaaccaagggcaggagaaaaattcaagtaactttattgaacgcagacctcccgaaactaaaaaccggactaacgatgttgactttagcacatcttctttttccagatcgaaagttaatgctggaatgggaaattcaggtattacaactgaacccgatagcgagattcagattgctaacgtcaccacgctcgagacaggtgtgtccagcgtcaatgatggccagctggaaaatactgatggacgagacatgaatttaatgattactcacgtgacaagcctgcaaaacaccaatctgggtgacgtgtctaatggccttcagagcagtaattttggcgtgaatatacagacttacacaccctcacttacatcacagacgaagaccggggttggccctttcaaccccggaagaatgaatgtggctggtgacgtattccaaaatggtgagtccgctacccaccataaccccgactcctggatcagccagtctgcctcatttcccagaaatcagaaacagccaggagttgacagtctttctcctgtcgcgagcctacccaaacagatctttcagcccagtgtacaacagcaacccacaaagcctgttaaggtcacctgtgctaactgtaagaaacccctgcagaaaggtcagacagcctaccagcgtaaaggtagtgcacatctcttttgctctacaacttgcctatcctcattcagtcacaaacccgctcctaagaagttatgtgtaatgtgcaagaaagacatcactacgatgaaaggcacaatagttgcccaggtagactcctccgagtctttccaggagttctgcagtacgagttgcctgtcactgtatgaggataaacaaaaccctaccaagggggcattgaataaatctagatgcaccatctgtggcaagctgacagagattcgccacgaagtctcttttaaaaacatgactcacaagctttgcagtgaccattgcttcaatagatatagaatggcaaacggtctaattatgaactgttgcgagcaatgtggggagtaccttccctccaagggcgcagggaacaacgtactcgtgattgacggacagcaaaaacgcttttgctgccaatcctgcgtgtcagagtataagcaggtcggcagtcacccctcctttctgaaggaggtgagagaccacatgcaggactcgttccttatgcaaccagaaaagtacggcaagctcactacatgcaccgggtgtagaacccagtgcagatttttcgatatgacacaatgtatcggtccaaatggctacatggaaccatactgctccacagcttgtatgaattctcacaaaacaaaatacgcaaagtcgcagtcactgggcatcatttgtcatttctgcaaacggaattccctaccccagtatcaggctacgatgccagatgggaaactttataatttctgcaatagcagttgcgtggccaagtttcaggccttgagcatgcagagctccccaaacggtcagttcgtggccccttctgatatccagctgaaatgtaattactgcaagaatagtttttgcagcaaaccggagattctggagtgggaagcttccttacatcaattctgcagtaagacgtgctcggacgattacaagaaactccattgcattgttacttactgtgaatattgccaggaggagaaaacgctccacgagactgtcaacttttccggagttaaacgaccattctgctccgaaggctgcaagctgctctacaagcaggattttgctagaagactgggtcttcgttgtgttacttgtaattattgcagccagttatgcaaaaagggcgctactaaggaactggatggcgtagtaagggatttctgcagcgaggactgttgtaagaagtttcaggactggtactataaagcttgcgactgttgtaagagtcagggcacactgaaggagcgagttcaatggcgcggagaaatgaaacacttttgcgaccagcattgcctgctaagattctactgtcagcaaaatgaaccaaacatgacaactcagaagggacccgagaaccttcactacgatcagggctgtcaaacaagccgaaccaagatgacgggtagcgcgcctcccccttctccgacgccgaacaaggagatgaagaacaaggcggtgctgtgtaaaccgctgacaatgaccaaggccacatactgcaaaccacacatgcagacaaaatcctgccaaacagacgacacctggaggacagaatacgtcccagtaccgatcccagtgccagtttacattccagtacctatgcatatgtatagtcagaacatcccagtgcccacaacagtgcctgtcccagtgcccgttcctgtgttcctgcctgcccctctggacagttctgagaagatacccgcagccatcgaagaactcaagtctaaagtcagctctgacgcactcgacacagagttgctcacaatgaccgatatgatgtccgaggacgaaggaaaaactgaaactacgaacataaactcagtgattatcgagaccgatataatcggaagtgacctcttaaaaaattctgatcctgaaactcagagctcaatgcctgatgtgccctacgaacctgatcttgacatagagatagacttcccacgtgcagcagaggaattagacatggagaacgaatttcttttgccccctgtattcggagaggagtacgaagaacagccgcgtcccaggtcaaaaaaaaagggagcaaagagaaaagccgtgtcgggctaccagtcacacgatgactccagcgataattctgaatgcagctttccattcaaatacacatacggcgtaaacgcctggaaacattgggtgaaaacgaggcagctggatgaagacctattggtgctcgatgagctgaagagttcaaagagcgttaaactcaaggaggatctgctcagccacacaacggccgagttaaattacgggttggctcattttgtcaatgagattaggcgaccaaatggcgaaaactatgcacccgattcgatttactatctgtgtctggggattcaggaatacctgtgcggaagtaacagaaaggataatatttttatcgacccaggctaccagaccttcgaacaagaactgaacaaaatcctaagaagctggcaaccgagtatcctgcctgacggctccatcttcagccgagtggaggaagattatctctggcgtatcaagcagttagggtcccacagtcctgtggccctcttgaacaccctgttttacttcaacacaaagtactttgggttaaaaaccgttgaacagcacctccgcctctcctttggcactgtgtttaggcactggaagaagaacccactgactatggagaacaaagcctgcttgagatatcaagtgtcaagtctctgcggaactgacaacgaggacaagataaccaccggtaaaaggaaacacgaggatgatgagcccgttttcgagcagatagaaaacactgccaatccctccagatgccctgtcaagatgttcgagtgctacctctccaagtcccctcagaatttgaaccagaggatggatgtgttttacttgcagcccgaatgctcgtctagtacagattctccggtgtggtacaccagtaccagcttggaccgcaacactctggaaaacatgcttgttcgggtattgctggtgaaagacatttacgacaaagataactacgagctcgatgaagataccgactag

SEQ ID NO: 247939 - DNA, 4128 bp, synthetic construct
  misc_feature 1..4128: note = Description of Artificial Sequence: Synthetic coding sequence
  source 1..4128: mol_type = other DNA
atggacacgtcttctgtcgggggactcgagctcacagatcagacaccagtattgcttggcagtaccgcgatggctacctctctgaccaacgtcggcaattcctttagcggtcccgcaaatcctctggtgagcagatcaaataagttccagaactcatccgttgaggatgatgacgacgttgtgttcatcgaacccgtccagccacctcctcctagcgttcccgtggtcgcagaccagagaacaattacttttactagttccaagaatgaggagctgcagggcaacgacagcaagattactccttccagcaaggagcttgcgtcccagaaagggagtgtgtccgagactattgtgatcgacgatgaggaggatatggagacaaaccaagggcaggagaaaaacagctccaatttcatcgagcgcaggccacctgagacaaagaacagaaccaatgatgttgactttagtacctcttcattctcgagaagcaaagttaacgccggaatggggaattcagggatcaccacagaaccagactccgagatccagatcgctaatgtcaccacgctggaaactggtgtttcttccgtaaacgacggccaactggaaaatacagatggcagggatatgaatcttatgattactcacgtaacgtcgctacagaataccaacttgggcgatgtaagcaacggtctgcagtctagtaactttggggtaaacattcagacctatacacctagcctaacatcacagaccaagaccggtgtgggcccttttaatcccggacggatgaacgtggccggagatgtttttcagaatggtgagagtgcaacgcaccacaatccagatagctggatttcacaatcagcgtcttttccacgtaatcaaaagcagcccggtgtggatagcttgagccctgtggctagtttgccgaagcagatcttccagccttcagtgcagcagcagccaaccaagccagtgaaggtgacttgcgctaattgtaagaaaccactccagaaaggacagacagcctatcagaggaaaggctccgctcacctattctgctccaccacgtgtttatcctcattctcccacaaacctgcgcctaagaagctgtgtgtgatgtgcaaaaaggatatcacaactatgaaagggacaatcgtggcccaggtcgatagctccgaaagctttcaggaattttgctctacgagctgtctctccctctacgaagacaaacagaatcctaccaagggcgcactgaataagtctagatgtacaatttgcggcaaacttactgaaatccgccatgaagtgagttttaagaatatgactcacaaactgtgttctgatcactgcttcaaccggtacagaatggcaaatggtctgattatgaactgctgcgagcagtgcggcgaatatttaccaagcaagggcgctgggaataacgtgcttgtgatagatggccagcagaagaggttttgctgccagtcctgcgtgtcggagtacaaacaggtgggctcgcacccttcgttcctgaaggaggtgcgcgaccatatgcaggatagcttcctcatgcagcctgaaaagtatgggaagctgaccacatgcacggggtgccggacacagtgcagattttttgatatgacgcagtgcatcggccctaacggttacatggagccatattgttccacagcttgcatgaattcccataagacgaaatacgctaagtcacagagcttagggatcatctgccatttttgtaagagaaattccctgccgcagtatcaagccaccatgcccgacggtaagctctataacttttgcaactcctcttgcgtggctaagtttcaggcattgtccatgcaatcttcacccaacggccagttcgttgctcctagtgacattcagctcaagtgtaactactgcaagaacagtttttgctccaaacccgaaatccttgagtgggaagccagtttgcaccagttctgtagtaaaacatgtagcgacgattacaaaaagttgcattgcattgtcacgtattgcgaatattgccaggaggaaaagacactgcacgagaccgtcaacttctccggggtgaaacgcccattttgctctgaggggtgcaagctgttgtacaagcaggattttgctcgccgattgggactgcgttgtgttacatgtaattactgctcccagttatgcaagaaaggggcaacgaaagagctggacggcgtggtgagggacttctgcagtgaggactgctgtaagaaatttcaggattggtattacaaggcttgcgattgttgcaagtcccaggggacactgaaagagcgcgttcagtggagaggtgaaatgaagcacttctgcgaccagcactgcctgctacgcttctactgccaacaaaacgagccaaacatgacaacacaaaaaggtccagagaatctccactacgatcagggctgccagacctctagaacaaaaatgaccgggtctgctccccctcccagcccaacacctaataaggagatgaagaataaggccgtgctgtgcaaaccattgaccatgaccaaggccacttactgtaaaccccacatgcagacaaaatcctgtcagactgacgacacttggagaactgaatatgtgcccgttccaatcccggtgcccgtctatatcccagtgcctatgcatatgtatagtcaaaacattccagtgcctactacagttcccgtccccgtgcccgtacctgtcttcctgccagcacctctcgatagttccgagaagattcccgctgctatcgaggaattgaaatccaaggtgagctccgacgctttggataccgagcttctgaccatgactgacatgatgtcggaggatgagggaaagacagaaaccaccaatattaacagcgtgatcatagaaactgatataatcggctccgatcttctgaaaaactcggaccccgaaacccagtcatccatgccggacgttccatacgagccagatcttgatatagagatcgattttcctagggcggctgaggaactggatatggaaaacgaattcctcttgcctccagtgttcggcgaggaatacgaggagcagcccaggccgagatcgaagaagaagggcgctaaacggaaggcagtcagcgggtaccagtcccacgacgactcttcagacaatagtgagtgtagtttcccattcaaatacacctacggcgtgaatgcctggaagcactgggtcaaaactagacagttggacgaggacttgcttgttttggatgagctgaaatcctccaagtctgtgaaactcaaagaggatctgctgagtcacactacggcggagctgaactacggcctcgcgcactttgttaatgaaatccggcgaccaaacggcgagaattatgcgccagattcgatctactacctgtgtttgggaatccaagaatacttgtgtggtagcaaccgaaaagacaacatcttcatagacccaggctatcagacattcgaacaggagttgaacaaaatactccgttcctggcagccctccatcctacccgatggcagcatattttcgcgtgtggaagaagattatctgtggcggattaaacagctggggtctcattcaccggtcgctctgctgaacacgctgttttactttaacactaaatacttcggcctaaagacagtggagcagcacctccgtctgagtttcggcacagtgtttaggcactggaagaaaaatcccctgaccatggaaaataaggcctgcctgcgttatcaggtgtcctccctgtgtggtaccgataacgaggataagatcactactggcaagcggaagcatgaggacgacgagcccgtgtttgagcagatcgagaataccgccaaccccagtagatgcccagtgaagatgtttgaatgctacctctctaagagccctcagaacctcaaccagcggatggacgtcttttatctgcagcctgaatgtagcagttccaccgactctcctgtttggtatacctcaacctcgctggatagaaacaccctggaaaatatgctcgttagggtgctactcgtcaaggacatctacgacaaggacaactatgagcttgacgaggacacggattag

SEQ ID NO: 247940 - DNA, 1134 bp, synthetic construct
  misc_feature 1..1134: note = Description of Artificial Sequence: Synthetic coding sequence
  source 1..1134: mol_type = other DNA
atgcaggatagtttcctaatgcagccagaaaaatacggaaaattgacaacatgcaccggttgcaggactcaatgccgttttttcgatatgacacaatgcattgggcctaacggctatatggaaccctactgttctactgcctgcatgaacagccataaaaccaaatacgccaagtcccagtctctgggtattatctgccacttctgtaagcggaattctcttcctcagtaccaggccacgatgcccgacggtaagctctacaatttttgtaatagttcctgcgttgccaaattccaggccctgtcaatgcagtcttccccaaacggccaattcgtcgctccctcggatatccagttaaagtgcaattattgtaagaactccttctgctccaagccagagatccttgaatgggagaacaaggtccaccaattttgctcaaagacatgtagtgatgactataaaaaactgcactgtatagtaacatactgtgaatactgtcaggaagaaaaaactctgcacgaaactgtgaatttctccggtgttaagcgcccattctgtagcgagggctgcaaactcctgtacaaacaggatttcgccaggaggcttgggttgagatgcgtgacctgtaactactgctcccagctctgcaaaaaaggagcaaccaaggagctcgatggtgtggtccgtgatttttgttccgaggattgctgtaagaaattccaggattggtattacaaggccgcacgatgtgactgctgtaaatcccagggtactctcaaagagagggtacagtggcgtggcgaaatgaagcacttctgtgatcaacactgtctgctccgattctactgtcagcagaatgagccgaatatgacaacccaaaagggcccagaaaatctgcattatgaccaggggtgtcagacaagcagaactaaaatgaccggaagcgcaccacctccatccccaacccctaacaaggaaatgaagaacaaggccgtgctgtgtaaaccccttacaatgacgaaggctacctactgtaagcctcatatgcaaacgaagtcttgccagacagatataacatggagaatccagcatctgatcttgaaccattacgaccagagcctgatcaaagcgtag

SEQ ID NO: 247941 - DNA, 4134 bp, synthetic construct
  misc_feature 1..4134: note = Description of Artificial Sequence: Synthetic coding sequence
  source 1..4134: mol_type = other DNA
atggatacatcctctgtaggcggtttggagctgaccgatcagacaccagtgctgcttggttcgacagcgatggctactagtctcactaatgttgggaactccttctcaggtccagctaacccgttagtctcccggagcaataagtttcagaacagctccgtggaggatgacgacgacgtggttttcattgagcccgtgcagccaccccctccatccgtacccgtggttgcggaccagcggacaatcacatttacatcctccaaaaatgaagaattacaaggaaatgactctaagattactcccagttcaaaggagctggcaagccaaaagggctcggtgtccgaaaccattgtcatcgacgacgaggaagacatggaaacgaatcagggtcaggagaaaaattcttccaattttatcgagaggcgtcctccagagactaagaatcgcaccaacgacgtggatttcagtaccagcagcttctcccgttcgaaggtgaatgccggaatgggcaacagcgggatcacgacagaaccagacagcgaaatccaaatcgcaaacgttaccaccctcgagacaggcgtgtcttctgtcaacgatggtcagctggaaaataccgacggccgagacatgaatctgatgattacacatgttacgtctctgcagaatacgaaccttggagacgtatcaaacggtctacagtcgtccaattttggagttaatatacagacttatacaccttctcttacctcacagactaagaccggagttggtccgtttaatcctggccgtatgaacgtggctggcgacgtatttcagaatggcgagtcagccacccatcataaccccgacagctggatctcccagagcgcttcgtttccaagaaaccagaaacagcctggtgtggacagcttgtccccagtcgcctctctcccaaagcagattttccaaccctcagttcagcagcagcctacaaaacctgtaaaggtgacgtgtgcgaattgcaagaaacccctacagaagggtcagacagcgtatcagaggaagggatctgcccatctgttttgctcgaccacttgcctgtctagcttctctcacaagcctgctcctaagaaactctgcgttatgtgtaagaaggacatcacgacaatgaaggggactattgtggcgcaagtggatagtagtgagagttttcaggagttctgctctacatcctgcctgtcattgtacgaggataaacagaatcctactaagggcgctctgaacaagtcccgctgcactatttgtgggaaactgaccgagatccggcatgaggtcagcttcaagaatatgacccacaagctgtgctcagaccattgttttaaccgttatcggatggcaaacgggctgattatgaactgctgcgagcaatgtggcgaataccttccctctaaaggagcgggtaacaacgtgctcgtgattgacgggcagcagaagcgattctgctgccagtcatgtgtgtcagagtacaaacaagtggggtctcatccatccttccttaaagaagtaagggatcatatgcaagattcttttctgatgcaacccgagaaatacggtaagttgactacatgtactggctgcagaacccagtgccgcttctttgacatgacccagtgtatcggcccaaacggatacatggaaccctattgctctacagcgtgcatgaattcacacaagaccaaatacgcaaaaagccaatccctgggaataatttgtcacttttgcaagcggaactccctcccccagtaccaagctacaatgccagatggcaagctctataatttttgcaattcttcttgtgtggccaaatttcaggctctgtctatgcagagctctccaaatggtcagttcgttgccccatctgacattcagctgaaatgtaattactgtaagaatagtttttgtagcaagccggaaatattggagtgggaaaataaggttcaccagttctgttccaagacctgcagcgacgattacaaaaagctccactgcatcgtgacctactgtgagtattgtcaggaagagaagacgttgcacgaaacagtgaatttcagtggagtgaagagaccattctgtagcgagggctgtaaacttctgtataagcaggatttcgccagacgcctgggcttgagatgtgtgacatgcaattattgctcccaactgtgcaagaagggcgcaactaaagaactcgatggagtcgtacgcgacttctgttctgaagattgttgcaaaaagtttcaagactggtattataaagcggctaggtgcgattgttgcaagtcacaggggaccctgaaggaacgagttcagtggagaggcgagatgaagcatttttgcgaccaacattgtctgctccgtttctactgccagcagaatgagcccaatatgacaacccagaaagggccagagaacttgcactacgatcagggctgtcagacatctcgaactaagatgacgggcagcgcaccaccaccatctccaactcccaacaaagaaatgaagaataaggccgtgctgtgcaaaccccttaccatgactaaagctacttactgtaagccccacatgcagacaaaatcctgccaaaccgacgatacttggcgcacagagtatgtccccgtgccaattccggttcctgtgtatatcccagtgcccatgcatatgtatagccagaatatcccagttcctaccaccgtgccagtgcccgttcctgtcccagtcttcctgccggcacccttggactcctctgagaaaattcctgcagctatcgaggagcttaagtccaaggtcagctccgacgcccttgacacagagctgctgacaatgacagacatgatgtcagaggacgagggaaaaacggaaaccaccaacatcaatagtgtgatcatagagactgacatcatcggatccgacctgttaaaaaactcggaccccgagactcagagttctatgcccgatgtaccttacgagcctgacctggatatcgagatcgactttcctcgtgccgcagaggagctggacatggagaacgaattcctactgcccccagtctttggtgaggagtacgaggagcagccaaggcctagaagtaagaagaaaggtgcaaaacggaaggctgtctcagggtaccagtcacatgatgacagcagcgacaatagtgaatgctcctttcctttcaagtacacatacggcgttaatgcctggaaacactgggtgaagacgagacagctcgacgaagatctgctggtgttagatgaactgaagtcctcgaagtccgtcaaactgaaggaggacctgctctctcacactacggcggagttaaactatggtcttgcccacttcgtgaacgaaatcagaaggccaaatggagagaattacgctcccgactctatttactacctgtgcctaggcatccaggagtacctgtgcggcagcaaccgaaaggataatatattcatagatccaggttatcagacgtttgaacaggaactcaacaagattttgcggtcctggcagcctagcatcctcccagatgggtcgatcttctcgagagtggaggaagattatctgtggcggatcaaacaactgggctcccactctccggtcgccttactgaataccctcttttacttcaacaccaaatattttgggctgaagaccgtcgaacagcatctgaggctgtcttttggcaccgttttcaggcattggaaaaagaatccactgacgatggaaaacaaagcttgcctgaggtaccaggtatcctctctttgcggaacggacaatgaggacaagattaccacgggcaagcggaaacatgaagatgatgagcccgtcttcgagcaaatcgagaatactgccaacccctcacggtgccctgtgaagatgtttgagtgttatctgtcgaaaagtccgcaaaatcttaaccaacggatggatgtattctatcttcaacccgagtgttcttcaagcacggattctccagtatggtacacatccacctccctcgacagaaatactctggagaacatgctggtgcgcgtgctgctagtgaaggacatatacgacaaagacaactatgagctggacgaagacaccgattag

SEQ ID NO: 247942 - DNA, 4113 bp, synthetic construct
  misc_feature 1..4113: note = Description of Artificial Sequence: Synthetic coding sequence
  source 1..4113: mol_type = other DNA
atggacccaagtgatttccctagccccttcgatcctctcacattacctgagaagccccttgcaggggacctgccagtggacatggagtttggagaggatctcttagagagccagacggcgccaacccgcggttgggcccctccaggaccatcaccttcctctggcgctctggacctcctcgacacccctgccggactggagaaggaccctggggtgctggatggggcaacagaattgctgggattgggaggcttgctgtataaagcccctagcccacctgaagtcgaccatggtcctgagggaaccctcgcttgggatgccggagaccaaacacttgaacccggtcctggaggacagactccggaggtcgtgccacccgatccgggagccggagcgaattcttgttcccccgagggcctactggaaccccttgcgccagactctcctattacactgcaatctccccacatagaggaggaagaaacaaccagtattgccaccgctagaagaggatctcccggtcaagaggaagagctgccacagggtcagccccagtctcccaatgcaccaccgagccccagtgtcggagagacactgggagacggtattaactcaagccagactaagcccggagggagtagcccccctgcacatccatcattacccggagacggcctgacagctaaagcttcggagaagcccccagaaagaaagaggtctgagagagtgcggagagcagagcccccaaagccagaagtcgtggatagcactgaaagcatccctgttagtgatgaggactctgatgctatggtggacgaccctaatgacgaggacttcgtgcccttccgaccccgtcgcagtcccaggatgtccctgcggagtagtgtaagtcagcgtgctggcagaagcgcagttggaactaagatgacgtgcgctcattgcaggacaccactgcagaagggccagaccgcttatcagcgcaaggggttgccccaactgttctgctcgagttcttgcctgactactttctcaaagaagcccagtggtaaaaaaacatgcaccttttgcaagaaagaaatctggaataccaaggatagcgtggtggctcaaactggatctgggggatcatttcacgagttttgcacatccgtgtgtttgtccttatatgaggcccaacagcagaggcctattccccagtccggggatcccgcagacgccacgcgctgttcaatatgtcagaaaaccggcgaggtgctgcatgaggtgtcaaatggctccgtcgtccacagactatgcagtgattcttgcttctccaagttccgggctaataaggggctgaaaaccaattgttgtgaccagtgcggagcttatatttacaccaagaccggctcacctgggcctgaattactatttcacgagggccagcagaaacggttctgtaataccacctgtttaggcgcatataaaaagaagaatacccgggtctacccgtgcgtgtggtgtaaaacactgtgcaagaatttcgagatgctgtctcatgtagaccggaacggaaaaacaagcctgttctgctctctgtgctgcaccacatcatataaagtgaagcaagcaggcctgaccggccctcccaggccttgttctttttgtcggcgaagcttgagcgatccctgctactacaacaaggtagacaggacagtttatcagttttgtagcccttcctgttggaccaaattccaacggacttctcctgaggggggaatccacctgtcatgccattactgtcacagcctgttctctggaaaaccagaagtgctggattggcaagatcaagtgttccagttctgctgtagagattgttgtgaagactttaagcggctgcgcggagtggtgtctcagtgtgagcactgcagacaagagaagcttctgcacgagaagcttcgtttctcgggagtggagaagagcttctgctcagaagggtgtgttctcctctacaagcaggatttcactaaaaaactgggactctgctgtatcacctgcacttactgtagtcagacatgtcagagaggtgtgacagaacaactggatgggagcacatgggatttctgctcagaagattgtaaatcaaagtacctgttgtggtactgtaaggccgctcgctgccacgcctgtaagcgtcagggtaaactgttagagactattcactggcggggacagattcgtcacttctgtaatcagcagtgcctcttaaggttctactcacaacagaaccagcccaatctcgacactcaatccggcccagagagcctactcaacagtcagtcacctgagtcaaagccccagacaccttcgcagaccaaggtggagaacagcaacacggtgagaacccctgaggaaaatgggaacctgggcaaaatccccgtcaagacaaggagcgcacctactgcccctactcccccaccacctccccctccagcgacccccaggaagaacaaggcagccatgtgtaaacccctgatgcagaaccggggagtttcctgcaaggtggagatgaagtcaaaaggatcacagaccgaggagtggaagccccaggtgatcgttctccctattccagttcccatattcgtacctgtacccatgcatctgtattgccagaaagtcccggtgccatttagtatgcccattcctgtgcctgtcccaatgtttcttcctactacgcttgagagcactgataagattgttgagactattgaagagctcaaggtcaagatcccttctaacccgctggaagcagacatcctcgctatggcggagatgatcgcagaggcagaggagctggacaaggcatcctcagacctgtgtgacctcgtctcaaaccaatccgcagaaggtctcttggaagattgcgacctgttcggaccggctcgggacgatgtccttgctatggctgtgaaaatggccaatgtgctggacgaacctggtcaggatctcgaggctgattttcctaaaaatcccttagatattaacccatcggtggattttctgttcgattgcggactggtgggtcccgaggacgtaagtactgagcaggacctgccaagaacaatgcgtaagggtcagaaaagactcgtgttgtcagaaagttgtagccgggactcaatgtccagccagccaagctgtactggcctcaactactcctacggcgtgaacgcatggaagtgctgggtccagtcaaagtacgccaatggagagaccagcaaaggcgatgagttacggttcggccctaagcctatgagaattaaagaggatatcctagcctgctcagcagcagagcttaattacggcctcgcgcagttcgtgagagagataacccgccctaacggcgagaggtatgagcccgattcgatttactacctgtgcctgggcatccagcagtacttgctggaaaataaccgaatggtaaatatctttaccgacctgtattacttgacgtttgtgcaggaactgaacaagagcctatcaacctggcagcccacgctcttacccaacaatactgtgttctctcgcgtagaagaggagcatctttgggagtgtaagcagctgggcgtgtactcaccctttgtgctgctcaacactctgatgttttttaacacgaaattctttggtctgcagactgctgaagaacacatgcagctctcgttcactaatgtggtgaggcaatctcggaagtgtacgactcctcgaggcacgacaaaggtcgtgtcaattaggtattatgcccctgttaggcagcggaaaggacgcgacaccgggcctggaaaacggaaacgagaggacgaagcacctatcctagagcagagagaaaatcgaatgaacccattgcgctgcccagtgaagttttatgaattttacctgtccaaatgcccagagtcccttcgcactcgcaacgatgtcttctatctgcaaccggaaaggtcctgcattgccgagtcccccctctggtattcggtcattcctatggatcggtccatgctggagagcatgctgaacagaattctagctgtccgagaaatttatgaggagctcggccgaccaggagaagaggacttagactag

SEQ ID NO: 247943 - DNA, 4113 bp, synthetic construct
  misc_feature 1..4113: note = Description of Artificial Sequence: Synthetic coding sequence
  source 1..4113: mol_type = other DNA
atggatccatcagattttccttctcccttcgaccctctgacactgccagaaaagccactggcaggcgatctccccgtagacatggaatttggagaagacctgcttgagtctcagaccgctcctacccggggatgggccccacctgggccaagtcctagctcaggcgcactcgatctgcttgatacccctgcgggactggagaaggatccaggggtgttagatggcgctacggagctcctggggcttgggggactactgtacaaggcaccaagccctccggaagttgatcacgggccagaaggcaccctcgcatgggacgccggtgaccagacattagagccaggtccagggggacagactcccgaggtcgttccccctgacccaggggctggcgctaacagctgctccccagaggggcttctggaacccttggccccagatagcccaataacgttacaatccccacatattgaagaagaggagaccactagtatcgccacagcgagacgcggttccccaggacaggaagaggagttgccgcaagggcaacctcagtcgccaaacgcaccgccatccccttcggttggagagactttaggagacggtatcaatagctcgcagacaaaaccgggtggtagcagccctcctgcccatccatcactgcctggggatggcttgactgcgaaagccagtgaaaagcctcccgagcgaaaaagaagcgaaagagtacggagggccgaacccccaaaaccagaggttgtagattcaactgaatccatcccggtatcggacgaggattccgacgccatggtggatgaccctaacgatgaggactttgtcccgttccggccaagacgctctccacgtatgtctctgagaagtagcgtctcacagcgcgctggaagatccgccgtgggaaccaagatgacttgtgcacactgtcggactcctcttcaaaaagggcagactgcctatcaacgaaaggggcttccacaattgttctgcagttcttcttgcctgacaaccttctccaagaagccttctggcaaaaagacctgcaccttttgcaaaaaggaaatctggaacacaaaagactcagtggtagctcagacaggatcgggcggatcattccacgagttctgcactagtgtatgtctgtctctctatgaggcacagcagcagagaccaatccctcagtctggcgatcctgcggatgcaacccgctgcagcatttgtcaaaagacgggcgaggtgctgcacgaagtctcaaacgggtctgtggtgcatcggctctgcagcgactcctgcttttctaagtttcgagcgaataaggggttaaaaaccaattgctgcgaccagtgcggcgcttatatctatacgaaaacaggaagtccaggccctgagctcctgttccatgaagggcaacagaagcggttctgcaatactacgtgccttggggcttataaaaaaaaaaacacgcgggtatacccttgcgtgtggtgtaaaactctctgtaagaacttcgagatgctctcccatgtggaccggaatggaaaaacctcccttttctgcagcctgtgctgcacaacatcgtacaaagtgaagcaggcaggactcaccggcccaccgagaccctgcagtttctgtcggagatcactgtccgatccatgttattacaataaggtagatcggaccgtgtatcagttctgtagtcccagctgctggacaaaatttcaacgaactagcccggaagggggaattcatctttcctgccattattgccactcgcttttttcagggaagccagaggttcttgattggcaggaccaagtcttccagttctgttgccgggactgctgtgaggacttcaaacgattgcggggagtggtcagccagtgcgaacactgccgacaagagaaattgcttcacgagaaacttagattcagcggggtggaaaagtccttctgctccgaaggctgtgttctgctttataaacaagattttaccaaaaagctaggtctatgctgtattacctgtacgtactgcagtcagacttgccagagaggagtgacggaacagctggacggaagtacatgggatttttgctcagaggattgtaagtccaagtatctcctttggtattgcaaagcagcgaggtgccacgcctgcaagagacaggggaaactcctggaaaccattcactggaggggacaaataaggcatttttgcaaccagcagtgtctccttcgattctattcccagcaaaatcaacctaacctcgatacccagagtggacccgagtcacttttaaattctcagtcaccagaaagtaagccgcagaccccctcccagacgaaagtggaaaatagcaacaccgtgcgtactcccgaggagaacggaaacctgggaaaaatacctgtcaagactcggagtgctcccactgcccctaccccacccccaccgcctcccccagccacccccaggaagaataaagcagccatgtgcaagcccttaatgcagaataggggggtgagctgcaaggttgagatgaaatcaaaaggctcccagacagaagaatggaagccccaggtcattgtgctgcctatccccgttccaatttttgttcctgttccgatgcacctttactgccaaaaggtcccggtccctttctcaatgccaattcctgtacccgtgcccatgttcctgcccactactctagaatctactgataagatcgtcgagacaattgaggaactgaaagtgaaaatacctagtaaccctttggaagcagacatattggcaatggccgaaatgattgccgaagccgaggagctggacaaagccagctccgacctctgcgaccttgtctcaaaccagagcgcagagggtttgctcgaggactgtgacttgttcggcccagctcgggatgacgtcttggctatggccgtgaagatggctaatgtgctggacgaacccggacaggatctcgaggctgatttcccaaagaatcctctagacattaacccctcggtggatttcctcttcgattgtggccttgttggtcctgaggacgtatccactgaacaggacctacccaggacaatgcggaagggacagaagcgacttgtgctgtcagagtcttgttcccgagactcaatgagctcacagcctagctgtacaggactgaactattcttacggagtgaatgcctggaagtgttgggtgcaatccaagtatgctaacggggaaacatctaagggcgacgaactgcggtttggtcctaagcccatgaggataaaagaggatatactcgcctgttccgccgctgagctgaattacggactggctcagtttgtgagagagatcacccgtccgaacggggagagatacgagccagattcaatttactacctttgcctgggcatccagcaatacttgctggagaataacaggatggtaaacatttttactgacctgtactatctgacctttgtccaggagctcaataaaagcctctctacctggcagccaaccttgctgccgaacaatacggtcttttctcgcgttgaggaggagcacctgtgggagtgcaagcagctcggagtgtatagcccttttgttctgttaaatactctcatgttcttcaatacaaagttcttcggactccagacggcggaagaacacatgcagctgtcctttactaatgtggtacgacaatcccgaaagtgcaccacaccaaggggtacaactaaggtggtgtctatcaggtactacgcaccggtgaggcagagaaagggtagggacactggacctggaaaacggaaacgagaagacgaggccccaattctagagcagcgagagaatcgcatgaatcctctgcgatgtcctgtcaagttctatgagttttatttaagtaagtgcccagagtctcttaggaccagaaacgacgtcttttatctgcagccagaacggtcatgtattgcggagtcccccttgtggtacagtgtcatccctatggatagaagtatgctggagtcaatgctgaacagaatcctggcagtgagggagatctatgaagaactgggacgcccaggggaggaagatcttgattag

SEQ ID NO: 247944 - DNA, 1050 bp, synthetic construct
  misc_feature 1..1050: note = Description of Artificial Sequence: Synthetic coding sequence
  source 1..1050: mol_type = other DNA
atggatccatctgattttcccagcccctttgacccgctgacactgccggagaagcccctggccggtgacctgcccgtggacatggagtttggcgaagatttgctggaatcccagacggctccaactcggggatgggctccacccggtccgagtccttcctctggcgcattagacttgctggacacccctgccggacttgagaaggatccaggcgtgctggacggagctacagagcttctaggactgggcggactgctctataaggcaccttcaccacctgaggtggatcacggcccagaaggcaccctggcttgggatgccggagatcaaacacttgagcccggacccggtggacagacacccgaagtggtcccgccagaccccggagcaggggctaatagctgctccccagagggactcctggagccgttggccccagattcacctattacactgcagagtccccacatcgaggaagaagaaactacatccatcgctaccgctcgccgtggcagccccggtcaggaagaggagcttccccaggggcagccacaatcacctaatgcaccgccaagccctagtgtgggcgaaacactgggagacggcatcaatagtagccaaacaaaacccggtggctcgtcgccccctgcacacccaagccttcctggagatggcctgaccgccaaggctagtgagaagccgccagagcgcgtacagaagagatctgagagagtccgccgtgccgagccgcctaagcctgaggtcgttgatagtacagagagtcgccgttctggcacgcccaggacaagattgtggcgacggcttgtcctcgaggctccttcaatgtcttctgcacatccatcggtgtcaccgtgcatgaggccaagctccagcgctcgttctcctagcctggggatcccccctaccctactagccgcagcgtacgccagacgccttgagcggtcctgtacacgctctgctatggcagcgtggtacaccgggtccgcagccattttggcttcccctaactcaggacccactagagactag

SEQ ID NO: 247945 - DNA, 1488 bp, synthetic construct
  misc_feature 1..1488: note = Description of Artificial Sequence: Synthetic coding sequence
  source 1..1488: mol_type = other DNA
atggatccttcagatttcccaagcccattcgatccccttaccctccccgaaaaacccctcgccggtgacctgcctgtggacatggaattcggagaggatctgctggaaagtcaaactgctcctacccgcggatgggcaccgcctggaccctccccaagttctggtgcattggacctgctggatacacctgcaggattggagaaggatccgggtgtcctcgatggggcaaccgagttactgggtctcggcggacttttatacaaagcccctagccccccagaggtggatcacggtcctgaagggacgctggcttgggatgcgggtgatcagacactggagccaggcccagggggtcagacccctgaggttgtacccccagacccaggagcaggtgccaattcatgctctcccgagggactgttagagcctctggcgcctgactcccctatcaccctgcagtcaccccacatcgaggaggaggagaccacttccatcgccactgcccgtagaggcagcccgggacaagaggaggaactcccccagggtcagccccaatctccaaatgcacctccttcgcccagcgtgggagagactctgggagacggcatcaactcatcgcagactaaacccggaggctcttctccacctgcccacccctcactgccaggggacgggctaacagccaaagcgtcagagaagccccctgagaggaagcgtagcgaacgggtgcgaagagccgaaccacccaaaccagaagtggttgactccactgaatcaatcccagtgtctgatgaagacagcgacgcgatggtggatgacccgaacgatgaggacttcgtgccttttaggcccagacggagtccacggatgagcctaaggagctccgtgtcacagcgagcgggaaggagtgcagtgggtaccaaaatgacatgcgctcactgtcggacgcctctccagaaaggacaaaccgcctaccagaggaaggggcttcctcagctcttctgttccagcagttgtctgactacctttagtaaaaaacctagtggtaaaaagacctgtaccttctgtaagaaggagatctggaataccaaggattccgtggttgcccagaccgggtccggtggatcgtttcatgagttttgtacatcagtctgtctcagcctctacgaagcccaacagcagcgaccaattccccaatccggcgatccagccgatgcgacccgttgctctatctgccagaagaccggagaggtgctgcatgaggtgtccaacggttctgtggtccacaggctatgcagtgactcttgcttctctaaatttagggccaataaaggccttaagactaactgctgtgaccagtgtggtgcctatatctataccaagaccgggtcccctggacccgagctactgtttcacgaaggacagcagaaacgattttgcaacacaacatgcctcggggcttataaaaaggtgggtcccagggaatag

SEQ ID NO: 247946 - DNA, 1494 bp, synthetic construct
  misc_feature 1..1494: note = Description of Artificial Sequence: Synthetic coding sequence
  source 1..1494: mol_type = other DNA
atggacccctccgactttccctctccatttgatcctctgacactgcccgaaaagccgctggctggtgatctgccggtggacatggaatttggggaagaccttctggagagccagactgctcccactcgaggttgggctcccccaggaccttccccttcaagtggggctttggacctgcttgatacgcctgcaggactggagaaggaccctggcgtgttagacggggcaactgaactgcttggattaggcggactcctatacaaggccccaagtccccctgaggtggaccacggccctgagggcaccctggcgtgggatgccggagatcaaactctagaacctggcccaggagggcagacgcctgaagtcgtgccacccgacccaggcgctggcgctaactcctgctcacctgagggactgctggagcctctggctcctgactcacctataacgctgcaaagcccacacatagaggaagaggagaccaccagcatagccacagcgaggcgaggatctcctggccaggaggaggagctaccccaggggcagccacaatctcccaacgctccaccctcgccttctgtgggggaaacgttgggcgacggaataaattcttcccagaccaaacccggtggctcatcaccacccgcacaccccagtctaccaggggatggcttgaccgcaaaggcatctgaaaaaccccctgaacgggtgcagaagaggtcggagagagtgcgcagggctgagccaccaaagccagaagtggtggacagcacagagtcaatcccggtgtccgacgaagattcagacgctatggtcgacgatcctaacgatgaggacttcgtaccgtttaggcctaggagaagcccccgaatgtcgctccgctctagcgtgtcccagcgggctgggcgatccgccgtgggcaccaaaatgacctgcgcgcattgtaggacacctctacagaaaggtcagacagcgtaccagcgtaaggggttgcctcagctcttctgttcatcttcctgcctgactacattctctaaaaagcccagtggtaagaaaacctgtacattctgcaagaaggaaatctggaacacgaaggatagcgttgtggcccaaaccgggagcggaggctcattccacgaattctgtacctccgtatgcctgtctttatacgaggcacagcaacagcgcccaatcccgcaaagtggagacccagcagacgcaacacgctgctcgatctgccagaagactggagaggttctgcacgaagtgtcgaacgggagtgtggttcaccgcctgtgctctgattcttgttttagcaaattccgcgctaataaaggtttgaaaaccaactgttgcgaccagtgcggtgcctacatttacacaaagactgggagccccggacccgagttgctcttccacgagggacagcagaaacggttttgcaacactacatgcctgggggcatacaagaaggtaggccctagggagtag

SEQ ID NO: 247947 - DNA, 3843 bp, synthetic construct
  misc_feature 1..3843: note = Description of Artificial Sequence: Synthetic coding sequence
  source 1..3843: mol_type = other DNA
atggacccaagcgacttcccatctccctttgaccccctgaccctgcccgaaaaacccctggctggcgacctgcctgtggacatggaatttggagaggacctcctcgagtcacagaccgctcctacaagaggatgggctccaccaggcccttcgccctcgtcaggtgcactggatctccttgacacaccagccggactggaaaaggaccccggagtgttagatggagccaccgaactgctcggattaggagggcttctgtataaggccccttcaccacctgaggtggatcacggacctgaaggaaccctggcttgggacgccggagatcagacactcgaaccaggcccagggggtcagaccccagaggtagtccccccagatcctggggctggcgcaaattcatgctcccctgaaggcctgttagaaccactggcaccagattctcctattactttacagtcacctcacattgaggaggaggagactacctctattgcaaccgccagacggggaagccccggtcaggaagaagagctgccacaagggcagccccagagccccaatgctcccccaagcccgtctgtgggagagactctgggtgacgggatcaattccagtcaaactaaaccagggggaagctcacccccagcccacccttcactgccgggtgacggactcaccgccaaggccagcgaaaagcccccagaacgggtgcaaaagcggtccgagagggtcaggagggctgagccgccaaaacctgaagttgtcgatagcaccgagagcatcccagtctccgatgaagattccgacgcaatggtcgatgaccccaatgacgaggatttcgtgccatttcggcctcggcgatcacctaggatgtccttgcggagctcagtgagtcagagggctggccgatccgcggtgggtactaagatgacctgcgctcattgcaggactcctctgcagaagggccaaaccgcttaccagaggaagggcctgccacagttgttttgttcctcctcctgccttactaccttttccaagaaacctagtggtaagaaaacatgcactttctgcaaaaaagagatatggaacacaaaggacagcgtggtggcccaaaccgggtcaggagggagtttccatgaattctgcaccagtgtgtgcttaagtctgtatgaagctcagcagcagaggccaatacctcagtccggcgatcccgctgatgcaacccgatgctccatttgtcagaagaccggggaggtcttgcatgaagtaagcaatggctcggtggttcacaggctctgtagcgattcttgcttctccaagtttcgcgcaaacaaagggctcaaaacaaattgctgcgatcagtgtggcgcatatatatacaccaagacaggcagtcccggacccgagctgcttttccacgagggacaacaaaagagattttgcaatactacctgcttaggtgcctataaaaaaaagaacactagggtgtatccttgtgtgtggtgcaagactctctgtaagaacttcgagatgctcagccacgtggatcgcaacggaaagacttctctcttttgctccctctgttgtacaacctcatataaagtcaagcaagcaggtctgaccggcccaccacggccttgctctttctgtcgccgatccctctcagatccgtgttactataataaggtcgacaggaccgtctaccagttttgcagcccctcctgttggacgaagtttcagcgtaccagccccgaagggggaatccatctgtcctgccactattgtcacagtctcttcagcggaaagcccgaggtgctggattggcaggatcaggttttccagttctgctgcagggattgctgcgaggatttcaaacgactcagaggggtagtatctcaatgtgaacactgtcggcaggagaagcttctacatgagaagttgagattctccggtgtcgaaaaatctttctgttccgagggatgtgtgttgctgtacaaacaggatttcacgaaaaagttggggctgtgttgcatcacatgcacatattgtagccagacgtgtcagcgaggcgtgaccgaacagctggacggcagtacttgggatttttgttctgaagattgcaagtccaagtatcttctctggtattgcaaggccgcaagatgccatgcctgtaagcggcaaggtaaactcctggagacaatccactggagaggacagatccgacatttctgcaatcaacagtgcttgctccgcttctattctcagcagaaccagccgaacctggacactcagtctggtcccgaatctctgcttaactcccagtctcctgaaagcaaaccacagacgccttcccagacaaaagtggagaacagtaacaccgttcgcacccctgaagaaaacggaaaccttggtaagatcccggttaagaccagatctgcccctacagcgccaaccccacctccaccacctcctcctgctactcctaggaaaaacaaagctgcgatgtgcaagcccctcatgcagaatcgcggagtaagctgcaaagtggagatgaaatccaaaggaagccagaccgaggagtggaaaccccaggtcattgtgctcccaattccagtccctatcttcgtccctgtgccaatgcacttgtattgtcagaaggtcccggtccctttttctatgccaattcccgtacccgtaccaatgttcctccctacgactttagaatctaccgataaaatcgtagagaccatcgaggaactaaaagttaaaatcccttcgaacccattggaggcagatattctggcaatggccgagatgatagctgaggctgaagagcttgacaaagcttcaagcgacttgtgtgacctggtatccaaccaaagtgctgagggactgctggaggattgcgatttgttcgggcctgcccgagacgacgtcctggccatggccgtgaagatggcgaacgttttagacgaacccggacaggatttggaagccgacttccctaaaaatccactcgatataaaccccagtgtggattttctgtttgattgtggtctggtggggccagaagacgtgtccacagagcaggatctaccacgtacaatgcgcaagggacaaaagagacttgtcctgtcggagagctgctctcgggattcaatgagctcccagccctcctgcactggattgaattactcatacggcgtcaacgcctggaagtgttgggtacaatcaaagtatgctaatggagagacgagtaaagctaaacctatgcggatcaaggaggacattctggcctgttctgccgctgagctgaactacgggctggcccagttcgtaagagagataacacgacctaatggcgaaaggtatgaacctgacagcatttattacctttgtctgggtattcagcagtacctgctcgagaacaacagaatggtaaacatcttcacagatctctactacctcaccttcgtccaagagctgaacaaatcactgtccacctggcagccgacactgctgccaaacaacactggtccgggtaaacgaaagcgtgaggacgaggcaccaatccttgagcagcgagagaaccgtatgaaccccctgaggtgcccagtcaaattttacgagttttacctctctaaatgccccgaaagtctccgcacccgcaatgatgtgttttatttacagcctgaaaggagctgtattgccgagtctcccctctggtacagcgtaatccctatggatcgctcaatgttagagagtatgctaaataggatcttggctgtgcgggagatctacgaagaactggggcgtcccggagaggaagacttggactag

SEQ ID NO: 247948 - DNA, 4119 bp, synthetic construct
  misc_feature 1..4119: note = Description of Artificial Sequence: Synthetic coding sequence
  source 1..4119: mol_type = other DNA
atggacccaagtgattttccgtccccctttgacccactgacattgcccgaaaagccactggccggtgatcttcctgtggacatggaatttggagaggatcttttggagagtcagaccgctcctacacggggatgggcaccaccagggccaagcccctcatccggcgctctggatctcctcgacacccccgctggccttgagaaggaccctggagtgttggacggggctactgaacttctcggtctcggcggtcttctatataaagcaccctcgccacccgaagttgaccatggccctgaaggtacattagcttgggatgccggagatcagactcttgaaccagggcctggaggtcaaactccggaagtagtccccccagatcccggtgcgggtgcgaatagttgttctcctgagggcctgctggaaccacttgctcctgatagccccatcaccctgcagtcccctcacattgaggaagaagagacgacatctatcgcaacggcacgacgaggcagcccaggacaagaggaagagttaccgcagggtcagccacagtctccaaacgctcctccgagtcctagtgtaggtgagactttaggtgatgggatcaactccagccagactaagcccggaggctcatcaccacctgcacacccctccctgccaggcgacggcctgacagcgaaggcttctgagaagcctcctgagcgagtccagaaacggagcgaacgggtccgaagggccgaacctccgaagccagaagtcgtggatagcacggagtctatccccgtgtctgacgaggatagcgatgccatggtggacgatcctaatgatgaggacttcgtgccctttaggcccagacgaagtcctcggatgtctttgcgttcctccgtctctcaaagggccggaagatctgctgttggcacaaagatgacatgtgcacattgcagaacgcctttgcagaaaggccagaccgcataccagcgcaagggtcttccacaactcttctgtagcagcagctgtctcacaactttctccaaaaagcccagcggaaaaaagacctgcacattttgcaagaaggagatttggaataccaaggactctgtggtcgcacaaactggaagtgggggatcgttccacgaattctgcactagcgtctgtctgtccttgtacgaagcccaacagcagcgccctataccccagtccggagaccctgccgatgccacccggtgttcgatctgtcagaagactggagaagtccttcatgaagtctctaatggttccgtcgtccatcggctatgctccgatagttgcttctccaagttccgcgcaaacaagggcctaaaaaccaactgctgtgatcaatgtggagcatacatatacaccaaaactggttcacccggaccagagctcctcttccatgaggggcaacaaaaaaggttttgtaacactacttgcttgggcgcttataagaaaaaaaacaccagagtatacccatgcgtctggtgcaagacactctgtaaaaacttcgagatgctgtcccacgtggacaggaacggtaaaacttcactgttctgttctctgtgctgcacaacttcctataaagtaaagcaggcaggcctcacaggtcccccacgaccttgtagcttttgcagacgttccttgtctgacccttgttactacaacaaagttgatcgcaccgtgtatcagttttgctctccctcatgttggaccaagtttcagcgcactagtcccgagggaggcatccacctgtcctgccactactgccactccctctttagcggcaagccggaagtcttggactggcaagaccaggttttccaattttgctgccgcgattgttgtgaggattttaaaaggctgcggggtgttgttagtcagtgcgagcattgccgacaggagaaattactgcatgagaagctgagattctcaggcgtggagaaatcattttgctccgaaggttgtgtcctgttgtataagcaggacttcacaaaaaaactcggcctgtgttgcatcacctgcacttactgctcacagacatgtcaacggggagtaacagagcagctggacggctcaacctgggacttttgctctgaggattgcaaaagtaaatatcttctctggtactgtaaggcagctcgatgccatgcctgcaaacggcagggcaaattgctagagacaattcactggagaggtcagatccggcacttctgtaatcaacagtgtctgctgcgcttctactcgcaacagaaccaaccaaacctggacactcaatcaggacccgagtccctcttaaattcccaatcccctgagtccaagccacaaaccccttcccaaactaaggtcgaaaacagcaatacggtgagaactcctgaggaaaatggcaatttgggcaaaatccccgtgaagactcggtcagctcccacggcccctacaccgccaccgccaccgcctcccgctactcccaggaagaataaggcggctatgtgtaaacctttaatgcagaatcgcggtgtcagctgcaaggtcgaaatgaagtccaagggctctcaaaccgaagaatggaagccacaagtgatagtcctgccaatccccgtgcccattttcgtcccggtacccatgcacctctattgccaaaaggtcccagtgcctttttctatgccaatccccgttcctgtgcccatgttcttgcccaccactttagaaagcaccgacaagattgtagaaactatcgaggagcttaaagtgaaaataccctcgaatcctcttgaagccgatattctcgcaatggctgaaatgattgccgaggccgaggaacttgacaaagcctcttccgatctgtgcgacttggtctctaaccagtccgctgagggcctgctcgaggactgtgaccttttcggaccagccagagatgacgtgctggctatggctgtaaagatggctaacgtgcttgacgagccaggccaggacctcgaagctgattttccgaaaaaccctcttgatatcaacccatcggtggactttctgtttgactgcggactcgtggggcctgaagacgttagtacagagcaggatttacccaggactatgcgaaaaggacaaaaacggttagtgctcagcgagtcctgctctcgagacagcatgagcagccagccatcctgcacaggcctcaactatagctatggtgtgaatgcatggaagtgctgggtccaatctaagtatgcgaatggggaaacttcaaagggcgacgagctgagattcgggccaaagccaatgagaataaaggaagacatcctagcgtgctccgccgctgagctgaactatggcctggcccagtttgtgagggagatcaccagacctaatggcgagcgctacgagcccgacagtatttactacctgtgcctcgggatccagcagtatctattggagaataaccgtatggtcaatatctttaccgatctctattatcttacttttgtccaggaacttaataaatctctctccacctggcaacccactctgctaccaaacaacacagtctttagtcgagtcgaagaagaacatctgtgggagtgtaagcagttgggcgtctacagccccttcgtcctcctgaatactctcatgttctttaacactaaattctttgggctccagacggcagaggagcacatgcagctcagtttcaccaatgtggtgaggcagtcccggaagtgcacaacaccacggggaacgacaaaagtagtctcaatacgttactacgctccagtgcgacagagaaaaggacgggatactggtcctggcaagagaaagagagaagacgaggcacctatcctggaacagcgggagaaccggatgaatcccctgaggtgtcccgtcaagttctacgaattttatctgagcaaatgtccagagtccctaaggacgcgcaacgacgtattctacctgcaaccagaacggtcctgtatagccgagtcccctttatggtatagtgtcatacccatggaccgctcaatgctggaatcaatgctaaataggatactcgccgttcgggaaatttatgaggagctggggaggcctggggaagaggatctggattag

SEQ ID NO: 247949 - DNA, 4077 bp, synthetic construct
  misc_feature 1..4077: note = Description of Artificial Sequence: Synthetic coding sequence
  source 1..4077: mol_type = other DNA
atggatccttctgatttcccttctccatttgaccctctcactctccctgagaagccgcttgctggagatttgcctgttgacatggagttcggtgaagacctgctggagtcacagaccgccccaacgcgaggttgggcccctcctggcccaagtccgagctcgggggcattggatcttctggatactccggcaggcttggaaaaagacccgggagtcttagatggagccacagagctgctaggattgggaggcttattgtacaaagccccatctccgccagaggttgaccacgggccagagggtacacttgcttgggacgccggagaccaaacactggagcctgggccagggggacaaacccctgaagtagtgcctccagatcctggggctggggcaaacagctgctcacctgagggacttctggaacctctggctccagactcccccatcacgctccagtctcctcacatcgaggaagaagaaactacatctatagccactgcccgtcgcggaagtcccggacaggaggaggagctgccccagggacagccgcagagcccaaatgccccaccctccccatcagtgggagagacactgggtgacggaataaactcttcacagactaagccagggggaagctcccccccagcccacccttcactcccaggcgacggcctgaccgcaaaagcctctgagaaacccccagaaaggaaaaggagcgaaagggtgagaagagctgagccacccaaaccggaggtggtagattccactgagagtattcctgtatctgatgaggattcggacgctatggtggacgacccaaacgacgaggacttcgtccccttcagacccagaaggagtccgaggatgagcctgcgctcgtctgtcagtcaacgcgcagggagatcagcagtgggaaccaagatgacctgcgctcattgccgcacccccctgcagaaaggtcaaactgcttaccagcgtaaagggttaccccagctgttctgtagtagctcctgcctgaccaccttttccaaaaagccatctggaaaaaaaacttgcactttctgtaaaaaagagatttggaataccaaggactctgtggtggcccaaacgggcagtggcggtagtttccatgaattctgtacaagcgtttgcctgagcctttatgaagcccagcagcaacgcccaattcctcagtctggagatcccgcagatgccactaggtgttccatctgtcagaagacaggggaggtgttacacgaagtgagcaatgggagcgtggtgcaccggctctgcagtgatagctgtttctccaagtttagagcaaacaagggcctcaaaactaactgctgcgatcaatgtggagcatacatctataccaagaccggatcccccggtcccgaactccttttccacgaagggcagcagaaaagattctgcaataccacttgtcttggcgcatacaagaagaaaaacaccagggtgtacccatgtgtctggtgcaagaccctgtgcaagaatttcgaaatgctgtcccatgtcgaccggaacggtaagactagccttttttgttcactttgctgtacaaccagctacaaggtgaagcaggccggactgacggggcctccaaggccgtgttcattctgcaggaggagtctttccgatccatgctattataacaaagtagatcgcacagtataccaattctgctctccatcctgctggacaaaatttcagcgcacctcccctgaaggcggtattcacttaagctgccattattgtcatagcctgttctcaggcaaaccagaggtattggactggcaggaccaagtgtttcaattttgttgtcgagactgctgtgaggattttaaacgactgaggggggtggtgtcacagtgtgaacattgccgccaggaaaagctgttgcatgaaaaactcagattctctggggtggaaaagtcgttttgctccgaagggtgtgtccttctgtataaacaggattttacaaaaaaattgggattgtgttgcataacatgtacgtactgtagtcagacttgtcaaaggggagtcacggaacagttagacggcagcacctgggacttctgcagcgaagactgtaaatctaaatacctactctggtactgcaaggctgcacgctgccatgcctgtaagaggcagggaaagcttctggagactatccactggaggggccagattagacatttttgcaaccaacagtgtctcctccggttctatagccagcagaaccagcctaatttggacacccagtcagggccagaaagcctcttgaactctcagtcccctgagtcgaagccccagacaccttcacagaccaaagtggaaaattcgaacaccattcccgttaagactagatccgcgccaactgcgcctacacctcctcctcctccacctccagccactcccagaaaaaataaggccgcaatgtgtaaaccgctgatgcagaatcgtggggtgagctgcaaggtggaaatgaaatcaaagggtagccaaaccgaggagtggaaaccccaggtgatcgtccttcctatccctgtgcccattttcgttccagtccccatgcatctgtattgtcagaaagttcccgtgccctttagtatgccaatccctgtgcctgtgcccatgttcttacctaccaccctggagagtactgacaagatcgtagagaccattgaggagctcaaagtgaagattccttccaatccattagaggcagatatcttagccatggcagagatgattgccgaagctgaagagctcgataaggccagttccgacctctgtgacctcgtttccaaccaatcggccgagggcctgctggaagactgtgacctttttggacccgcacgcgacgatgtactggcaatggcggtaaaaatggcaaatgtactcgatgaacccggtcaggatctggaagctgatttccctaagaatccgttggacattaacccctcagtggacttcctttttgattgcggtcttgtgggacctgaggacgtgtccactgaacaggaccttcccaggaccatgaggaagggacagaaaaggttggtgctgagtgaaagttgcagtcgcgattccatgtctagccagccatcttgtaccggactgaactacagctatggcgtgaacgcctggaagtgctgggttcaaagcaagtacgccaacggcgagacgagtaaaggcgacgaactccggtttggcccaaagccaatgagaataaaagaggacatcctagcttgttctgcggcagagttaaattacggtctggctcaattcgtgcgagaaattacaagacctaatggagaaaggtacgagcctgactctatctactacctgtgcttaggaattcaacagtatctcctggaaaacaaccgtatggtgaacatttttacagatctttactatctcactttcgtccaggaactgaataaaagtctgtcaacgtggcagccaacattactgcctaacaacaccgtgttctcaagggtggaggaagaacacctgtgggaatgtaaacaacttggggtatactccccctttgtgctgctcaacacgttaatgtttttcaatactaaattcttcgggctgcagactgctgaggaacacatgcaactctcgttcacaaacgtcgtcagacagagcaggaaatgtactacgccccgaggcaccaccaaggtggtctctattagatattacgctcctgtgcggcaaagaaaaggaagagacacgggtccaggcaagagaaagagggaagacgaggccccaattctggagcagcgggaaaataggatgaacccccttcgttgcccagtcaaattttatgagttctacctgtcaaagtgtccggaaagtttgcggacgaggaacgatgtgttttacctgcagcccgagcgatcgtgtattgcggaaagccccttatggtattccgtgatacccatggacaggtctatgctggagagcatgctgaaccgaattctggccgtgcgcgaaatttacgaggagcttgggcgaccaggagaggaggaccttgactag

SEQ ID NO: 247950 - DNA, 2112 bp, synthetic construct
  misc_feature 1..2112: note = Description of Artificial Sequence: Synthetic coding sequence
  source 1..2112: mol_type = other DNA
atggaattcgtgagcggctacagggatgagttccttgactttaccgctctcctgttcgggtggttccggaaattcgtagctgaaaggggcgctgtgggaacctccctagaggggagatgccggcaactggaagcccagataagacgcctgccacaggacccagcgctatgggttttacacgtactgccaaaccattctgtcgggatatcactggggcaaggcgctgaaccagggcctgggcctggcctggggactgcatggctgctgggcgataatcctccgcttcatctccgtgacctgtcaccctatatatcctttgtctctctggaagatggtgaagaaggcgaagaggaggaggaggaggacgaagaggaggaaaaacgcgaggacggtggtgccggatctacggagaaagttgaaccagaggaagaccgtgagctggcccctaccagcagagagagtccgcaggagaccaatcccccaggcgagagtgaagaggcagcaagagaagcagggggaggcaaagatggctgcagggaggatagagtcgaaaacgaaaccagaccccagaaaagaaagggccagagatccgaggctgccccactccatgtgtcttgtctcctcctcgtgacagacgagcatggtactatattgggtattgatctgttggttgacggtgcccagggaaccgcctcatgggggtctggcactaaagatctggccccttgggcctatgccctcctgtgccattccatggcctgcccaatgggctccggagatcctaggaaacccagacaactcacagtgggcgacgcccgactgcacagggaattggagagtttagtgccccgactcggcgtgaaattagcaaagacaccaatgaggacatggggaccacgtccagggttcacatttgcctctctacgcgcaagaacttgtcatgtgtgtcaccggcattcattcgaggcaaagctgacaccttgtcctcagtgtagcgccgttctgtactgcggcgaggcctgcctaagggccgattggcagcggtgcccagacgacgtctctcacagattttggtgtccccgactcgccgctttcatggaaagagcaggcgagttggcaaccctcccattcacatacacagctgaggtcacaagcgaaacgttcaataaggaagcttttctggcgagtcggggtttgacgcggggatactggactcagctgagtatgctcattcccggtcctggcttctctaggcatcccagaggtaataccccctccctctcactgcttagagggggagatccttatcagctgctgcaaggcgacgggactgccttaatgccaccagtgcccccacatccgcctcgcggagtttttgtgcccgagctaaacattcagaataagcagtccctgaagattcatgtcgttgaggcgggtaaagaatttgatttggtgatggtgttctgggagcttctcgtgctgctccctcatgtggctttggaactgcagttcgtgggtgatggtctacctccagaaagtgacgagcaacatttcacccttcaaagagacagcctggaggtcagtgtcagacccggatcgggtattagcgcacggccatcttccggcacaaaagagaaggggggtagacgcgacttacagatcaaagtcagtgcaagaccgtatcacctgttccaaggcccaaaaccggatctggtgatcggctttaatagtggcttcgctttaaaggatacatggctgaggagtttaccacgtttgcagagcctcagagttcctgccttctttactgagtcctccgaatacagttgcgtgatggacgggcagaccatggctgtagcaactggcggtggaacctctccaccccagcctaatccctttcggagtccgttccggcttagagctgcagacaattgtatgtcctggtattgcaacgcattcatttttcatctggtgtacaaacccgctcagggctcgggagctcggcctgcacccggacctccccctcctagtcctacccccagcgctccacctgccccaaccagacgtaggcgcggagaaaagaaacctgggaggggagcgagaagacgtaagtag

SEQ ID NO: 247951 - DNA, 2229 bp, synthetic construct
  misc_feature 1..2229: note = Description of Artificial Sequence: Synthetic coding sequence
  source 1..2229: mol_type = other DNA
atggagttcgtgtccgggtacagagacgagttcctcgacttcaccgcgctgctgtttggctggtttcgaaaattcgtggctgagagaggagctgttggcacaagcctcgaaggtcggtgtaggcagctcgaagcacagattcgcagactcccgcaggaccccgctttgtgggtcctgcacgtactccctaatcatagcgtggggatttccttgggccaaggagctgaacctggtcccggtccaggcctgggcacagcgtggttgctgggtgataacccacccctgcacctaagagatcttagtccttatataagtttcgtgtccctggaggatggcgaagaaggagaagaggaggaggaagaggatgaggaggaggagaagcgagaggatggcggagcaggtagtactgagaaagtggaaccagaggaagacagggaattagcacccacaagtagagagtcccctcaggagactaatccaccgggagagtcggaggaagcggctagagaggccggaggcggaaaggacggctgtagagaggacagagttgagaacgaaaccagaccacagaaacgaaaaggccaaaggtccgaagccgctcccctgcacgttagctgtctgctgctcgtcacggacgaacatggtactattttggggattgatctgctagtggacggcgcacaggggaccgcctcctggggttctgggactaaagacctggcaccgtgggcgtatgccctgctttgccactctatggcatgcccaatggggtccggcgatcccaggaaacccaggcagctgacggtgggagacgccagactgcaccgcgagctcgaatcgctcgtaccccgactcggagtaaaattggctaagaccccaatgcggacatggggccctcgaccaggctttacctttgcgtccctgcgagcccgtacatgccacgtttgccataggcattcatttgaagctaagctcacaccttgtccccaatgcagcgccgttctctattgtggagaagcatgcctcagagccgattggcagaggtgtcccgacgacgtttcccacagattttggtgtccgaggcttgctgcttttatggagcgcgctggagagcttgctacccttccatttacttacacagcggaggtgacgagtgagaccttcaacaaggaagccttcttagcatctagaggtctcacccggggatactggacacagttatctatgctgattcccggtccaggcttctctagacatccgcgtggaaacacaccgagtctcagtctgctgagaggaggagacccctatcagcttcttcagggggatggcaccgcacttatgcccccagttccgcctcaccctcctcgaggggtcttcgggtcctggcaggattattatacctggagaggtctgagcctggattcacctatagctgtcctactcacataccctctaacagtgtactacgtgatcacacacttggtcccacagtccttccctgagctgaatatccaaaacaaacagtctctgaaaattcatgtagtcgaagccggaaaggagtttgacctcgtgatggtcttttgggaactcctggtgttgctgccccacgtggcgctggaacttcagttcgtgggagatggcctccccccagagagcgacgagcagcacttcaccctacagcgtgactccctcgaggtgtcagtccgcccagggtccggcattagcgcaaggccaagttcaggaacaaaagagaagggtggccgtagagaccttcaaataaaagtcagcgccaggccttatcatctgtttcagggccctaagcccgacttggtgatcggctttaatagcggcttcgcgcttaaagacacttggctgagatctcttcctcgactgcagtcactgagggttcctgcattcttcacagagagtagcgagtacagttgtgtgatggatggccagaccatggccgtggcgaccgggggtgggacctcgcctcctcagccaaaccctttcagaagccccttccgcctgcgggctgctgacaactgtatgagctggtactgcaacgcctttatatttcacctggtttataaaccagctcaaggctctggagctcggccagcgcctggccctccgcctccatctcccacaccatcagctcctcccgcaccgacacggaggcggagaggtgaaaagaaacccggtcgaggggctcgccgaagaaagtag

SEQ ID NO: 247952 - DNA, 684 bp, synthetic construct
  misc_feature 1..684: note = Description of Artificial Sequence: Synthetic coding sequence
  source 1..684: mol_type = other DNA
atgactgatttcaagctgggaatcgtgcgactggggcgtgtagccggtaagacgaaatataccctgatagacgaacaggatattccactagtggagagttactcttttgaagcaaggatggaagttgacgccgatggcaacggagcgaaaatctttgcgtacgcgtttgacaagaaccgtggccgaggttccggtcgactcttgcacgagttactgtgggaaagacatcgtggaggcgtggcacccggatttcaagtcgtgcacctgaatgctgtgacagtagacaatagattggataatcttcagctggtcccgtggggttggcgccctaaggccgaggaaaccagcagtaagcagagggaacagagtctgtattggttggccatccagcagctgcctaccgatcccatagaggaacaattcccagtgctcaatgtgactcgctactacaatgcgaacggcgacgtagtcgaagaggaagaaaattcatgcacatactacgaatgtcactaccccccatgtacagttattgaaaaacagctaagagaatttaacatatgcgggcgttgccaagtcgcaaggtactgtggcagccagtgccagcagaaggactggcctgcccacaaaaagcactgtagagaacgcaaacgtccttttcagcatgaactcgaaccggaaaggtag

SEQ ID NO: 247953 - DNA, 2127 bp, synthetic construct
  misc_feature 1..2127: note = Description of Artificial Sequence: Synthetic coding sequence
  source 1..2127: mol_type = other DNA
atgtccgagcgcggtatcaaatgggcatgtgagtactgcacatatgagaattggcctagtgccataaagtgtacaatgtgccgggcacagcgtcccagcggtactatcatcactgaggatcccttcaagtccgggtcaagtgacgtgggacgagattgggacccttcctcaactgaaggcggaagctctccactaatctgtccagatagcagcgccaggcccagggtgaaaagctcatactccatggaaaacgccaacaaatggagttgccacatgtgcacgtatctgaattggcccagggcaatccgctgtactcaatgcctgtcgcagcggagaactagaagtccgaccgagtctcctcaatctagcggaagcggaagcaggcctgtggccttctcagtggacccatgcgaagagtacaatgaccggaataagttgaacacacggacgcagcactggacctgctcagtctgcacctacgagaattgggcaaaagctaaaaggtgtgtggtgtgcgatcatccccgtccaaacaatatagaagccattgaactggcagagacggaagaggccagctcaattattaacgagcaggacagggccagatggcgtgggagttgtagctcaggaaactcccagagacgctcccccccagccactaagcgcgattctgaggtcaaaatggacttccagcgaatcgagctcgccggtgcagtgggatccaaagaggagttggaggtcgattttaagaaattgaaacagatcaagaataggatgaagaaaaccgattggctttttctaaatgcatgtgtgggcgtcgtcgagggagatttggccgctatcgaggcctacaaatccagcggcggagacatcgctagacagctgacagccgatgaagtaaggcttttaaataggccttctgcatttgatgtcgggtatacccttgttcacttagcgattcggttccagaggcaggacatgttggccattcttctcactgaagtctcccaacaggcagccaagtgtattccagctatggtgtgcccagagctgacagagcaaatccgaagggaaattgcagcttctctgcaccagcgcaaaggagatttcgcttgctatttccttacagacctggtgaccttcacactcccggctgacatagaagatctgcctcccaccgtccaggagaagctgttcgatgaggtcctagaccgcgatgtccagaaggaactcgaagaagagagcccaatcatcaactggtccctggagcttgccacgcgtcttgatagccggctgtacgcgctgtggaataggacggccggtgattgcctgcttgactctgtcctgcaggcgacttggggcatatatgacaaggactcggtgctgaggaaagccctgcacgatagcctgcatgattgcagccattggttctacacgcgttggaaggattgggagtcatggtactcccaatccttcggcttgcacttcagcttaagagaagaacaatggcaggaagactgggccttcattctctccctggcctctcaaccaggagcgtctctcgagcaaacgcacatattcgtgctggcccatatcctgcgcagacctataattgtatacggggtgaagtattataagtcttttaggggcgagacactgggatacactcgcttccaaggcgtttacctccccctcctgtgggagcagagcttttgctggaaatcacccatcgctttaggctacaccagaggacattttagtgcactcgtagctatggaaaacgatgggtatggtaacagaggcgctggcgcaaatctaaatactgacgatgacgtgaccattacgtttctccctttagtggattctgagcgaaaattgctgcacgtgcactttctgtcagctcaggaactgggaaatgaagaacagcaagagaaactcttacgcgagtggctggactgctgtgtgaccgaagggggtgtgcttgtggccatgcagaagagttcgagaaggagaaaccatcccttggtgacgcaaatggtggaaaaatggctggacaggtacagacaaatccgcccttgcacatctttgtccgacggggaggaagacgaagacgatgaggatgagtag

SEQ ID NO: 247954 - DNA, 2400 bp, synthetic construct
  misc_feature 1..2400: note = Description of Artificial Sequence: Synthetic coding sequence
  source 1..2400: mol_type = other DNA
atggagataccgaagctgctgcccgctcggggaaccttgcaagggggaggtggagggggtataccagcaggtgggggacgggtccatcgtggcccagattctcccgcaggccaggtcccaactcggagacttctgctccccagaggacctcaggatgggggacctgggagacggagagaggaggcttccacggcatcacgcggacctggcccttccctgttcgctcctcggccacatcagcctagcggcggtggagacgatttcttccttgtgctgttagaccccgtgggaggcgacgtcgaaacagcaggatctggccaagctgcaggcccagtactacgagaggaagcaaaggccggacccggactgcaaggcgatgagagcggcgctaatcctgcaggatgcagcgcccaggggccacactgtctttctgccgttcctacaccagcaccaataagtgcacctggccctgccgctgccttcgccggaaccgtgaccattcataaccaggacctattactacgcttcgagaatggtgtgctgaccctcgctactcctcccccacatgcatgggaacctggcgcagcacccgcacagcagccgagatgtttaatagcaccacaggccggattcccccaagccgctcatcctggcgattgccccgagctcagatcagacttgctcctcgctgagcccgcagagcccgcacccgctcccgctccgcaggaagaagctgagggccttgcagcagctctggggcctaggggactccttggttctggacctggtgtggtattgtatctgtgtccagaagccttatgtgggcagacctttgctaagaaacatcagctaaagatgcacctattgactcacagctcttcccaggggcaacgccctttcaaatgccccctgggaggctgtggatggactttcactacctcttacaagctaaagagacacctgcagagccacgataagttaaggccttttggctgcccagcagaaggatgtgggaagagtttcactacagtttataatctaaaggcacacatgaaaggacacgagcaagagaactctttcaagtgcgaagtatgcgaggagtcatttccgacccaggcaaaactgggcgctcaccagaggtcgcacttcgagcccgaacgcccttaccaatgtgctttctccggctgcaaaaaaacctttatcaccgtaagcgccctgttcagccacaacagggcgcattttcgggagcaagagttattctcctgctcatttcccggttgtagcaagcaatacgacaaagcttgcagactgaagatacatctccgttctcatacaggtgagcgcccttttctgtgcgattttgacggatgcgggtggaactttacatctatgagcaagctactgcggcacaagcgtaaacacgatgatgacagaaggttcatgtgtcccgtggagggttgtggtaagtcctttacccgcgctgagcacctgaaggggcacagtatcacacatctgggcaccaagcccttcgtatgccccgtcgctggatgttgtgctcggttttcggctaggtcaagtttgtacatccactcaaagaaacacctccaagatgtggatacctggaaaagcagatgtccgatatcctcctgcaacaagcttttcactagcaagcacagtatgaaaacccacatggttaaacggcacaaagttggtcaagacttgctggcccagctcgaagccgcaaacagtctgaccccctcctctgaactaaccagccagcgacagaacgacctgtccgacgcggaaattgtgagcctcttctcggacgtcccagattctacgtccgcagccctcctggatacggccctagttaactctggtatattgaccatagatgttgcaagcgtgtcttcaacgttggcgggtcatctgcctgccaataataataactccgtgggtcaggcagtggatcctccctccctgatggccacttctgacccaccccagtcactcgatacctccctgttcttcggcacagcagcgactggcttccagcagtcttcactcaacatggacgaagtttctagcgtttcagtgggtcctcttggctctctggacagcctcgctatgaagaatagcagccctgaaccacaggccctaacgccctcgtcgaaactgaccgtcgataccgatacactgaccccatcctccaccttgtgcgagaatagcgtctccgagcttctcacccccgcaaaagctgagtggagtgttcaccccaactccgattttttcggccaagagggagagacccagtttggctttccaaatgccgcaggtaatcacggttcacagaaagagaggaatctcatcactgttactggctcttcttttctcgtgtag

SEQ ID NO: 247955 - DNA, 2412 bp, synthetic construct
  misc_feature 1..2412: note = Description of Artificial Sequence: Synthetic coding sequence
  source 1..2412: mol_type = other DNA
atggagattccgaaactccttcccgcacgaggaactctccaggggggaggcggtggtggcattcctgctgggggaggcagggtacataggggtcctgatagtcccgctgggcaggttcctaccagacgactgctgctactaagagggcctcaggatggcggacccggtaggcgcagagaggaggctagtacagcctcccgtggtccaggcccttctcttttggctccaaggactgaccaacctagcgggggtggaggaggcggaggggatgacttcttcctggtgctcctggaccctgtcggcggagatgtagagaccgcagggtcaggccaagccgcaggacctgtcctccgagaggaagccgaagaaggacctggtctgcagggaggggaatccggtgctaaccccgcaggccctactgctttaggtccccgttgtctgtccgcagtcccaacacctgcccctatctcggctcctggcccagcagccgcattcgcaggcaccgttactatccacaatcaggatctcctgctgagatttgagaacggagtgctcaccctggccacgccaccaccacatgcatgggaacctggtgccgctccagcccagcagcctggatgcttgatagcccctcaggctggctttcctcatgctgcccaccctggcgactgcccggaattgccacccgatctcttactggctgagcctgccgagccagccccagcaccagccccagaagaagaagccgaaggcccagcagccgctctgggccctagaggacctctggggagcgggcctggagtggtgctctatctatgccccgaagcacagtgtggacagacgtttgcaaagaagcatcagctgaaggttcaccttctcactcacagcagcagccaaggtcagagaccattcaaatgcccactcgggggttgcggctggacattcacaacatcctataagcttaaaagacatctccaatcccatgataaactgcgcccatttggatgccccgctgagggctgcgggaagtcctttacgacggtctacaacctgaaggcgcacatgaaaggacacgaacaggagaattcgtttaagtgcgaagtttgtgaagagtcttttccaacacaagccaagttatctgcccatcagagatctcacttcgaaccggagaggccttatcagtgcgccttctccggttgcaaaaagacattcatcactgtatccgctttgttcagccacaaccgagcccattttagggagcaggagcttttctcctgttcattcccaggttgttcaaaacagtatgataaagcctgtcgactaaagatccatctccggagccacactggtgagcgacctttcctgtgcgatttcgatgggtgcggctggaatttcacctctatgtcaaaactcctccgccataagcggaagcacgacgatgacagacgcttcatgtgtccagtcgaaggctgtggtaagtcatttacccgtgccgaacacctgaaggggcactctataactcatctgggcaccaagccattcgtttgccctgtggctgggtgctgtgccagattctctgcaaggtcttccctgtacatacatagtaaaaagcatctccaggacgtcgacacgtggaagtcccggtgtcctatctctagctgcaataagctgtttacaagtaagcactcaatgaagactcatatggtgaagaggcacaaggttgggcaggacctgctggcacagctggaggccgctaatagcctcacaccatcatcagaactgactagtcagagacaaaatgacttgtctgacgccgagatcgtatccctgttttcagatgtgccagattcaacctccgctgctctgctcgacaccgccttagtgaattccgggattctgacgattgacgtggccagtgtgagttcaacactggcaggacatctacccgcaaataacaataattcggtcgggcaggccgtcgacccaccttcattaatggccactagcgacccccctcaaagtttagacactagtctattttttggtactgcggctaccggctttcagcagagttcactgaacatggatgaggtttcatcggtgtctgttggtcccctggggtccttggactctctggcaatgaagaactcctcgccagagccccaagcattgacacccagcagcaagttgaccgtggacaccgatgcgctaactccttcttctacactgtgcgagaactccgtgtccgaactgttgacccctaccaaggcagagtggaatgtgcaccctgactcagatttctttggacaggaaggggaaacacagtttgggttccctaatgccgctggcaatcacggttctcagaaagaaactgacctgatcactgtcactggatcctcctttctggtctag

SEQ ID NO: 247956 - DNA, 2622 bp, synthetic construct
  misc_feature 1..2622: note = Description of Artificial Sequence: Synthetic coding sequence
  source 1..2622: mol_type = other DNA
atggccagccggagaaagagcaccactccctgtatggtgctagcaagcgaacaagatcccgatttagaattgatctcagatttagatgagggcccaccagtacttacgccagtagaaaacactcgggctgagtctattagcagtgatgaagaggtgcacgagtccgttgacagcgacaatcagcagaacaagaaggtggaggggggttacgagtgtaaatattgtacttttcaaacgccagatttgaacatgtttacttttcacgtggatagtgaacatcccaatgttgtgttaaactcctcctatgtatgcgtggaatgcaatttcttgacgaaacggtacgacgcactcagtgagcacaacctgaaatatcaccccggagaagaaaatttcaaactgacgatggtgaagcgcaataaccaaactattttcgagcagacgatcaatgaccttacatttgatggttccttcgtaaaagaggaaaatgcagagcaggccgagtccactgaggtgtcaagcagcgggattagtatcagcaagacgcccatcatgaaaatgatgaagaacaaagtggagaataaacggatcgccgtgcatcataactcagtagaagacgtcccggaagagaaggaaaacgaaattaagccagacagggaagagattgtggagaatccctcctcctccgcaagcgagagtaacacctcgacatccattgtgaacagaatccatcccagtactgcaagtacggtcgtcaccccagccgctgttctgcccggactcgcccaggtcattactgcagtctctgcacagcaaaacagcaaccttatccccaaagttctgataccggtgaacagcattccgacatataacgctgctctggataacaatccactgctacttaatacgtacaacaagttcccgtacccaaccatgtctgaaattaccgtactgtctgctcaagctaaatacaccgaggaacagattaagatctggttctctgcccagagactaaaacacggcgtgagctggacgcccgaagaggtcgaagaagccaggcgaaagcaatttaacgggacagtgcacacagtgcctcaaactattaccgtcatccccacacacatttcgaccgggtctaatggcctgccatcaattctgcagacctgccagatcgttggccagccaggcctcgttctcacccaggttgcaggcacaaatacactcccagttacggcacctattgctctaactgtagctggcgtgccgtcacagaataatatccaaaaatcgcaggtcccagccgctcagcccacagccgagaccaagcccgcaaccgcagccgtaccgacctcccagtccgttaaacatgagaccgcgcttgtgaatcctgattcttttgggatccgcgcaaaaaaaactaaagaacaactcgctgagcttaaggtatcatacttaaaaaaccagttcccgcatgattcagaaatcatcagattaatgaaaattacgggcctgacgaaaggggagatcaaaaagtggttctcagatacgcgttacaaccagcgaaacagcaagtccaatcagtgcctgcatctcaataacgactctagcaccacaattattatcgacagcagcgatgaaacgaccgagagccccaccgtgggaacagcgcagccaaagcagagctggaatcctttcccggatttcacccctcaaaaatttaaggagaaaaccgcagaacagttgagggttcttcaggcctcctttctcaactccagcgtgctgacggacgaggaactgaatcgactgcgcgcacagacaaaactgaccagaagagagattgacgcctggttcaccgagaaaaaaaaatccaaagcgctaaaagaggagaaaatggagatagacgaatccaacgctgggtcaagcaaagaggaggccggtgagacctcgcccgctgacgagagcggagcgccaaaatctggtagtacgggaaaaatttgtaaaaagactcccgagcagcttcatatgctcaaatcagccttcgttcgcacacaatggccttctccagaggaatacgataagctggcgaaggaatctggcctcgcgaggacagacatagtgtcttggtttggggacacacgctacgcgtggaagaacggtaacctcaagtggtattattactatcaaagcgccaattcctccagcatgaatggcctgagcagtctgagaaaacgcggacggggacgtcctaagggccgtggccgtggaaggcctagaggtcggcctagaggctccaagagaattaacaactgggacaggggacccagtttgataaaattcaagaccggaacagccatcctaaaagattattatttgaaacacaagtttcttaacgagcaggatctggacgaactggtgaacaagagccacatggggtacgaacaggtaagagaatggtttgctgagcgtcagaggcgatctgagctgggcattgaactctttgaggaaaacgaggaggaggacgaggtgattgacgaccaagaggaagacgaggaggaaaccgatgactctgatacctgggagccaccgaggcatgtgaaaaggaaattatcgaagtcagatgactag

SEQ ID NO: 247957 - DNA, 2622 bp, synthetic construct
  misc_feature 1..2622: note = Description of Artificial Sequence: Synthetic coding sequence
  source 1..2622: mol_type = other DNA
atggcttctaggcgaaagtccacaacgccctgtatggttctggcttcagaacaggacccagacctggagttgatcagcgatttggatgaaggccctcctgttcttaccccggtagaaaataccagggctgaaagtatttcctccgatgaggaagtccatgaatcggtggatagcgataatcagcagaacaaaaaggttgaaggcggatatgagtgtaagtactgcacattccagactcccgatttgaacatgttcacattccacgtggattccgaacatcccaacgtagtactgaactcctcatatgtttgcgttgagtgcaatttcttaactaagcggtatgatgccttatccgagcacaacttaaagtaccaccccggtgaggaaaacttcaagctgacaatggtcaagagaaacaatcaaactatcttcgagcagacgatcaatgatttaacttttgacggcagcttcgtgaaggaagaaaacgcagaacaggccgagagtaccgaagtgagctcttcgggcatctcaatatctaagacccctatcatgaaaatgatgaagaacaaagtggagaacaagcgaatcgccgttcatcataacagtgtggaggacgtgcccgaagagaaagaaaacgaaatcaagcctgaccgcgaagagattgtcgaaaatccgtcatccagtgcctcggagtcaaacacctccacaagcatagtgaaccgcatacaccccagcactgctagtactgtggtcaccccagccgctgtattgcccggtttagcacaggttataacagctgtttccgcgcaacagaactccaacctgatccctaaggtcctgatccccgtaaactccattcccacttacaacgcggctctggacaacaaccccttgctcctcaatacctacaataaatttccatatcctacgatgtcagaaattaccgtgctcagcgcccaggcaaaatacacagaggagcagatcaaaatttggttttctgcccagcgattgaagcatggggtgagctggacacccgaagaggtggaagaagcaagacggaagcagttcaatggaacagttcatacagtgccccagacaattaccgtcatccctacccacatcagcactggcagcaacggcctgccttctattttacagacgtgtcaaatcgtaggtcagcccggactggtcctgacacaagtcgctggcaccaacaccctgcctgtcacggcgccaattgcactgacggtagccggagtgcccagtcagaataacattcagaagagccaggtaccagctgcccaacctacagctgagactaagcctgcaacagctgcagttcctacctcccagtctgtcaagcatgaaacagccctggtaaaccctgattccttcggcatccgggcaaagaaaaccaaggagcagctcgccgagttgaaagtttcctacctgaaaaatcaatttccacatgactccgaaattatccggcttatgaagattacgggacttacaaagggagaaattaaaaagtggttttccgatacccgatacaaccaacgcaacagtaaatctaatcagtgtcttcacctgaacaatgattccagcacgaccatcattatcgactccagtgatgagacaaccgaaagcccaacagtcggaacagcacagccaaaacagtcatggaacccctttcctgacttcactcctcagaagttcaaggagaagactgccgagcagctcagagtgctacaggcttcctttcttaattctagcgtcttaacagatgaagaactgaaccgacttagagctcaaaccaaactgactagacgcgagatagacgcttggtttaccgaaaaaaaaaagagtaaagcactgaaagaagagaagatggagattgacgaatccaatgccggaagctctaaggaagaggccggagaaacttcacctgctgacgagagtggcgctcctaagagcggctccacaggcaagatctgcaagaagaccccggaacagctccatatgctgaagagtgcatttgtcaggactcagtggcccagcccggaagagtacgataaactcgctaaagagagtggtcttgcaaggaccgacatcgtgtcttggtttggggacacccgctatgcatggaagaacggaaacctgaagtggtactattattaccagagcgcaaactcctcttccatgaatggcttatcttctctacggaagcgcggacgcggtcgccctaagggtcgtggtagaggccgtcccaggggtcggcctcgcggtagcaagaggatcaataactgggataggggccctagtctcataaagtttaaaaccgggaccgccatccttaaggattactatcttaaacacaaatttctcaatgagcaagacctggacgagctcgtcaacaaatctcacatgggctacgagcaggtccgagagtggtttgcagaacgtcagaggcgctcggaactgggcatagagttgttcgaagagaacgaggaagaagatgaggtcatcgacgatcaggaggaggatgaggaggaaaccgacgacagcgatacctgggagccccctcgacatgttaagcggaagttatcgaagtccgatgattag

SEQ ID NO: 247958 - DNA, 2622 bp, synthetic construct
  misc_feature 1..2622: note = Description of Artificial Sequence: Synthetic coding sequence
  source 1..2622: mol_type = other DNA
atggcgtccaggaggaagagcaccacaccgtgcatggtgttggcgagtgagcaggacccggatctcgagttaatttccgatctagatgaaggaccgcctgtccttactcccgtggagaacactagggcagagtcgatctcctcagacgaggaagtccacgaaagtgtggattctgataaccaacagaataaaaaggtggaaggcggatatgagtgcaagtattgtactttccagactcctgatttgaatatgtttacgttccacgtagactccgagcatccaaacgtggtactgaactctagttatgtctgtgtggagtgcaacttcctgacaaagagatatgacgcattgagcgagcataatctgaagtaccatcccggagaggaaaactttaagctgacaatggtaaaacgaaacaaccaaactatcttcgaacaaacaatcaatgatctaacttttgatggctcttttgttaaggaggaaaatgccgaacaggccgagagtaccgaggtaagcagctccggcatctcaatttccaaaacccccattatgaagatgatgaaaaataaagtggagaataaaaggatagctgttcatcacaactctgtggaggacgtcccggaagagaaagagaatgagatcaaacccgacagagaggagatcgtggagaaccccagttcctccgcctccgagtcaaacacctccacttctattgtgaaccgtatacaccctagcaccgcttccacagtggtcaccccagcagctgtgttacccggactggctcaggtgatcactgccgtatctgcccagcaaaactctaacttgattcccaaggtcctgattccagtcaattcaatccctacttataatgcagcactggataataaccctctgcttctcaatacatataataaatttccctaccctacaatgtccgaaatcactgtgctctctgcacaagcaaagtatactgaagaacagatcaaaatttggttttctgcccaacgcctgaaacatggagtgagttggactcctgaagaggtcgaggaagcacgaagaaaacagttcaatgggactgtccacaccgtgccccaaacaatcactgtcattccgactcacatctcaacgggatccaacgggctcccttcaattttacagacatgccagattgtgggacaacctggcttagttctcacacaagtagctggtacaaatacactgccagttacggcccctatcgctctgaccgttgctggcgtgccaagccagaacaacatacagaaatcacaggttccggcagcccaacccacggcagaaacgaagccagccacggccgcagtaccaacttcccagtcagtaaagcatgaaaccgcgctagtgaacccagattcattcggcattagagccaagaagacaaaggagcaactggctgaactcaaagtctcttatttaaaaaaccagttcccccacgacagcgagataatccggctcatgaagatcactggactgaccaaaggagagattaagaagtggttctctgacacccggtataatcaacgtaactcaaaatctaaccagtgtctgcacctgaacaacgacagctccaccaccatcatcattgattcctccgacgagacaaccgaaagcccaacggtggggactgcgcagcccaagcagagctggaatccctttccagatttcacaccacagaagttcaaggagaaaaccgcagaacaactgcgcgtgttgcaggcttcctttctgaactcctccgttttaactgacgaggagctcaaccgacttcgggctcagaccaagctgaccagacgagagatcgatgcgtggttcactgagaaaaaaaagtcaaaggccctgaaagaggagaagatggaaatagacgaatccaacgcagggagctccaaagaggaagccggagaaacatctccagcagatgaatctggggctcccaagagtgggtccaccggcaagatttgcaaaaagacccctgagcagcttcatatgctgaagtcggcctttgtgcgcacacagtggcccagcccggaggaatacgataaacttgcaaaagaaagcgggctggctcggacagatatagtatcctggtttggagacactcgttatgcatggaaaaatggcaatctgaaatggtactattactatcaatccgccaacagcagctccatgaatggattaagctcacttagaaagagaggcaggggccgacccaagggacggggtagggggagaccaaggggcaggcccagaggatccaagcggatcaacaactgggaccggggaccaagtttgatcaagttcaagacgggcaccgctattctgaaggattattatttaaagcataagtttctgaacgagcaagatctggatgagttggtgaataagtcacacatgggatatgaacaggttcgtgaatggtttgcagaaagacagagacgatcggaactagggattgaactgttcgaagagaacgaggaggaagatgaagttatcgacgaccaggaggaggacgaagaagaaactgacgactccgacacctgggaacccccacggcatgtgaagagaaaattaagcaagtccgacgattag

SEQ ID NO: 247959 - DNA, 1497 bp, synthetic construct
  misc_feature 1..1497: note = Description of Artificial Sequence: Synthetic coding sequence
  source 1..1497: mol_type = other DNA
atggctagtaagcgcaagtccacaacaccttgcatgattccagtgaaaacagtggtcctgcaagacgctagtatggaagcccagcctgccgagacactgccagagggaccccaacaagatctccctcccgaggctagcgcagccagttccgaagctgctcagaacccttcctccacagatgggagtaccctggcgaatggacatcggagtacgctagatggatacttatactcttgcaagtactgtgacttccgaagccatgacatgacccagtttgtcggccacatgaattccgagcacacagatttcaacaaagatcctacatttgtctgttccggatgttcgttcctggctaagactcctgaagggctctcactacataatgcgacctgccattctggagaggctagcttcgtgtggaatgtcgccaagcctgacaaccatgtagtggtggaacagtccatacctgaaagtacttccacaccggacctggcgggtgagccaagcgccgaaggcgctgatggccaggcagaaattatcatcacgaaaactcccatcatgaaaatcatgaaaggcaaggccgaggctaagaagatacatactctcaaggaaaatgtgcccagccagcccgtgggcgaggctctgccgaagcttagcaccggagaaatggaagttcgagaaggcgatcattcatttatcaatggcgctgtgcccgtcagccaggcttcggccagcagtgccaagaacccacatgcggcaaatggaccacttattggcacagtacctgtcctgcccgctggtattgcccagtttctgtctctgcagcagcagccgcctgtgcacgcccaacaccacgtgcaccaaccactccccactgcaaaagcgctgcccaaggtaatgattcccctctcctccattccaacttacaatgccgcaatggatagcaactcctttctgaaaaacagctttcataaattcccctaccccacgaaagctgaactgtgctaccttaccgtggttacaaaataccctgaagaacagctcaaaatttggtttaccgcccaacgcttgaagcaggggatctcttggagtcccgaggaaatagaggacgctaggaagaaaatgttcaatacagtgatccagagtgtaccgcagccaacaattactgttctcaatacacctctcgtggcctccgctggaaatgtccagcacttaatccaggccgcactgcctggccacgtcgtcggacagcccgagggcactgggggtggtctgctcgtgacccagcctcttatggccaacggcctgcaggccaccagctctcctcttcccttaacagtcaccagcgtgcccaaacagcccggagtggccccaataaacacagtgtgcagcaatacaacatctgccgttaaggtcgtcaatgcagcccagtcactcctgactgcttgccccagtataacctcacaggcctttttagacgcttccatatacaaatag

SEQ ID NO: 247960 - DNA, 291 bp, synthetic construct
  misc_feature 1..291: note = Description of Artificial Sequence: Synthetic coding sequence
  source 1..291: mol_type = other DNA
atggcttccaagcgaaaatccacaaccccttgtatgatccctgtaaagacagttgtgttgcaggatgccagcatggaagctcagcctgctgaaacccttcctgaaggccctcagcaagacctcccaccagaggcttctgcagccagttccgaggctgctcagaatcctagtagcactgacggaagcactcttgctaatggacacaggtcaactctggacgggtatctatactcatgtaaatactgcgacttccgctcacatgacatgacccagttcgtggggcatatgtag

SEQ ID NO: 247961 - DNA, 2244 bp, synthetic construct
  misc_feature 1..2244: note = Description of Artificial Sequence: Synthetic coding sequence
  source 1..2244: mol_type = other DNA
atggaagtgcgtgaaggggatcacagctttatcaacggggctgtcccggtgtcccaggcctcagcgagtagcgctaagaacccccacgcagccaacggacctctcatcggcaccgtgcctgttctgcctgctggcatcgcccagttcctgagtcttcaacagcaaccccctgtccacgctcagcatcacgtgcaccagcccctaccaactgctaaagccctcccgaaagtgatgattcctctgtcatctatcccaacgtataacgctgctatggatagtaattcatttttgaagaattccttccataaattcccttatccaacgaaggcagagttgtgttacttaacggtggtaaccaagtatcccgaggagcagctcaagatctggtttacagcccaaagactgaaacaaggaatatcctggagtcctgaggagatagaggacgcccgaaagaagatgtttaacaccgtcatccagagcgtaccccagccaacaattacggtcctgaacacacctctggtggcaagcgctggtaatgtccagcatctgatccaggctgcactgcctggtcatgtagttggacaacctgaagggacaggcggagggttgctggtaacccagcccctgatggctaacgggcttcaggccactagttcgccactaccactgacagtgacgtcggttcccaaacagcccggtgttgctcccatcaatacagtttgcagtaacacaactagtgctgtgaaggtagttaatgctgcccagagcctcctgacagcatgtccttcaatcacaagccaggcctttcttgatgccagcatatacaaaaataaaaaaagccatgaacagctaagcgccttaaaagggtctttctgtaggaatcagttccctggccagagtgaggttgagcaccttacaaaggtcacggggctgtctacacgcgaggtccgaaaatggttttccgatcgcagataccactgtcggaatttgaagggttcaagggccatgattccaggggaccactctagcattatcatagacagcgtgcccgaggtgtcctttagccctagctccaaagtgcccgaggtgacctgtatccctactactgctaccctggccactcaccctagcgcaaaaaggcagagttggcaccagaccccagatttcactccgactaagtataaggagcgcgcacccgagcagctgcgcgctctggagtcatcttttgctcagaatccccttccgcttgacgaagaattagaccgactcaggagtgagaccaaaatgacccgacgggaaatcgactcttggttcagcgaaaggcgtaagaaagtgaatgctgaagaaactaaaaaagccgaagaaaacgcttcacaggaggaagaagaagcggcagaggacgaaggtggcgaggaggaccttgcttccgaattaagggtgtctggagagaatgggagtctggaaatgccctcttcccacattttggctgagagaaaagtgtctcctattaagatcaatctgaagaacttaagagtcaccgaagccaacgggagaaatgagattccgggactcggagcatgtgatcctgaggacgatgagagtaacaagctggcagagcagctgcccggaaaggtgtcctgcaaaaagacagctcagcaacgccacttgcttaggcaactcttcgtgcagacacagtggccgtccaaccaagactatgattctattatggcgcaaacaggtctaccgaggccagaagtggtgcggtggttcggggattctcgttatgccctcaagaacgggcaactgaagtggtacgaggattacaagagagggaattttccccctggcctccttgttattgctcctgggaacagagagctcctgcaggactactacatgacccacaaaatgttgtacgaagaggacctccagaatttgtgtgataaaacccagatgtcatcacaacaggtcaagcagtggttcgcagagaagatgggtgaggagaccagggctgtggcagacacaggatctgaggaccagggcccaggcaccggtgagctaaccgcagtgcacaagggcatgggggatacttatagcgaggtgagtgaaaatagtgaatcttgggagccacgcgtgccagaggcatcaagcgagccattcgatacgtcaagtcctcaggccggtagacagctggggtcatggtccctgagctcacagcccctccccagcctgctcacactatag

SEQ ID NO: 247962 - DNA, 2871 bp, synthetic construct
  misc_feature 1..2871: note = Description of Artificial Sequence: Synthetic coding sequence
  source 1..2871: mol_type = other DNA
atggcctctaagcgcaagtcgaccactccatgcatgattccagtcaagactgtggtcctgcaggatgcctctatggaggcccaaccggctgaaaccttaccagaggggcctcaacaggatctgccacctgaggcgtctgccgcttcaagcgaggcagcacagaatccctcgtccactgacggctccaccctggccaatgggcaccgatcaaccctcgatggttacctatactcatgcaaatactgcgacttccgctcacacgatatgacacagttcgtggggcacatgaacagtgagcatacagattttaacaaagaccctacattcgtctgttccggctgttcttttctcgctaaaacccctgagggcctcagcctccataatgcaacctgtcactcaggcgaagcctccttcgtgtggaatgttgctaagcccgataatcacgtcgtggtggaacaatctattcccgaaagcacaagtacccctgatctggctggagagccttctgcggaaggagcggatggacaggccgagatcatcatcacgaagacaccaataatgaaaatcatgaagggtaaggctgaagctaaaaagattcatacattgaaggagaatgtgccaagccagcctgttggtgaggcattgccaaaactgtctactggggaaatggaagtgcgcgagggcgaccacagctttatcaacggagcagtaccggtgtctcaggcctccgcctcgtccgccaaaaatccccacgccgctaatggacctctgattggcactgtgcctgtcctgcctgccggaatcgcacaattcctatccttgcaacagcaaccaccagtccatgcccagcaccatgtgcatcagccactccccacagctaaggcacttccaaaggtcatgattccactgtcatccataccgacttataatgccgcaatggatagcaacagctttcttaagaatagcttccataaattcccctaccctacaaaggctgagttatgttacctaacggtggttacaaaatatcctgaggagcagctaaagatttggttcacggctcagcgtctcaagcagggcatcagctggtccccagaggagattgaagacgccaggaagaaaatgttcaacactgtcatccagtctgtgcctcagcctactattacagtgttgaacacacctctagtggcctctgcgggtaacgtacaacatctcatccaggcagccttgcccggacacgtggtcggccagcccgaagggaccggcggtgggctcctggtgacgcagcctctgatggccaatgggcttcaggcaacatcaagtccactgcctctgactgttacttctgttccaaagcaacctggggtggctcctatcaatacggtgtgttcaaatactacctctgccgttaaggtggtgaatgctgcccagtctttactgactgcctgtccctcgattacatctcaggccttcctggatgccagcatctataaaaataagaagtcccatgaacaactgagtgccctgaaaggttccttttgcagaaaccagttccctggtcaatccgaagtggagcatctcacgaaagttaccggattaagcacaagggaagtgcgaaagtggttctccgatagaagataccactgtcggaacttaaagggctcaagggcaatgattcctggggaccattcatctattattattgactcagtgccagaagtgagcttcagcccgtctagtaaggtgccagaggtgacctgcattccaaccactgctaccctggccacacacccctcggcaaaacgtcagagctggcaccagacgcctgactttacacccacaaagtacaaagagcgagctccagagcaacttcgcgcactggagtcttccttcgcacagaacccactgcccctggatgaggagctcgatagactgcggtctgagaccaaaatgactcggagggaaatagattcctggttttccgaacgaaggaagaaagtgaacgccgaggagacgaagaaggctgaagagaacgcctcccaggaggaagaggaagccgctgaagatgaagggggagaagaggacctcgcgtctgagctccgcgtctctggggagaacgggtctttggagatgccatcctcccatatactcgcagagagaaaggtaagtcccattaagatcaatttgaagaatcttcgcgtgacggaagccaacgggagaaatgaaattccaggcctgggagcatgtgatccagaggatgacgaatctaacaaacttgccgagcagcttccgggaaaagtgagctgcaagaagaccgctcagcagcgccatctgttacggcaactcttcgtgcagacacagtggcccagtaaccaagactacgatagcattatggcccagactgggttgccaaggcctgaggtggtgagatggtttggagactccagatatgctctgaagaatgggcagctaaaatggtacgaagattataaaaggggaaacttccccccagggctcctggtcatagcgcctgggaacagagagttgctccaggactattatatgacgcataagatgttatatgaagaggatctccagaatctctgcgataaaacacagatgagttcacagcaggtgaaacagtggtttgccgaaaagatgggggaagaaaccagagcggtggccgacacaggttcagaggatcaggggcctggaactggcgagctgacagcggtgcacaagggaatgggcgatacttactccgaggtgagcgagaattcagagagttgggagcctcgggtgccagaagcaagttctgaacctttcgatacctcttctccccaagccggtcgtcagctcgagactgactag

SEQ ID NO: 247963 - DNA, 141 bp, synthetic construct
  misc_feature 1..141: note = Description of Artificial Sequence: Synthetic coding sequence
  source 1..141: mol_type = other DNA
atggcctcaaaacggaaatctacaactccttgcatgatcccagtgaaaacagtggtcctgcaggacgcgtccatggaagcccagcctgccgaaacactgcctgaaggaccccagcaagacttgccacctgaagcatcttag

SEQ ID NO: 247964 - DNA, 1497 bp, synthetic construct
  misc_feature 1..1497: note = Description of Artificial Sequence: Synthetic coding sequence
  source 1..1497: mol_type = other DNA
atggcatccaaacgcaaaagcactaccccttgcatgatcccagttaagacggttgtcctgcaagacgccagcatggaggcccagccagctgaaacgctccccgagggtcctcagcaggatctgccccctgaagcatctgctgctagttcagaagctgcacagaacccttcctctaccgacggctccacgttagctaatgggcacaggtctacattggatggctacctgtatagctgtaagtattgtgacttcagatcgcatgatatgactcaattcgttggccacatgaattcggagcatacagacttcaacaaggatcccactttcgtgtgctctggatgttctttccttgccaagacgccagaagggcttagtctgcataacgccacctgccactcgggcgaagcgtcattcgtttggaatgtcgccaagcccgataaccacgttgtggtggagcagtccatccctgaatccacatctacacccgacctggccggtgaaccctcagctgaaggagctgacggtcaggcggagataatcattacaaaaacccccatcatgaagatcatgaagggaaaagcggaagcaaaaaaaatccatactctgaaggagaatgtgcccagccagcccgtgggtgaagcgctgcctaaattgtcaacaggagaaatggaagtcagagagggggaccacagtttcattaatggtgcagttccggtgtcacaggctagtgcttcaagcgccaagaacccccacgccgctaatggtccgctaattgggactgtccctgtgttaccagcaggaattgcccagttcctgtccctgcagcagcagccccctgtacacgctcagcaccacgttcatcagcctctacctacagcaaaagcattaccaaaggttatgatccctctctcctccatccctacctacaacgccgctatggatagtaactcattccttaaaaactctttccacaagtttccataccccacgaaagcggagctgtgctatttgacagtggtcacgaaataccccgaggaacagctcaaaatctggttcaccgcgcaacggcttaagcagggcatcagctggagtccagaagagattgaagacgctcgcaagaagatgttcaataccgttatccaaagtgttcctcaacccactataactgtgctcaacacccccctcgttgcttcagctgggaacgtacagcatctgatccaggccgcactacccggtcatgtagtggggcagcctgaagggacaggaggcggactcctcgtgacacagcctctcatggccaatggcctccaggcaacaagcagccccctgccactcactgtaaccagtgttcccaagcagcctggggtggcccctattaacaccgtctgctccaatacaacttcagctgtcaaagtggttaatgctgcccagagccttctcaccgcctgcccttctattacctctcaggcctttttagacgcatctatttacaagtag

SEQ ID NO: 247965 - DNA, 147 bp, synthetic construct
  misc_feature 1..147: note = Description of Artificial Sequence: Synthetic coding sequence
  source 1..147: mol_type = other DNA
atggcaagtaagaggaagagcaccactccttgcatgatccccgtgaaaacagtagtactgcaggacgcttctatggaagcccaacctgctgagaccttaccagagggccctcaacaggacttacctcccgaggcatctgctgcctag

SEQ ID NO: 247966 - DNA, 273 bp, synthetic construct
  misc_feature 1..273: note = Description of Artificial Sequence: Synthetic coding sequence
  source 1..273: mol_type = other DNA
atggcctccaaacgcaaaagcaccacaccgtgtatgatacccgtgaagactgtggttctgcaagatgcctcgatggaagcacagcctgcagagaccttgcctgaaggccctcagcaagatctgcccccagaagctagtgcagcgtcatctgaagcggcacagaacccgtccagcacagacgggtctaccctggccaatggtcatcgatctacactggatggctacctgtactcttgtaagtattgtgattttcgatcccatgacatgacgtag

SEQ ID NO: 247967 - DNA, 357 bp, synthetic construct
  misc_feature 1..357: note = Description of Artificial Sequence: Synthetic coding sequence
  source 1..357: mol_type = other DNA
atggcgagcaaacgaaagtcaacaaccccctgtatgatcccggttaaaacggttgttcttcaagatgcttcaatggaggctcaaccagctgagacccttcccgaaggaccacaacaggatttgccacccgaggcatctgccgcttccagcgaggcggctcagaaccccagcagcaccgacgggtcaactctcgccaacggtcacagaagtacactcgacggctatctttacagctgcaaatattgtgactttcgaagccacgatatgacacaatttgtggggcatatgaactctgagcatacagattttaacaaagatcccacctttgtgtgctccggatgcagctttctcgcttag

SEQ ID NO: 247968 - DNA, 2871 bp, synthetic construct
  misc_feature 1..2871: note = Description of Artificial Sequence: Synthetic coding sequence
  source 1..2871: mol_type = other DNA
atggcttctaaaagaaagtccaccacaccatgtatgatacccgtgaagacggtcgtcttgcaggacgcctccatggaggcacagcccgcagagacgcttcctgagggaccccaacaggatctgcccccagaggctagcgcggctagcagtgaggccgcacagaatccatcaagtacggatgggtctacactcgccaacggccatcgaagtacattggatgggtatctgtacagctgcaaatactgcgatttccgttcccatgacatgactcaattcgtaggccacatgaacagtgagcacaccgacttcaataaggacccaacctttgtgtgtagcgggtgtagcttcctggcgaagacaccagaaggtttatccttgcacaacgcaacatgccacagcggagaggccagcttcgtatggaatgtggcaaagcccgacaatcatgtggtcgtggagcagtccatccccgaatccacctctacaccggatcttgcaggcgagccctctgcagagggtgccgatgggcaggcagagatcatcattactaaaacacccatcatgaaaattatgaaagggaaagcagaggctaaaaaaatacatacgctcaaggaaaacgtaccctcacagccagtaggagaggccctcccaaaactgtctacaggcgagatggaagtgcgcgagggcgatcactctttcatcaatggcgctgttcccgtgtctcaggcatccgctagctccgctaagaatccgcacgccgctaatggacctcttatcggtacagtcccagtgcttcccgcaggcatcgcacaattcctatccctgcagcaacaacccccagtccatgcccagcaccacgttcaccagccactgccaactgccaaggcgttgcctaaggttatgatacctctctcatctattccgacgtacaatgccgctatggactcaaattcctttctgaaaaatagctttcacaagtttccttacccgacaaaagcagaactgtgctatctgaccgtggtgacaaaataccctgaggagcagctgaaaatatggtttacagcgcagcggctgaagcagggtatctcatggagcccagaggaaatcgaagatgcccgaaaaaagatgttcaacactgtgatacagagtgtccctcaacccaccatcaccgtcctcaataccccacttgtggcctctgcaggtaatgtgcagcacctcattcaggccgcactgccaggacatgtggttggacagcctgagggaaccggaggaggcctcctcgtgactcagcccttaatggcaaatgggctgcaagccacaagctctccgctgcccctaacagtcacctcagtgcctaagcagccaggcgttgctccaattaacaccgtgtgcagtaataccacatcagccgtcaaggtcgtcaacgcagcccagtccctcttgaccgcatgcccttcaatcacctctcaggcgtttctcgatgccagcatctacaaaaataagaaatcccacgagcagttaagtgcgctgaagggctcattctgccggaatcagtttcccggacagtctgaggtcgagcaccttaccaaggtcaccggcctctcgactcgagaggtccgcaaatggttcagtgataggcggtaccattgtcggaacttgaaaggaagccgagcaatgattccaggagatcattccagtatcattatcgacagtgtgcccgaggtttccttttctcctagcagtaaggtgcctgaagtgacatgtatccccacaacagctactctggccacccaccctagcgccaaacggcagagttggcatcagaccccagacttcaccccaaccaaatacaaggaaagagcgcctgaacaactgcgagcattggagagcagctttgctcagaacccccttccgctcgacgaggagcttgaccgactcagatcagagaccaagatgactaggagggaaatcgattcatggttcagcgagcgacggaagaaagtgaacgcagaggagacaaaaaaagccgaggagaacgcttcccaggaagaggaagaagctgcagaagatgagggtggtgaggaggatttggcttccgaacttcgcgttagcggtgagaatgggagcctggagatgcccagctcacacatacttgcagaaagaaaagtatcccccatcaagatcaacttgaagaacctgagagttaccgaggccaacggcagaaatgagattccaggcctaggtgcctgcgacccagaggatgatgagtctaacaaattagccgagcagctgcctggaaaagtcagctgcaaaaagaccgcccagcaacgccacttgctgcgccagctgtttgtgcagactcagtggccatctaaccaagattacgacagcataatggctcagaccgggctgcctcgccctgaggtcgtacggtggtttggagacagcaggtatgcactcaagaacggccagcttaagtggtatgaagactacaagcggggaaatttccctcctggcttactggtaattgctccaggcaatagggagctgctgcaagattattacatgacccacaaaatgctgtatgaagaagacctgcagaatctgtgtgacaagactcagatgtctagccagcaggttaaacagtggtttgccgagaagatgggcgaggaaaccagggcagtggctgacaccggcagcgaagaccagggccctggaaccggggaactcaccgccgtccataaggggatgggcgatacatactccgaggtgagcgaaaactcagaaagctgggaacctcgcgtgccagaggcctcatctgagccattcgatacctccagtccgcaggcgggtcgccagttggaaactgattag

SEQ ID NO: 247969 - DNA, 2910 bp, synthetic construct
  misc_feature 1..2910: note = Description of Artificial Sequence: Synthetic coding sequence
  source 1..2910: mol_type = other DNA
atggctagcaagcggaaaagcactaccccctgcatgatccccgtgaagacggttgtgctccaggacgctagcatggaggcccagcctgccgaaacacttcccgaaggcccacagcaagatctcccccctgaggccagcgcagcctcatctgaagctgcccagaatccctcttcgacagatggatcgacactcgcaaacggccatagatccaccttggacggttacctgtactcctgcaagtattgtgacttccgcagccacgacatgactcaatttgtagggcacatgaacagcgaacataccgactttaataaagaccccaccttcgtctgtagcggttgttccttcctcgccaagactcccgaagggctctctctacataatgctacttgccactctggagaagcttctttcgtttggaatgttgcaaagccagacaatcacgtggtggtcgagcaatccattccagagtccacgtcaactcccgatctggctggggagccatccgccgagggcgctgatgggcaagccgaaatcatcattaccaagacccccataatgaaaattatgaagggcaaagctgaggcaaaaaaaattcacacactgaaagaaaatgtaccgtcccagcctgtcggcgaggcactccctaagctgtctacgggagagatggaagtacgagagggggatcacagctttataaacggtgccgttcctgtgtcacaggcctctgcatcgagtgcaaaaaacccccacgccgctaatggccctcttataggcacagttccagtgctgcccgcagggattgcccagtttctatccctccagcagcagccaccagtccatgcccagcatcacgtgcaccaaccccttcctacagcaaaggctttacccaaagttatgattccgctatctagtatccccacgtacaatgcagcaatggacagtaatagcttcttgaagaacagtttccacaaattcccttaccctacaaaggctgagctgtgctacctgacagtggtaacgaagtatccagaggaacagctgaagatctggtttacagcccagcgtttgaaacagggcatcagttggtcccctgaggagattgaggatgcgaggaaaaaaatgtttaataccgtaatccagagcgtgcctcagcccacaattaccgtactgaacacccctctcgtggcctcagccggaaacgttcagcacctgattcaggcagctctaccagggcacgtggttgggcagcctgaaggcaccgggggaggccttctcgtcacacaaccccttatggccaacggccttcaggccacaagctcccccctacccttgaccgtgacttcagtgcctaaacagcccggtgtggcaccaatcaacaccgtgtgttctaacaccacaagcgctgtcaaggtcgtaaacgcagcccaaagtctccttacggcatgtccctccatcacttcccaggcctttttagatgccagtatttataaaaacaaaaaaagccatgaacaactgagtgctctgaaaggctccttttgccgtaatcagtttcctgggcagtcagaagttgagcatctcacaaaagtaacagggctatctacacgcgaggtgagaaaatggttttccgaccgtagatatcactgtagaaacttgaagggcagcagagctatgatccccggagatcacagctccatcattattgactctgtgcccgaggtttccttcagtccgtccagtaaggtgccggaagtgacttgtattccaaccacggctacgcttgctacacatcccagcgctaaaaggcagtcatggcatcaaactcccgattttacccctacgaaatataaggagagagcaccagaacagttacgtgctctggaaagttcattcgcacaaaatcccttgcctctggatgaggaacttgatcgcctcagaagcgaaaccaaaatgactcgtcgagaaatcgattcctggttttccgagagaaggaagaaagtaaatgccgaggagaccaagaaagcagaagaaaacgcttcccaggaagaggaagaagcggctgaggatgagggcggagaagaagatttagcatctgaacttcgggttagcggcgaaaatggctctctggagatgccgagcagccatatactggctgagaggaaggtgagtccaatcaaaatcaatctcaagaacttaagagtgactgaggctaacgggaggaatgagattcccggactgggggcttgtgaccccgaggacgatgaatcaaataaactggcagagcagctgcctggtaaagtttcttgtaaaaagactgctcagcaacgtcatctcctaaggcagttgtttgtgcagacccagtggccctctaatcaggactatgatagcatcatggcccagacaggactgcctaggcccgaagtggtaaggtggttcggcgatagtaggtatgctctgaagaacggccagcttaagtggtatgaagactacaaaaggggcaactttcctcctggactgctggtgatcgccccagggaacagagagttgctacaggattactatatgactcataaaatgctgtacgaagaggacttacagaacctttgtgataaaacacagatgagcagccagcagaagcagaccgagtttgacctgatcaacgttaaggattggcccgtatgggagactgcgtgccatgtggaagagcccaaccccaccctgtgctgccacatgccattcccttgtcccgcagcaggacacctcggcgagctaccggagtcgagtcagactgcacagagtctgccactgccgtctgcgtgccctcctccctccaagcagcaagcccgatggggaagccaccagtttttcctgcctcagtgccgcacctttccactgccaagcaatggttag

SEQ ID NO: 247970 - DNA, 948 bp, synthetic construct
  misc_feature 1..948: note = Description of Artificial Sequence: Synthetic coding sequence
  source 1..948: mol_type = other DNA
atggccagcaaacgcaagtcgactactccttgcatgatccccgtgaaaacagttgtgctccaggacgcatctatggaagcccaaccagcagagaccttgcccgagggaccacagcaggatcttccaccagaagcgagtgctgcgtcatccgaggccgctcagaatccgagtagtacggacggtagcacacttgcaaatggacacaggagcactctggatgggtacctgtacagctgcaaatattgtgacttcaggtcccacgatatgacccagtttgtgggacacatgaatagtgaacacaccgattttaataaggacccgaccttcgtctgctccggctgttcttttttggctaagacccccgaggggctctctctacacaatgctacctgccactctggggaggccagcttcgtgtggaacgtcgcaaaacccgacaaccacgtggtagtcgaacagtctattcccgaatccacatccactcctgatcttgcaggggagccctccgccgagggggctgatggtcaggccgaaattatcataacaaaaactccaatcatgaagatcatgaaaggaaaggccgaggctaagaagatccatacgctgaaggaaaacgtgccctcccagcctgtaggcgaagccttgcccaagctctctacgggcgagatggagaagcaaacggaatttgacttgataaacgtcaaagactggcctgtatgggagaccgcttgccacgtggaggaacctaatccaactctttgctgccacatgccgttcccctgccccgcagccggacacctgggggaactaccagagagttcccagaccgctcagagcctacccctcccatctgcctgcccccctccctcaaagcagcaggctagatggggcagccatcagttcttcctcccgcagtgcaggacctttccgcttccgtcaaatggatag

SEQ ID NO: 247971 - DNA, 501 bp, synthetic construct
  misc_feature 1..501: note = Description of Artificial Sequence: Synthetic coding sequence
  source 1..501: mol_type = other DNA
atggcatcgaaacgtaaatccaccacaccttgtatgatcccagtgaaaaccgtcgtgctgcaggatgcatcaatggaagcgcagcccgctgagacactcccagaaggtcctcagcaggacctgccccctgaggcctcagcagccagctctgaggccgctcagaatccatccagcacggacggctcgaccctagccaatggccatagaagcactctggatggttatctttacagctgtaagtattgtgacttccgtagccacgatatgacacagttcgtgggacatatgaattccgaacacaccgattttaataaagatccaaccttcgtttgcagtggatgctcattcctggccaaaacaccagaggggctgagcctgcataacgccacttgccattccggggaagcaagcttcgtttggaacgttgctaaaccggacaatcatgttgtggtggaacagtcaatccccgagagtacttccacacccgatctggctgggtag

SEQ ID NO: 247972 - DNA, 2871 bp, synthetic construct
  misc_feature 1..2871: note = Description of Artificial Sequence: Synthetic coding sequence
  source 1..2871: mol_type = other DNA
atggcatccaaacggaagtctacaactccttgcatgattccagtcaaaactgtggtcttacaagacgccagtatggaggctcagccagccgagacactgccagagggccctcagcaagaccttcccccagaggccagtgccgcttcgtctgaagcagcacagaacccctccagtaccgatgggtccacactagccaacggccacagatctacactggacggctacctgtattcatgtaagtattgtgactttcgatcgcacgatatgacccagtttgttgggcatatgaactcagaacacaccgattttaataaggatccgaccttcgtttgctctggatgctcctttcttgctaaaacccccgaaggactctctctacataatgctacttgccattccggggaggcgtccttcgtctggaatgtcgccaagcccgacaatcatgtggtggtggagcaaagcattcctgaatccacctcgactcccgacttggctggagaaccaagcgctgaaggtgccgatggacaggctgagattatcattacgaaaaccccaattatgaagataatgaaaggcaaggccgaggcaaagaagatccacactctgaaggagaatgtgccttcccaaccagtgggcgaggcccttccaaagctatccacaggcgaaatggaggtgcgagaaggtgaccattcctttatcaacggtgctgtgccagtgtctcaggcgagcgctagcagcgccaaaaatccacatgccgcaaatggtcctctgattggaactgtgcccgtgttgcccgctggaatcgctcagttcctctctttacagcagcagccacctgtccacgcccagcaccacgtgcatcagccactgcctactgcgaaagcactcccaaaagtaatgatcccccttagctctatccccacctacaatgctgcaatggatagcaactcattcctgaaaaattcttttcataagttcccctacccgactaaagcagaactatgttatttgactgtagtcactaaatatcctgaagagcagttaaagatctggttcacagctcagagactgaaacagggaatttcttggtcccccgaggagatagaggacgccagaaaaaaaatgtttaataccgttattcaatccgttccacagccaactataaccgtgcttaacacccctctggtggcctctgccggtaacgtccaacacctaatccaagccgctttgccaggacatgttgtcgggcagccagagggaacggggggaggtttgctcgtgacccagcccctgatggccaacggtctgcaggctacatcctcccctttgcccctgacggttacaagcgtgccaaagcagcccggagttgcgcctattaacacagtatgctcgaacaccacatcggccgtcaaggtcgtcaatgcagcccagtctctgcttactgcttgccccagcatcacttcgcaggctttccttgacgccagcatctataagaataagaaaagtcatgaacagttatctgcactaaagggaagcttttgtcgaaatcaattccctggccagtccgaagtggagcacctaactaaggtaacgggattatcaacaagggaggtcagaaaatggttttctgatcgaagatatcattgccgcaatttgaaaggctcaagggcgatgattccaggtgaccacagtagtattataatcgattccgtcccagaggtcagctttagtccctctagcaaggtgccggaagtcacctgtatccccaccactgccacactcgccacccacccttcagcgaagcggcagagctggcaccagacaccagactttacgcctacaaaatataaggaacgtgcgcctgagcagttacgagcactcgaatcatctttcgctcaaaatcctctcccactagatgaagaactggatcgacttcgcagcgagacaaagatgactcgtagggaaatagatagttggttctcagagagacgaaagaaggtaaacgctgaggagacaaagaaagccgaggagaatgctagccaggaggaggaggaagcggctgaagacgagggcggagaggaagacctggcttccgagctccgggtgtctggggaaaacggatccttagaaatgccctcatcccatattctggcggagaggaaagtgtctcctattaaaataaacctcaagaatcttcgtgtgacggaagcaaacggccgaaatgagatcccgggtctcggagcatgtgatccagaggatgacgagtccaataagctggctgaacaactgccaggaaaggtgtcttgtaagaaaactgcacaacagagacatttgctacgccagctctttgtgcaaacccagtggccgagcaatcaggactacgatagtataatggcacagaccggactgccaaggccggaagtcgtcagatggtttggggattcgagatacgccctgaagaatggtcagctcaaatggtatgaagattataagagaggcaattttcctccaggcctgctcgttattgccccagggaaccgcgagctgttgcaggattattacatgacacataaaatgctgtatgaggaggacctgcagaacctctgcgataaaactcaaatgagctctcagcaggtcaagcagtggtttgccgaaaagatgggagaggaaacccgcgctgtggccgatacagggtcggaagaccagggcccaggtactggagagctgacggcggtccacaagggcatgggggacacatactcggaggtgtctgaaaacagtgaaagctgggaacccagagttcctgaggcctcatcggaacctttcgataccagttcacctcaggccggtcgacagctggagaccgactag

SEQ ID NO: 247973 - DNA, 2871 bp, synthetic construct
  misc_feature 1..2871: note = Description of Artificial Sequence: Synthetic coding sequence
  source 1..2871: mol_type = other DNA
atggcctccaaaagaaaatcaaccacaccgtgcatgatcccagtgaaaaccgtcgttctccaggacgcctcaatggaggctcagccagcggagacactgccagagggcccacagcaagatctgccacctgaagcaagcgcagcctcatctgaagcagctcagaacccctcttccacagatggatcaacacttgcaaatggacatcgctccactcttgatggatatctgtattcatgtaaatactgcgatttccgcagtcacgatatgactcagtttgtgggacacatgaacagcgagcataccgactttaacaaggatcctacattcgtttgtagcggatgttcatttttggccaagaccccagagggcctgtcactgcataacgccacctgccactctggagaagcgagctttgtgtggaatgtggccaaacctgataatcacgtggtggtcgagcagtcaatccccgagagcacctccacacctgatctcgccggagaaccatctgcagagggggctgatggacaggctgaaataattatcacaaaaacgcctataatgaagattatgaaaggtaaggccgaggctaagaagatacacaccctcaaggaaaatgttccgagccagcctgtaggcgaagccctgcccaagcttagcactggcgaaatggaggtgagagaaggagaccattctttcatcaacggggctgtgccagtgtcccaggcctccgctagctcagctaagaatcctcatgcagcaaatggcccacttatagggacggtccccgttctgcctgcaggcatcgcccagttcctctcattgcagcagcaacccccagtccacgcgcaacaccacgtccatcagccgcttcccacagcaaaagctctgccaaaggtcatgatccctcttagctccatcccaacatacaacgcagccatggatagcaattcatttttaaaaaatagctttcataaatttccgtaccctacaaaagctgaactctgctatcttacagtagttacaaaataccccgaagagcagcttaagatatggtttaccgcccagagattgaaacagggaatttcctggagcccagaggagatcgaggacgcacggaagaagatgttcaataccgttatccaaagcgttccccagcctacgatcactgtgctgaacacacccctcgtcgccagtgctggtaatgtgcagcaccttatccaggcggctcttccagggcacgtggtcggacagcccgaagggaccggcggaggcttgctcgttacccagcccttaatggctaacggactgcaggctaccagctcacccctccctttaacggtcacttctgtgccaaagcagcctggagtcgctccaatcaacactgtgtgttccaacactacgtccgccgttaaagttgtcaatgccgctcagtctttactcaccgcttgcccctcaattacttcccaagccttcctcgacgccagcatatacaagaataaaaagagccatgagcaactgtctgcattaaaaggatccttctgccgcaaccagtttccgggtcagtctgaggtcgagcacctgacaaaggttaccgggctgagcactcgcgaggttcgaaaatggttctctgatagacgataccactgtcgcaacctgaaaggctcacgcgcaatgatcccaggggatcacagctccatcataattgacagtgtccccgaggtgagcttcagcccatcttccaaggttccagaagtgacctgcatacctacaactgcaaccctggccactcacccatccgcaaagcgccagtcgtggcaccaaacacctgacttcaccccaaccaagtataaggagcgcgcacctgaacagcttcgggcattggaaagcagcttcgcgcagaatcctctgccgttggatgaggagctcgatcgattgcgatctgagacaaagatgactagacgagaaattgacagctggttctccgagcgacggaaaaaggtgaacgccgaagagaccaaaaaggctgaagaaaatgcatcgcaggaggaggaggaagcagccgaggacgaagggggagaggaggatctggcctctgagctgcgggtctctggggagaatggcagcttggaaatgccatcatctcacattctagccgagcgcaaggtttcacctatcaaaatcaaccttaagaacctccgcgtcaccgaggccaacgggcgaaatgaaattcctggcctgggagcgtgcgaccccgaggacgacgagtcgaacaagctggcggaacagctgcctgggaaagtgtcctgtaaaaaaactgcacagcaacggcacttgctgagacagcttttcgtgcaaacccagtggccctcaaaccaagactacgacagcatcatggcccagacagggctgcctaggcctgaggtggttagatggttcggcgattctaggtatgccctcaagaatggacagctcaaatggtacgaagattataaacgcggtaactttcctcccggactgttagtgatcgccccagggaacagggagttgctacaagattattacatgacccacaagatgttatacgaggaagaccttcagaatctgtgtgacaagacccagatgagctcacaacaggtgaaacaatggttcgccgagaagatgggggaagagacaagagctgtagccgacaccggctccgaagaccagggcccaggtacaggcgagctgaccgccgtacacaaggggatgggcgacacctattctgaggttagcgagaatagcgaaagctgggagccaagggtacctgaagcctcctctgaaccttttgacacttcaagcccgcaagccggtcggcaactggagaccgattag

SEQ ID NO: 247974 - DNA, 501 bp, synthetic construct
  misc_feature 1..501: note = Description of Artificial Sequence: Synthetic coding sequence
  source 1..501: mol_type = other DNA
atggcttcgaagaggaaaagcactaccccatgcatgattcccgttaagacagtcgtacttcaggacgcttctatggaggcacagcccgcagaaacactgcccgaaggccctcagcaggacttgccccctgaagcctccgcggcttcctcagaggccgctcagaatccatcatcaacggacggcagcaccctggcaaacggccacaggtctacccttgatgggtacctgtatagctgtaagtactgcgactttcggagccatgatatgacacaattcgtcgggcacatgaactcagaacatactgacttcaacaaagatcccacctttgtctgttcgggatgctcttttttggctaaaacacccgagggattgagtctgcataacgccacctgccattcaggcgaggcaagctttgtctggaacgtggccaaacctgataatcatgttgtggtggaacagtccatacccgaatcaacatctactccagacctggctgggtag

SEQ ID NO: 247975 - DNA, 1428 bp, synthetic construct
  misc_feature 1..1428: note = Description of Artificial Sequence: Synthetic coding sequence
  source 1..1428: mol_type = other DNA
atgggcatgtgggcatccttggatgcattgtgggagatgccggcagagaagcgaatctttggggctgtgcttttattctcttggacagtctacttgtgggagacgtttctggcccaacgccagcggaggatttataaaaccactacacatgtgcctcctgagctgggacagatcatggattctgagacgtttgagaaaagtcggctttaccagctggataagagcaccttctccttttggagtggcttgtactcggaaactgagggcacccttatcttactgtttggcggaattccctatctgtggcgactgtctggtcgattctgcgggtatgccggatttggcccagaatatgagattacgcaaagcctagtgtttctcttgctcgcgactctgttttctgcgttaacaggactgccctggtcactgtataacacattcgtaatagaggagaagcacggctttaatcagcagaccttgggattttttatgaaggacgctattaaaaagttcgtagtcacccagtgtatcctattgccagtcagctctctgctcctctacattatcaagattggcggagactacttctttatatatgcatggctgttcacccttgtggtgtccttggtgctcgtcaccatttatgccgactacattgccccactgtttgacaagttcacccccctcccggaaggaaaactgaaggaagagatcgaagttatggcaaagagtattgatttcccactgaccaaagtgtatgtggtggaaggcagcaaaagaagctcccactccaacgcgtatttctatggcttctttaaaaataaaaggatcgtgcttttcgacaccttgttggaagagtactctgtgctaaataaagatatacaagaggacagcggcatggagccacggaacgaggaggaaggtaacagcgaagagattaaggccaaggtaaaaaacaaaaagcaaggctgcaagaatgaagaggtgctggccgtgctaggtcacgaactgggccactggaaactcggccacactgtgaaaaacataatcatttctcagatgaattcattcttgtgcttctttctgtttgccgtgttgatcggtagaaaagagcttttcgccgcatttggcttttacgatagccagccaaccctgattggcttactgatcatctttcagtttatcttctccccatacaacgaggtactgtccttttgcttaacagtgctgagccgccgtttcgaattccaggccgacgcttttgccaagaagctaggaaaggccaaggatctgtattccgcgttaatcaaactcaataaagacaaccttggattccctgtctcagactggctgttttctatgtggcactattctcatccccctctgctggagagactgcaggccctgaagacaatgaaacagcattag

SEQ ID NO: 247976 - DNA, 1017 bp, synthetic construct
  misc_feature 1..1017: note = Description of Artificial Sequence: Synthetic coding sequence
  source 1..1017: mol_type = other DNA
atgatgcgtacctgcgttctcctgagcgcggttctgtggtgtctaaccggtgtgcaatgcccacgctttactctgtttaataagaagggcttcatttacggcaagaccggccagcccgacaagatttatgtggagctgcatcagaactcacctgttcttatttgtatggattttaaactttcgaagaaggagattgttgatccaacttacctgtggatcggtcccaatgaaaaaactctgacaggcaacaaccggattaacattacagagaccgggcagttaatggtgaaggactttttagagcctttgagcgggttgtacacttgcactctgtcttacaagacggtcaaagcagagacgcaggaagaaaaaaccgtgaagaagaggtatgatttcatggtgttcgcataccgggagccggattactcataccagatggcagttcggtttacaacacggagctgcattggtcgttacaatgacgtattcttcagggtgctaaaaaagatactcgacagcctcataagcgacctcagctgccacgtgatcgagccgtcatacaagtgccatagtgtggagatccccgagcatggcttaatacatgaattatttatcgcatttcaggtaaacccttttgcgcctggttggaaaggcgcatgtaacggcagcgtcgactgcgaagacacgaccaatcataacatccttcaggcccgtgaccgaatagaagatttttttaggtctcaagcctacatcttttatcacaatttcaacaagacattacccgcaatgcatttcgtggaccacagtctgcaggttgttcgtttagacagctgccggcctgggttcgggaagaacgaacggctacattctaattgcgcctcatgttgtgtggtgtgcagtccagctacattttcgccagacgtaaacgtgacctgccagacttgtgtgtccgtcctgacttacggagcgaaaagctgcccacagacatctaacaagaaccaacaatacgaggattag

SEQ ID NO: 247977 - DNA, 951 bp, synthetic construct
  misc_feature 1..951: note = Description of Artificial Sequence: Synthetic coding sequence
  source 1..951: mol_type = other DNA
atgatgcggacctgcgtccttctgtccgctgtgctgtggtgtctgaccggggataaaatttatgtagagttgcaccagaattcgcctgtgctgatttgtatggatttcaagttaagtaagaaggagattgtagacccaacgtatttgtggattgggccaaacgagaagactctgactggaaataaccgcataaacatcacagaaacgggccagctgatggtcaaagactttctcgaacctttgtcagggctctacacttgtaccctttcctacaaaactgttaaggccgagactcaggaggaaaagaccgtcaagaagaggtatgactttatggtcttcgcctacagagaacccgactatagctatcagatggcagttaggttcacaaccaggtcttgcatcggcaggtataacgacgtcttttttcgggtgctgaaaaaaatccttgattcacttatctcggacctcagttgccacgtgatcgagccaagctacaaatgccattcagtggagattccagagcacggccttatccacgagcttttcatagcatttcaggttaacccgttcgccccaggatggaaaggtgcatgtaacggttccgtggattgtgaggataccactaaccacaatatcctgcaggcccgtgaccggatagaagatttctttcgaagccaagcgtatattttttaccacaatttcaataaaacactgcctgcgatgcattttgtcgaccactcgctccaggtagtaaggctcgactcttgcagacctgggtttggaaagaacgagaggttgcactctaattgcgcctcctgttgtgttgtatgcagccctgctacattctctcctgacgtaaacgtcacttgccaaacatgcgtgtcagtcctcacttatggggcaaagtcctgcccccaaacgtctaataaaaatcagcagtatgaagattag

SEQ ID NO: 247978 - DNA, 1917 bp, synthetic construct
  misc_feature 1..1917: note = Description of Artificial Sequence: Synthetic coding sequence
  source 1..1917: mol_type = other DNA
atggctggaggtagcgcaactacttgggggtaccctgtggcactgctgttactggtggctacgctggggctcggtcgctggttacaacccgaccctggactgcctggcctgcggcattcatacgattgcggcatcaagggcatgcagctgctggtattccccaggcccggtcagacgttaagattcaaggtcgtggatgagtttggaaatagatttgatgtgaacaattgctccatttgttaccactgggtgacctcccgcccacaggaaccagccgttttttccgcggattatcgcggatgccacgtgcttgaaaaagacggtcggtttcatctcagagtattcatggaagcggtacttcctaacggcagggtggacgtggcccaggacgcaactttgatttgtcctaaaccggacccttccagaaccctggactcccagctggctccccctgccatgttctctgttagcactcctcagacactgagttttctgcccactagcggacacacctctcaaggctccggtcacgccttcccatcgccacttgaccccggacattctagtgtccaccccacaccggctctgcccagccctggcccaggccctacgctggcgaccctggcccaaccgcactggggaacattagaacactgggatgtgaataagagagactacataggcactcacctgagccaggaacagtgtcaggttgcttccggccacctgccatgcatcgtgcggcgaacatccaaagaagcgtgtcaacaggcgggatgctgctacgacaacacccgggaggttccgtgctattacggcaacacagctacggtgcagtgctttagggacggttactttgtgcttgttgttagccaggaaatggccctcactcaccgaatcactttggccaatatccacctggcttatgcccctacttcatgctcccccactcagcacactgaggctttcgtggtcttctacttccccctgacccactgtggcacaacaatgcaagttgccggagaccagctgatttatgagaattggctggtatccgggatccacatccagaaaggcccacagggtagcatcacgcgagactctacttttcaactacatgttaggtgcgtttttaatgccagcgattttcttcccatacaggctagcatctttcctcccccttctccagcacccatgactcagcccggtcccctccgactggagctgcgcatcgctaaggatgagacattttccagttactacggggaggacgactatcccattgtaaggctgcttcgggagcccgtgcatgtggaagtgcggctgcttcagcgaaccgatccaaatctggtcctgctgcttcatcagtgctggggcgctcccagcgcaaatccttttcagcagccccagtggccaattctttccgacggatgtcctttcaaaggcgacagttatagaacccaaatggttgcgctagatggcgcaacccccttccagtctcactatcaaagattcacagtggctaccttcgccttgttagattcagggagccagagggccctccggggactggtgtacctgttctgttctacttcagcatgccacacaagtggcctcgaaacatgttcaaccgcttgcagtaccggcaccacacgacagcggaggtcctccgggcaccgcaatgatactgctaggccgcaggacatcgtttcttctcctggtcccgtgggattcgaggacagctacgggcaggaacccacactgggaccaacagactcgaatggaaacagttccttacggccattgctgtgggctgtgctcctcctcccagccgtggctctggttcttggtttcggcgttttcgttggcctgtctcagacctgggcccagaagctctgggaatcgaacaggcagtag

SEQ ID NO: 247979 - DNA, 993 bp, synthetic construct
  misc_feature 1..993: note = Description of Artificial Sequence: Synthetic coding sequence
  source 1..993: mol_type = other DNA
atggcgttgacacataggatcaccctggctaacattcacctggcctacgctcccacttcgtgtagccccacccagcatacagaagcttttgtggtattttatttccccctcactcattgtggcaccaccatgcaggtggctggtgatcaacttatttatgagaactggcttgtctccggtatccacattcagaagggaccccaaggatctatcacaagagactccacttttcaattgcacgttcgatgtgtgttcaatgcaagtgattttctacccatccaggccagcatatttcccccaccaagtccggcaccgatgacgcagcccggtcctcttaggctagagctccggattgcgaaggatgagacattctcaagctactacggtgaggacgattatcccattgtgcgactgctcagagaaccagttcatgtagaggtgaggctgctgcagcgaacagatcccaacttagtgctattgctgcaccagtgctggggcgctcctagcgcaaacccgttccagcaaccccaatggccaatcctgagcgacggttgcccctttaagggcgactcataccggactcagatggtggcccttgacggagccacaccttttcaaagtcactatcagcggttcacggtggccacatttgcattactggatagcggatcccaacgcgctttacggggacttgtttatctgttctgtagtacgtccgcttgccatacctccgggctcgaaacttgtagtactgcatgcagcaccgggactaccaggcagagaaggtcaagcggacaccggaacgatactgcaaggccccaggatatcgtcagcagtcctggacctgtggggtttgaggactcttatggtcaagagccgaccttgggccctactgactcaaacgggaactccagcttacggcctcttttgtgggcagttctcctgctgccagcggtcgccctggtactcgggttcggggtattcgtcgcatag

SEQ ID NO: 247980 - DNA, 1317 bp, synthetic construct
  misc_feature 1..1317: note = Description of Artificial Sequence: Synthetic coding sequence
  source 1..1317: mol_type = other DNA
atgggtcgcgtcgaggatggcggtaccacagaggaactagaagactgggacccgggtacaagcgcccttcctgcccctggtattaagcagggtcccagggagcagaccgggacaggaccattgtctcaaaagtgttgggagccagagcccgacgcgcctagtcaacccggacccgctttatggtccagggggagggcacgcacccaggctttagctggaggtagctcacttcagcagctcgatccagagaatacaggcttcatcggcgcagacactttcacaggcttagtgcattcgcatgagctcccattggacccggctaagctggacatgctggtggccctagcccagtcgaatgagcaggggcaagtatgctatcaggaattggtggacctcatcagttctaagaggtcatccagcttcaaaagagctatcgccaacggccagagagcgctcccacgagacggtccattagatgaacccggtctcggagtatataaacgattcgtgcgctacgtggcttatgaaatcttaccatgcgaggtggaccgacgctggtacttctacaggcaccgcagctgcccacctcccgtattcatggcatctgtcacccttgcccagattattgtattcctttgctacggcgctaggctaaacaaatgggtgctgcagacgtaccatccagagtacatgaaatccccactagtgtaccatcccggtcacagggcacgagcctggcggtttctcacatacatgttcatgcacgttggactcgaacagctggggtttaatgcattgctgcaactgatgatcggtgtgccgctggaaatggttcacgggctgctaagaatcagtctcctttatttggctggcgtgcttgcaggctctctcacagtgagtattacagatatgcgggcaccagttgtggggggatctggaggcgtgtacgcactgtgctccgctcatctcgccaacgttgtgatgaactgggcaggtatgagatgtccttacaaactgctgagaatggtgctcgccctcgtgtgtatgagctccgaggtgggcagagctgtgtggctcagatttagccctccgctgcctgcaagtggaccgcagccttcttttatggcccatctggccggagccgtcgtgggtgtttctatggggctgaccatcttacgcagttacgaggagaggttacgggatcagtgcgggtggtgggtggtactcctggcttacgggacctttctactgttcgcggtgttttggaatgtgttcgcctatgacttgctcggtgcgcacatcccaccccctccatag

SEQ ID NO: 247981 - DNA, 1122 bp, synthetic construct
  misc_feature 1..1122: note = Description of Artificial Sequence: Synthetic coding sequence
  source 1..1122: mol_type = other DNA
atggtgatggtttctaaagacctgtttggcacagggaaactgatacgggctgctgatttgactctgggcccagaggcctgcgaacccctggtgtcaatggacactgaggatgtggtgagatttgaagttggcctgcacgagtgtggaaattctatgcaggtcacagatgacgccttggtatactctacattcttattacacgaccctagacccgttgggaatctgagcatcgttagaacgaaccgggcagagataccaattgaatgtcgctaccccaggcagggaaatgtttcgtctcaggctatccttcctacgtggctgccatttcggacaaccgtgttttccgaagaaaaactgacattctcactccgcctaatggaggaaaattggaacgctgaaaagcgcagcccaaccttccacctgggcgatgcagcgcatcttcaggcagagattcacacgggatctcatgtacccctacggctgttcgttgatcattgtgtcgccactccaacacctgaccaaaacgcaagcccttaccacacaatagtggacttccacgggtgcctggtggacgggttaactgatgcatcctcagcattcaaagtgcctaggcccggaccggatacattgcagttcacagttgacgtgttccacttcgcgaatgattcgcgtaacatgatctacattacttgtcatttgaaagtgacgcttgccgagcaggaccccgacgagctaaacaaagcatgttcctttagcaagccctccaattcctggtttcccgtggaagggtcagcagatatctgtcagtgctgtaacaagggcgactgcggcaccccaagtcacagtcgcagacagccacatgttatgagccagtggtcacggagcgcctcaagaaatcgtcggcacgtgaccgaggaggccgatgtcacggtgggtcccttgatattcttggatcgcagaggtgaccatgaagtggagcaatgggcacttccaagtgacacttcagtcgtgctgttaggcgtcggactcgccgttgtggtgtccctcacactgaccgccgtcatactggtcctgacgcggagatgtcgaaccgcctctcatcctgtgagtgcctccgagtag

SEQ ID NO: 247982 - DNA, 1275 bp, synthetic construct
  misc_feature 1..1275: note = Description of Artificial Sequence: Synthetic coding sequence
  source 1..1275: mol_type = other DNA
atggagctttcctacaggctgttcatatgccttctcctgtggggcagtaccgagctgtgttatcctcagcccctgtggctgctccagggcggtgcttctcatccagaaacctcagttcaaccagtgctcgtcgagtgtcaggaggctacgctgatggtcatggtgtcaaaagacctgttcggtactggaaaacttatcagagccgcagatctgaccctcggtcctgaggcttgcgagcctctggtcagcatggatacagaggacgtcgtccggttcgaggtcggtttacacgaatgcggcaatagcatgcaggtgactgacgatgccctcgtgtacagcacctttcttctgcatgacccaagacccgtggggaatctttcaatcgtgaggaccaacagagcggagatccctattgagtgccggtatccaagacagggcaacgtgagcagtcaggctatcctgccaacctggctgcccttccggacaacagttttctctgaagagaagctgacctttagcttacgcttaatggaagaaaactggaacgcagagaagcgctcgccaactttccatttgggcgacgccgcacacttacaggctgagatccacacggggtctcacgtccccctcaggctgtttgtggaccattgtgtagctacgccaaccccagaccagaacgcgtcaccatatcacacaattgtggactttcatgggtgtctagttgacggcttgaccgatgcttccagcgccttcaaagtcccgaggcccggtccagacaccttgcagtttactgtagacgtgtttcactttgcaaacgactcccgcaatatgatttacatcacttgtcaccttaaagtgactctggccgaacaagatcccgacgagcttaacaaagcatgcagcttctcaaaaccaagcaactcctggtttccggtggaaggttcagcagatatatgtcagtgctgcaataagggcgactgcggcaccccatcccacagccgtcggcagcctcatgtaatgagccagtggtccaggtccgctagtaggaataggcggcacgtgaccgaggaggcagatgtgaccgtgggacctctgatattcctggaccggcgtggagaccacgaagtggagcagtgggcgctgccaagcgacacatccgttgtgctgttgggtgtcggcctggccgtcgtggtctccctgacactgacagctgtcatacttgtactcacccgccgatgccgtaccgcctcccaccctgtgagtgcttccgaatag

SEQ ID NO: 247983 - DNA, 1116 bp, synthetic construct
  misc_feature 1..1116: note = Description of Artificial Sequence: Synthetic coding sequence
  source 1..1116: mol_type = other DNA
atggagctgtcctacagactctttatctgcttactgctctggggttctaccgagctttgctatccacagccactgtggctgctccagggaggagcttctcatccagagacctcagtccagcctgttttagtggagtgtcaggaggcaactctgatggtgatggtttcgaaggacctcttcggcactggcaagctcatacgtgccgcagatctgactctcgggccagaggcctgcgagccgctcgtgtcaatggatactgaagatgtcgtccgatttgaagttggcctgcacgaatgcggtaactccatgcaagtgaccgacgacgccctggtgtatagcacattcttactgcatgacccccgaccagtcggaaacctgtcaatcgtacgaaccaatcgcgcagaaatccccatagaatgtcggtacccgcgacagggcaatgtgagtagccaggccatccttcccacctggctgcctttccgtactacagtgttttcggaggaaaaactgacctttagcttgcgcttgatggaagagaactggaatgcagaaaagcggagcccgacgttccacttgggagacgctgcccacctccaagcagaaatacacaccggctctcacgttcccttgaggctttttgtagaccactgtgttgccacccccaccccagatcagaacgctagtccataccacactatcgtggactttcatgggtgcctcgtcgatggcctgacagacgccagctcagcttttaaagtccctcggcctgggccagatacgctgcagttcactgtcgacgtttttcatttcgccaatgattcccggaacatgatttacattacctgtcacttaaaagttacactggccgaacaggatccagatgagctgaataaagcgtgcagcttcagcaagccctctaattcctggtttccagtcgagggctccgctgacatatgccagtgttgcaacaagggtgattgcgggacaccatctcatagtcgtcgccaacctcatgtgatgagtcaatggtctcgctctgccagccgaaatcggaggcatgtcacagaggaagccgatgtgacagtcggaaccgatctgcctggccaggagggatag

SEQ ID NO: 247984 - DNA, 1623 bp, synthetic construct
  misc_feature 1..1623: note = Description of Artificial Sequence: Synthetic coding sequence
  source 1..1623: mol_type = other DNA
atgtggcttctcaggtgtgtcctgttgtgcgtgagcctcagcctggcagtgagtggccagcataaaccagaagcaccagattactcatcagtcctccattgtggcccttggtcattccaattcgccgtcaatcttaaccaggaggctacctcgccacccgtgctgattgcctgggacaatcaagggctcctgcatgagctgcaaaatgatagcgactgtggcacgtggattcggaaggggcctggttcttcggtggtgctggaggccacttacagctcctgttacgttactgagtgggattcacattacattatgccggtgggggtggaaggcgctggcgcagccgaacataaagtcgtcaccgagaggaaactcctgaaatgccctatggacctgctggccagggacgctccggacaccgattggtgcgactccattcctgccagggatcgcctcccttgcgccccatctcccatttcccggggagactgtgaaggcctcggttgctgctactccagtgaagaagtcaacagctgctactatggcaataccgtgacgcttcactgcaccagggagggccacttttccatcgctgtgtcaaggaacgtaacctccccacccctgttgctggatagcgtgagactggcactgcgtaacgactccgcatgtaaccccgttatggctacgcaggccttcgtcctttttcagtttccatttacttcgtgcggaaccacaagacagataactggcgatcgggctgtgtacgaaaatgagctggtcgctactcgggacgtaaagaacggatcccggggtagcgttacgagggattctatcttccggctgcatgtaagttgttcgtactctgtatcttccaattccctccccatcaacgtgcaggtcttcactctgcccccaccattccccgagacacagccgggaccccttacactcgagttacaaatcgctaaagacaagaactatgggtcatactacggcgtaggcgattaccccgtcgtaaaattactcagggatcccatatatgtagaggtgtcaatattacaccgaactgatccatatctggggctgctcctgcagcagtgctgggccacccccagcactgacccccttagccagccacagtggcccattctggtgaagggctgcccctacatcggagacaattaccagacccagttgattcccgtacagaaggctctggacctgccttttccaagtcaccaccaacggttcagtatttttacattctcctttgttaatccaacagtggagaagcaagctctgaggggccctgtgcatctgcactgctctgtgagcgtctgccagccagccgagacccccagttgcgtcgtcacgtgccccgacctgagtagaaggcggaattttgacaacagctcacaaaacaccacggcctcggtcagcagcaaggggccaatgatcctgctccaggccaccaaagaccctcccgaaaagttacgggttcccgtggacagtaaagtcctctgggttgcgggactgtcaggcacattgatcctgggtgccctacttgtgagctatcttgcggtaaagaaacagaagtcctgcccagaccaaatgtgccagtag

SEQ ID NO: 247985 - DNA, 2340 bp, synthetic construct
  misc_feature 1..2340: note = Description of Artificial Sequence: Synthetic coding sequence
  source 1..2340: mol_type = other DNA
atggcgtcatttgtgaccgaagtgttagcacatagtggccgtctggaaaaagaggacttggggaccaggatttccagacttacaagaagggtcgaagaaatcaagggcgaggtgtgtaatatgatttcaaaaaaatactccgagtttctcccttctatgcaaagtgcccagggtctgattacacaggttgataaactgagtgaagacattgatcttctaaagtctcggatcgaatccgaggtgcgaagagatctccatgtgagcactggggaattcaccgatctgaagcagcagcttgaacgggattctgtcgtgctcagcttgctcaaacaactacaagagttttctaccgccattgaggagtataactgtgccttgactgaaaaaaagtacgtgactggggctcagcgtctcgaagaggcgcaaaaatgtttaaagcttttaaagtcacgcaaatgctttgatttgaagattttgaagtctctttctatggagcttacaattcagaaacagaacatattgtatcatttaggggaggagtggcaaaaactcatcgtatggaagtttcctcctagtaaggatacatcttccttggaaagctaccttcaaacagagctccacttgtataccgaacagtcacacaaggaggagaaaacccccatgccgccaatttcatctgtgctgttagccttcagcgtcttgggtgaactgcatagtaaattgaagagctttggacagatgctgctgaaatacattttgaggccgcttgcctcttgtccgtcattgcatgccgtgatcgaatcgcagcctaatattgtcataatcagatttgagtcgattatgaccaacttggagtatccatctcccagcgaggtgttcacgaagataagattagtcctggaggttctgcagaagcaactgctagatctaccgctggatactgacttagaaaatgaaaagacttcaaccgttccgctggctgaaatgctaggcgacatgatctgggaggatttatccgaatgtctaatcaaaaattgtctcgtgtatagcatccccactaacagcagtaagcttcagcagtatgaggagatcatacagagcaccgaagaattcgagaatgcccttaaggagatgagattcctcaagggagataccaccgatctacttaaatacgccagaaacattaactcacactttgcaaacaagaagtgtcaggatgttatcgtcgctgcccgtaatctgatgactagcgagattcacaatacagtgaaaattattcccgacagcaaaatcaacgtacccgagctgcctaccccagacgaagataataaactggaagtccaaaaagtgtcaaacacacagtatcacgaggttatgaacctcgagcctgaaaacaccctggaccagcattcatttagcttgcccacttgtaggatcagcgagtccgtgaagaaattgatggaacttgcgtatcaaacgctgctggaagccaccacatcctctgaccagtgtgccgtgcagctcttctattccgtccgcaacatcttccatctgttccatgacgtcgtgccgacctatcacaaagaaaatttgcaaaaactcccccagcttgcagctattcaccacaataactgcatgtacatcgctcatcacttactgaccctcggtcatcagttccgactcaggctagccccaattctgtgtgatggcactgcaaccttcgtcgacttggtgcccggatttcgccgactgggaaccgaatgcttcctcgcccagatgagggcgcaaaagggcgagctgctggaacgcctgtcatcagccagaaatttcagtaatatggatgatgaggagaattactctgccgcttctaaagccgtgagacaagttctgcatcaactgaagcggcttggcatcgtgtggcaggacgtcttgccagtgaatatctactgcaaagcaatgggcactctgctgaacaccgccatttccgaggtaatcgggaagattaccgcacttgaagatataagtacagaggacggcgatagactttattctctttgcaagactgtcatggacgagggaccacaggtcttcgcacccctgtctgaggagtcaaagaataagaaataccaggaggaagttcccgtttatgtcccaaagtggatgccatttaaagagctgatgatgatgctccaagcctctctgcaggaaatcggtgatcgatgggcagatgggaagggtccactggctgctgctttcagcagttccgaagtaaaggcccttattagagccttgttccagaatacagagcggcgtgctgccgctctcgctaaaatcaagtag

SEQ ID NO: 247986 - DNA, 2019 bp, synthetic construct
  misc_feature 1..2019: note = Description of Artificial Sequence: Synthetic coding sequence
  source 1..2019: mol_type = other DNA
atggcgtcttttgttaccgaggtgctagcacactctgggaggctggagaaagaggacttggggacccgaatcagtcgactaacgcgtcgcgtcgaagagatcaaaggagaggtttgtaacatgatctccaagaagtactcagagttcctgccttctatgcagagcgcgcaaggactgatcacacaggtagataaactatctgaggatatcgacttgttaaagtcccgaatcgagtctgaagtacggcgtgacttacacgtgtcaaccggtgaatttaccgacttaaagcaacagttagagcgggattcagtagtgctatccctgttaaaacagctccaagaattctcaaccgctatcgaggagtacaactgtgccctgaccgaaaaaaaatatgttactggggctcagcggctggaagaagcccagaagtgtctaaagttgctaaagtccagaaaatgtttcgatctcaaaatcctgaagtccttatctatggagttgaccatacagaaacaaaatatattgtaccacctcggcgaggaatggcagaagctgatcgtatggaagttcccacctagcaaggacaccagtagcctcgagtcctacttacagactgaactccacctttacaccgagcagtcccataaggaggagaaaacaccgatgccccctataagctctgtcctgctggcattctcagtactgggcgaattgcacagcaagctgaaaagcttcggacaaatgttactgaagtacatcctgcgtccattagcatcctgtccgtcgctacatgctgtcatcgaatctcaacctaacatcgtgataattcgatttgagagcataatgaccaacctggagtatccatcacccagcgaggttttcactaagatcaggctggttcttgaggtgttgcagaaacagcttttagatctacctctcgataccgatctggagaacgagaagacatccaccgttcccctggctgagatgcttggcgatatgatatgggaagacctcagtgagtgccttatcaagaactgcctagtgtactcaattcccactaattccagcaaactccagcaatatgaggaaatcattcagtcgaccgaggaatttgagaacgccctgaaggaaatgagatttctgaagggggataccactgatctcctgaaatacgcgaggaatatcaactcccatttcgccaataagaaatgccaggatgtcatagtggccgcacgcaatctcatgacgagcgagatccacaacacagtgaaaattataccagattctaagatcaatgttccagagttgcccaccccagatgaagataacaagttggaagtccaaaaggtctccaacacacagtaccatgaagtgatgaacctggaaccagaaaatacactggaccaacatagcttttcattaccaacttgcagaatttccgagtccgtaaagaagctcatggaacttgcgtatcagacattgctggaagctacgactagcagtgaccagtgcgcagtgcaactgttttattccgtgcgcaatattttccatctgttccacgacgtagtgcctacatatcacaaagaaaatctgcagaaactaccccagttagctgccatccaccacaacaactgcatgtacatcgcccaccacctgctgactctcggacatcagttccggcttcgcctggcacccatcctgtgtgatggtacagccaccttcgttgacctcgtaccaggattcagaaggttaggcaccgaatgcttcttagcccagatgcgagcccagaaaggggaattgctggagaggctctcttccgccaggaatttttctaacatggatgacgaagagaactactcagctgctagtaaggccgtgaggcaggtcctccatcaactgaagagactcgggatcgtgtggcaggatgtgttgcctgtcaatatttattgtaaggctatgggtaccttattgaataccgccatttcagaggttatcggaaaaattacagctctggaatag

SEQ ID NO: 247987 - DNA, 1776 bp, synthetic construct
  misc_feature 1..1776: note = Description of Artificial Sequence: Synthetic coding sequence
  source 1..1776: mol_type = other DNA
atgtgggaaaggctgaattgcgcagccgaagatttttactcccgcctgcttcagaaattcaacgaggaaaagaaaggcatcaggaaagacccattcctctacgaggctgatgtgcaggtgcagctgatctcaaagggacagccaaaccccttaaagaacatcctgaatgaaaacgacattgtctttatcgtcgaaaaggtacccttagagaaggaagaaaccagccatattgaggagctgcagtctgaggaaactgcgatatccgattttagtacaggcgagaatgtgggtcccctggccctgccagtaggaaaagctcggcagctgatcgggttgtacaccatggcacacaatccgaatatgacccatctcaaaatcaacttacctgtgactgctctgcctccactctgggtccgatgtgattcatcagatccagaagggacctgctggctgggcgctgagctgattactactaacaacagcatcacaggaatcgttctttatgtcgtgtcatgcaaagctgacaaaaattactcggtcaacttggaaaacttaaagaacctccacaaaaagaggcatcatctcagtacagtcacgagcaaaggcttcgcgcagtacgagttgttcaagagctccgcactcgatgatacgattaccgcctcccaaacagccatagccctcgatatctcttggtctccggtggacgagattctgcagattccaccattgtcaagcacggccactctcaacattaaggtggaatccggcgagcccagaggcccattaaaccacctgtaccgggagttgaaatttctgctggtgctcgcggacgggctcagaaccggcgttactgagtggttggagcctcttgaagcgaaaagcgcggtcgaactcgttcaggagttcctcaacgacctgaataaactcgatgggttcggggattctactaagaaagacaccgaagtggaaactttaaaacacgatacagctgctgtggaccggtctgtgaaaaggctgttcaaagtccgcagcgatctggactttgccgaacagctgtggtgcaagatgagctcctcagtgatttcctaccaagacctggtgaagtgttttacgctgatcatacaaagcctacagcggggagatatacaaccctggctgcatagcggctctaactctctcctgtctaaacttattcaccagtcctaccatgggaccatggatactgtgagtttgagcggcacaatacccgtccagatgctgcttgagatcggcctggataagttgaagaaggactacatcagtttcttcatcggccaggagctggcttcccttaatcatctggagtactttatagctccttcagtcgacattcaggaacaggtgtaccgagtacaaaagcttcatcacattcttgagatattggtttcatgcatgccattcattaagagtcagcacgagctgctattctctcttacacagatttgcatcaagtattataaacagaatcctctggacgaacagcacatttttcaactcccggtcagaccaacggctgtgaaaaacctgtaccagtctgaaaaaccccagaaatggcgcgtcgagatttactctggccagaagaagattaaaactgtatggcaactgagcgacagtagccccattgaccatctgaacttccacaagcccgacttctctgagctgaccctgaatggctctctagaggaacggatattctttactaatatggtaacttgttctcaggtccacttcaagtag

SEQ ID NO: 247988 - DNA, 1434 bp, synthetic construct
  misc_feature 1..1434: note = Description of Artificial Sequence: Synthetic coding sequence
  source 1..1434: mol_type = other DNA
atggcccataaccctaacatgacgcatctcaagatcaacctaccagttaccgcgcttcctccactctgggtgcggtgtgacagctctgatcctgagggcacatgctggctgggggcagaactcatcacaaccaataacagcatcacaggaatcgttctatatgtggtgagctgcaaggcggataaaaattactccgtgaacctcgagaatcttaaaaacctgcacaaaaaaaggcaccacctttcaaccgtgaccagcaaggggtttgcccagtacgagctgtttaaatccagcgctctggatgatactatcacagcctcgcagacagccattgccttggatatatcttggtccccagttgacgaaatcttacagattccacctctgagttctactgctacactgaacataaaggtcgagtcaggagaacctcggggacctctgaatcacttgtaccgcgaattaaagtttttactggttcttgcagacggattgaggacaggagtgacagagtggctcgaaccactcgaggcaaaatctgcggtggagcttgtccaggagttccttaatgatcttaacaagcttgatggcttcggggatagcacaaaaaaggacacagaagttgaaaccctgaaacatgatacagcggctgtggacaggtcagtgaagaggctgttcaaggttcgatctgacctagattttgctgaacagctctggtgtaagatgtccagttctgtcataagttatcaggacctggtcaagtgttttactttaataatccagtccttacagagaggtgacatacagccatggctgcatagtggatcaaacagcttactaagcaagctcatccaccagtcctaccacggaaccatggatacagtttccctgtcagggaccatccctgtgcaaatgttgctcgagattgggctagacaagctgaagaaggattatatttcttttttcattggccaggaacttgcctctctcaaccaccttgagtactttatcgcaccatccgtggatatccaagagcaggtgtacagagtgcagaagctacaccatattctggaaattctggtgtcttgcatgccattcataaagagtcagcacgaattgctgttttcactcacccagatttgtatcaagtactacaaacagaatcctttggatgagcagcatatttttcagcttcccgtgaggcccaccgctgttaaaaatctctaccagagcgagaaaccccagaagtggcgtgtcgagatttattctggtcaaaaaaagataaagactgtgtggcaactgtcagattcaagccctattgatcatctgaactttcataagcctgatttttctgaactgaccctgaacggaagtctcgaggagaggatctttttcactaatatggtcacatgttcgcaggtgcatttcaagtag

SEQ ID NO: 247989 - DNA, 1434 bp, synthetic construct
  misc_feature 1..1434: note = Description of Artificial Sequence: Synthetic coding sequence
  source 1..1434: mol_type = other DNA
atggctcataaccccaacatgacccatttgaagataaatctgcctgtaactgcgctcccacctctgtgggttcgatgcgacagttctgatccagaaggaacttgttggctcggcgctgagctgatcacaactaacaacagcattacgggtatcgtcttatatgtcgtttcttgtaaagccgacaagaattactctgtcaacctagagaaccttaagaatcttcacaagaaaagacaccacctctcaactgtcacgtcaaagggctttgcccagtacgagctgtttaagtcatccgccctagacgataccatcacagcgagccagacagcgatcgcgctggacatcagctggtcccccgtagatgagatcttgcagatccctcctttgagttccacggcaacactcaacataaaagtcgaatcaggagagccccgaggaccacttaatcatttgtacagggagctgaagttccttttagtgcttgccgacggtttgaggacaggggtaactgagtggctagaaccattggaggcaaagtccgccgtagagcttgtgcaggagtttctaaacgacctgaacaaactggatgggttcggagacagtacaaagaaagatactgaagttgaaacgctgaaacacgacaccgccgctgtggaccgtagtgttaagaggctatttaaagtgagaagtgacctcgattttgccgaacagctgtggtgtaagatgtcaagctctgtgatctcttaccaggatcttgtgaagtgttttactttgataatccaatctttacagcggggtgacattcaaccttggcttcactctggttccaatagcctgctgtctaagctgatccatcagtcctatcacggaaccatggacaccgtgtctttgtctggaaccattcctgtgcagatgctgctagagatagggcttgacaagctgaagaaagactacatttcctttttcatcggacaggagctggctagcttaaaccacttggagtattttattgccccttctgtagatattcaggagcaagtgtatagggtccagaaactgcaccacatcctcgagatccttgtctcttgtatgccttttatcaaaagtcagcacgaactcctgttctctctgacacagatctgcatcaaatactataaacagaatcctctggatgaacagcatatattccaactaccagtacgccctaccgcagtgaaaaacctgtaccagtcagaaaaacctcaaaaatggcgcgtggagatatactcgggccagaagaaaattaagaccgtttggcagctgagtgatagttcaccaattgaccacttaaattttcacaagccggacttctccgagctcaccctgaatggctcgctggaggaacggatcttttttacgaacatggttacttgtagtcaggtccatttcaaatag

SEQ ID NO: 247990 - DNA, 1275 bp, synthetic construct
  misc_feature 1..1275: note = Description of Artificial Sequence: Synthetic coding sequence
  source 1..1275: mol_type = other DNA
atggccgcacttggcgacgaagttctagatggctatgttttccccgcttgtcccccttgctcatatcgctatccataccctgccgctactaaaggcaagggggctgcaggcggatcatggcagcaacgcggaagaggctgcctgcctgcaagctccccctgtagtgccggagccgctagtctgtcattccctgggtgcggacggttgaccgccgcagaatactttgattcttaccaaagggagcgcctaatggccctgttggcacaagttggaccgggtctcggcccacgcgctcgcagagcagggtcctgcgacgtagcagtgcaagtgtcccctaggatcgacgccgcagtacagtgctccctcggtcggaggacgctgcagaggagagctagagacccagagtctccggctgggccaggagcggaagggaccacggggggaggatctttctcacagcagccctcaagacgaggcctggagcagggatcaccgcaaaacggcgcaccccgaccgatgcgcttccccaggaccgtggccgtgtattctcccttggctctgaggaggctcaccgcgttcttggagggtccgggaccagctgccggagaacagagaagtggggcaagcgatggtgagagggggccaccccctgctaggttgcagggccctgaggagggagaggtctggaccaagaaggccccacgacgccctcagagcgacgatgatggagaggcccaggccgcagtgagggcttcgtgggagcagcctgccgacgggcctgaattaccccctcgcgaagcccaggaaggcgaagcagcgcctcggagcgccttgcgatctccgggtcaacccccatctgcaggcagagcaagggacggcggtgatggcagagaggccgcagtcgccggagaaggtccttccccacgttcccccgagctgggcaaggagcggctacgattccagtttctggaacagaaatacggctattaccactgtaaggactgtaatatccgctgggagagtgcatacgtttggtgtgtgcaggggaccaacaaagtgtattttaagcaattttgtcgtacatgccagaagtcttataacccataccgggtggaggatatcacatgtcagtcttgcaaacagactagatgtagctgtcctgtaaagctgcggcacgtcgaccctaaacgccctcaccggcaggatctttgcggcagatgcaaaggcaagcgactgagctgcgattctaccttctcttttaaatatatcatttag

SEQ ID NO: 247991 - DNA, 1719 bp, synthetic construct
  misc_feature 1..1719: note = Description of Artificial Sequence: Synthetic coding sequence
  source 1..1719: mol_type = other DNA
atggcagcgcctcgcccatcccccgctatttcagtatccgtgagtgcccctgccttctacgccccacagaaaaagttcgggccagtggtggcaccaaagcccaaggttaaccccttccgacctggcgactcagagccaccccctgcaccaggagcgcagcgggcacagatgggtcgcgtgggagagatccctccgccacctcccgaggattttccgcttccaccgcctccgttagccggtgacggagacgacgctgagggggctctgggtggagcgtttcctcctcctcctccaccaatcgaggagagttttcccccagctcctcttgaggaggaaatctttccttccccccctcccccaccagaggaagaaggcggaccagaagctcctatacctccacctccccagccgagagaaaaggtttctagcattgatcttgaaattgacagcctgagttctctacttgacgacatgaccaaaaacgatcctttcaaagcccgtgtatcctctggctatgtgcccccacctgtagctactcctttcagttcaaaatcttccacaaaacccgctgcgggtggcaccgcccctttgccaccctggaagagcccgagttcaagtcaaccgctccctcaggtccccgctcccgcacaatcccagacacaatttcatgtgcagccacaaccccagcctaagccccaggtgcagctgcacgtgcagtcacagacccaacctgtgagtctggccaatacccagccacgcggtcctccagcctcctctcccgctcccgctcccaagttctcacccgtgaccccgaaattcactccagtcgcatccaagttctcacccggagcacccggtgggtcaggctcccagccaaatcagaaactcggccaccctgaggctctgtcagctggaacggggagccctcagcccccaagctttacatatgctcagcaacgggaaaagccccgagtccaggaaaaacagcaccccgtgcccccacccgctcaaaatcaaaaccaagtgaggtcaccgggagctccaggtcccttaactctgaaggaagtggaggagctggaacaactgacccaacagctgatgcaagacatggagcacccccagaggcagaacgtggcggtgaacgagctttgcggccgttgtcatcaacctctggccagggcacagccagctgtccgagctctgggtcagttgttccacatagcgtgctttacgtgccaccagtgcgcgcagcagctgcagggccagcagttttacagccttgagggagctccttactgcgaaggctgctacaccgacaccctggaaaagtgcaacacatgtggagagccaatcactgatcgaatgctgcgtgccacagggaaagcgtaccaccctcattgcttcacttgtgtggtttgtgcccgtcccctggaaggcacttcttttattgtggatcaggccaaccggccacactgcgtgcctgactatcataagcaatacgccccacggtgcagtgtctgcagcgagccaattatgccagaaccaggcagggatgaaaccgtcagagtggttgcattggacaagaatttccatatgaagtgttataagtgtgaggattgcggtaaaccattgtctatcgaagccgatgacaatggatgctttcccttagacggccacgtgctctgcagaaaatgccacacagcacgggcacagacatag

SEQ ID NO: 247992 - DNA, 1623 bp, synthetic construct
  misc_feature 1..1623: note = Description of Artificial Sequence: Synthetic coding sequence
  source 1..1623: mol_type = other DNA
gccgcaccccgtcctagcccagcaatctccgtgtcggtttcagccccagcattttacgccccacagaaaaaatttggtcccgttgtcgcaccaaagcccaaagtgaatccgtttagacctggcgatagcgagccgccaccagctcccggagcgcaaagggctcagatgggtcgggtaggagaaatcccaccccctccgcctgaagatttccctcttcctcctcccccactcgccggtgacggagacgatgcagagggtgctctaggcggagctttccctcccccaccaccacctatagaggaaagctttcccccagcccctctggaagaagagatttttccctctccacctcctccacctgaggaagaggggggacccgaggcgcctatacctccaccaccccaggtcagctctggctacgtgccgccaccggtggccactcctttctcatccaaatcctctacaaagccagcagccggaggtacggcccctctgcccccatggaaaagccctagtagcagccaaccattgcctcaagttcccgctccagcccagtctcagacccagttccatgttcagccacagccgcagcctaagccgcaggttcagctccacgtccaaagccagacccagcccgtgagtctggccaacacacagcctagggggccacctgcatcgtctccagccccagccccaaagttctcgcctgttacaccaaagttcactcctgttgccagtaagttctccccaggggctcccggaggttctggtagtcagccaaatcagaagctcggtcatcccgaagcactgtctgctggtaccggttctccacaacccccttcttttacatacgcccaacaaagagaaaagccccgtgtccaagaaaagcagcatccagtgccgccacccgcacagaatcagaatcaggtgaggtccccgggtgccccagggccactcaccctgaaagaggtggaagaactcgagcagttgactcagcagctcatgcaggacatggagcacccccaacggcagaacgtggctgtgaatgagctctgcggcagatgtcaccagcccctggctcgtgctcaacccgctgtcagagcactgggacaactgtttcacatagcttgtttcacttgtcatcaatgcgcccaacagctccaggggcagcaattttacagcttagagggagccccatattgcgagggctgttacaccgacactttggaaaagtgcaacacatgcggcgagcccatcactgatcggatgctgcgggcaaccggcaaggcttaccatccccattgctttacttgtgtggtctgtgcacgccctcttgagggcacaagttttatcgtcgaccaagcaaaccggccacactgcgtgcctgattaccacaaacagtatgctcccagatgcagcgtctgtagcgagccaattatgcccgagccgggacgcgatgagactgtgcgcgtggttgcgctcgataagaacttccatatgaaatgttacaagtgtgaagactgtggtaagcctctttccattgaagccgatgacaatggctgttttcctctcgatggccacgtgctctgcagaaagtgtcacacggcaagggcacagacctag

SEQ ID NO: 247993 - DNA, 1248 bp, synthetic construct
  misc_feature 1..1248: note = Description of Artificial Sequence: Synthetic coding sequence
  source 1..1248: mol_type = other DNA
atgaccaagaacgatcctttcaaagctcgggtgagctcaggctatgttccacctcccgtggccacccctttctcgtctaagagctctaccaagcctgccgctgggggaacagccccactcccgccttggaaatcgccttcatcatctcagcctctaccacaggtccccgctccagcgcagtcccagacacagttccacgtacagccccagccccagccaaaaccccaggttcaactccatgtccaatcacagacccagccagtgagtttggccaacacgcagcctcgaggaccccctgcttctagtccagcccctgctcccaaattctcccctgttactcctaaatttaccccggttgcatccaagttctctccaggggctccaggcggaagtggcagccaacctaatcaaaaactgggtcatccagaagcgctgtcagccggaactggtagcccccagccgccaagctttacctacgcacagcaaagggaaaagccacgcgttcaggaaaaacaacaccccgttccccctcctgcccaaaatcagaaccaagtgcgttcaccaggagcacccggacccctgaccctcaaagaggttgaggaactcgaacagctaacccagcagcttatgcaggacatggagcacccacagcgtcagaacgttgcagtgaatgagttgtgtggcaggtgccatcagcctctggccagagcgcagccagccgtgcgcgctctgggtcagctgtttcacattgcctgttttacatgtcatcagtgtgcccagcagctgcaaggacagcaattctattccctggagggggctccatactgcgagggctgctacaccgatacactcgaaaaatgcaatacttgtggagaacccatcacggacagaatgttaagggccaccgggaaggcataccaccctcattgtttcacctgcgttgtttgtgctcgacccctggaagggacctccttcattgtggaccaggccaaccgacctcactgtgtgcctgactaccacaaacagtatgccccaaggtgctccgtctgcagcgagcctattatgccagagcccggtcgggacgaaactgtacgcgtggttgcactggataagaatttccatatgaaatgttataaatgtgaggattgtggaaagcccctgtcaattgaggctgatgacaatggctgttttcccctggatgggcacgtgctgtgccggaaatgtcatacagcaagggcacagacttag

SEQ ID NO: 247994 - DNA, 1458 bp, synthetic construct
  misc_feature 1..1458: note = Description of Artificial Sequence: Synthetic coding sequence
  source 1..1458: mol_type = other DNA
atgggccgagtcggagaaattcctccaccccctccggaggacttcccgttgccaccaccacccctcgctggcgatggcgatgacgcagaaggggctctcggtggcgcattccctcctccgcctcctcccatcgaggaatcatttcccccagcccctcttgaggaagagatatttcccagccccccaccccctcccgaggaggagggcggaccggaagcacccataccgccacctcctcaagtgtcatccggctatgttcccccacccgttgcaaccccattctccagcaaatcctctactaagcccgctgcaggaggaacggcgccactgccaccctggaaaagcccttcctcgagccagccacttccccaagttccagcccctgcccagagtcagactcagttccacgtacagccccagccgcagccaaagccccaagtccaactccacgtccagtctcagacccaacccgtgtcgctggctaacacgcagccgagaggacctcctgctagctcgcccgctccagcacctaagttctctcccgtaacgcccaagtttaccccagtggctagcaaattcagtcctggcgcacccggagggtcaggtagtcagccgaaccagaagctaggccatcctgaggccctgagtgcaggcactggcagcccccaacccccaagcttcacctacgcccagcagcgcgagaagcctagggtgcaagagaaacaacacccagttcctccaccggctcagaatcagaaccaggtgcggtctcctggtgcaccagggccactgaccctcaaagaagtcgaagaactggaacagcttacgcagcagctcatgcaggacatggagcacccacagcgacaaaacgtggctgtaaacgaactgtgtgggaggtgtcaccagccactggccagggctcagccggctgtgcgcgctctgggtcagctgtttcatatcgcgtgctttacatgccaccagtgcgcgcagcagctgcagggccagcagttctattccctcgaaggggcaccatattgtgagggatgttatacggacaccctggaaaagtgtaacacgtgcggggagcctatcactgatcgaatgctccgcgcaacaggcaaggcctaccaccctcattgcttcacctgtgtagtctgcgctaggcccctggagggcacttctttcattgtcgatcaggccaaccggcctcattgcgtgccagactatcataaacagtacgcacccaggtgttcagtctgctcagaaccgatcatgcctgagcccggtagagatgagaccgtcagggtggtggccctggacaaaaacttccacatgaagtgctacaagtgtgaggattgcgggaaacctctgtcaattgaagcagacgacaacggctgcttcccgctcgatggccacgtcctctgccgcaagtgtcacaccgcgagggcccagacttag

SEQ ID NO: 247995 - DNA, 495 bp, synthetic construct
  misc_feature 1..495: note = Description of Artificial Sequence: Synthetic coding sequence
  source 1..495: mol_type = other DNA
atggcggctccgcgaccatctccagcaatctccgtatccgtgagcgcgccagccttctatgccccacagaagaagtttgggcctgtggtcgcacccaaacctaaggtgaatcccttccggccaggagatagtgagccaccgccagctcctggggctcagagagcccagatggggagagtgggagaaattccaccaccacctcctgaggacttccctctcccgcctccccctctggcaggcgacggagacgatgctgagggagcgttgggcggagcatttcctccaccaccaccgccaattgaggagagctttccaccagcaccactcgaagaagagatctttcccagccctcctcctccaccggaagaagaaggcggtcccgaggctcctattccaccgccacctcagcccagagaaaaggtaagcagcatcgatctggagatcgacagtctcagcagcctgctggatgacatgaccaaaaatgatcccttctag

SEQ ID NO: 247996 - RNA, 1419 nt, synthetic construct
  misc_feature 1..1419: note = Description of Artificial Sequence: Synthetic coding sequence
  source 1..1419: mol_type = other RNA
atgaaattccttatcttcgcatttttcgggggagttcacctgttatcactttgttcaggcaaagctatctgtaaaaatggcatcagcaaacgaacatttgaggaaattaaggaggaaatagccagctgcggggatgtggccaaagcaatcattaatttagcagtctatggaaaagcgcagaatcgcagttacgagcggctagcccttttagtggatactgtggggccgcgcctgtcaggcagtaaaaatttggagaaagccatacagataatgtaccaaaatctgcaacaggatggcctggagaaggtgcatcttgagcccgtgcggattcctcattgggagaggggagaggaatctgcggttatgctggagccccgcattcacaagattgccatactcggactgggctcatctataggaacaccccccgagggcataacagccgaagtactggtcgttacctcatttgatgagctgcaacgaagagcaagtgaagcaagaggcaagatcgtcgtgtataaccagccctatatcaactattcccggaccgtacagtacagaacccagggtgctgtggaagcagccaaggtgggagccctcgcttcactgattcgcagcgtagcatccttcagtatatatagcccccacactggtattcaggagtatcaggatggagtgcctaagatcccaactgcctgtataaccgtggaagatgctgagatgatgtcgcggatggcaagccacgggataaaaatcgtgatccagctaaagatgggggcaaagacgtatccagacacagattcatttaacacagtggctgaaattaccggctctaagtaccccgagcaggttgtgctcgtgtcagggcatctggactcgtgggatgtgggacagggcgcaatggacgatggcggaggcgcattcattagctgggaagccctttctttaataaaagatctaggcctgcggcccaaaaggactctaaggctcgtgctctggacagctgaggaacagggtggcgtaggggctttccaatactatcagctgcacaaagtcaacatcagcaattacagtttagttatggagtcagatgctggaaccttcctgcctactggacttcaattcaccggaagcgagaaagcccgagctattatggaagaagtgatgtctttgctccagccacttaacatcacccaggttctgtcgcatggtgagggaacggacatcaatttttggattcaagctggcgtgcccggcgctagcctactggatgatctttataaatattttttcttccaccattcacatggtgatactatgaccgtgatggaccctaaacagatgaacgtcgctgccgctgtgtgggcggtggtttcctacgtcgtggccgacatggaggagatgctgccccggtcttag

SEQ ID NO: 247997 - RNA, 5724 nt, synthetic construct
  misc_feature 1..5724: note = Description of Artificial Sequence: Synthetic coding sequence
  source 1..5724: mol_type = other RNA
atgcaatttgtgtcttgggccacattacttactctccttgtgagggatctcgctgaaatgggatccccagacgctgccgcggctgtcagaaaggacaggctgcacccaaggcaggtaaaactcctagagactctgtcggaatacgaaattgtaagtccaattcgcgtcaacgctttaggtgagcccttcccgacgaacgtgcattttaagagaacccgccgctccatcaatagcgccaccgatccttggcccgctttcgcatcgtcttcgagttcatcaactagttcccaagcccattatagactgagcgcattcggacagcagttcctgttcaatttaactgctaacgctggatttatcgccccgctcttcacagtaactctgctggggacaccgggggttaaccagacaaaattttacagcgaagaagaggcagagctaaaacactgtttttacaaaggatacgtgaataccaatagcgaacacacggctgtgatttccttatgctcagggatgcttggaacttttcgatcacacgatggggattactttattgagcccttgcaatcaatggacgagcaagaggacgaagaagagcagaacaaaccccatatcatttacaggaggtctgctccccaacgcgagccctctacaggtcggcacgcatgcgatacctctgaacacaaaaatcggcactctaaggataagaaaaaaaccagagcaaggaagtggggcgagaggatcaatctggcaggcgacgtcgctgccttaaactccgggctggcaactgaagcctttagcgcctacggaaacaagacggacaacacaagggagaagcggacacacagacggactaaacggtttttgtcttacccaagattcgtcgaagtgctggtggtggcggataatcgtatggtgtcatatcatggggaaaacctgcagcattatatactgacacttatgtctatcgacggaccctctattagtttcaacgctcagacaactctgaagaatttttgtcagtggcagcatagcaagaattcacccggaggcattcaccatgacaccgccgttctgctgactagacaggacatttgcagagcccatgacaagtgcgacacgctaggcctcgccgagctgggtactatttgcgatccgtatagatcgtgcagcatctctgaggactccgggctcagcaccgcctttacgatcgcccacgaacttggtcatgtgttcaatatgccgcacgatgacaataataagtgcaaggaggagggagtgaaaagtccccagcatgtgatggccccaactctgaacttttatacaaacccctggatgtggtcaaagtgttcaagaaagtacatcaccgaatttctcgacaccggctacggcgaatgcctgcttaacgagcctgagagcagaccgtacccgcttcccgttcagctcccaggtatactgtataacgtcaacaagcagtgcgaactcatattcggtcccggtagccaggtctgcccctatatgatgcagtgtcgccggctctggtgcaacaacgtgaatggtgtacataaagggtgccgaacgcagcacaccccttgggcagatggcaccgagtgtgaaccaggtaagcattgtaaatacggcttctgcgtgcctaaggagatggacgtgcccgtgactgacgggtcatggggcagctggtctcccttcggcacctgttcacgtacatgcggaggaggcatcaagacagccatccgtgaatgcaatcggcccgagcctaagaacggcgggaaatactgcgttggacgaagaatgaagttcaaatcctgtaacacggagccctgtctgaagcagaagcgagattttagggatgagcagtgtgctcacttcgacggaaaacacttcaacattaacggcttgctgcctaacgttcggtgggttcctaaatatagtggcattctgatgaaggatcgctgtaagcttttttgtagagtggctgggaacactgcttactaccaactacgggacagggtgatcgatggcactccctgtggtcaggatactaacgacatctgtgtccagggtctgtgcaggcaggcagggtgtgaccacgtgcttaacagcaaggcaagacgagacaagtgtggagtatgcggaggcgataattcgtcttgcaagaccgtggcaggtacatttaacaccgtgcactacgggtataacaccgttgtcaggatccctgctggcgctaccaatatcgatgttcgccaacactccttctcgggtgagacagacgatgacaactacctggccttatcatctagcaagggcgagtttctcctgaatggcaacttcgtagtaaccatggcgaaaagagaaattcggataggaaacgccgtggtagagtactcaggatcagaaacagcagtggagaggatcaattccaccgataggatagagcaggaactactgttacaggttctatcggtgggcaaactctataaccctgacgtgcgttatagctttaatattccgatcgaggacaagccacaacagttttattggaactcacacgggccttggcaggcttgttccaaaccatgtcagggagaacggaagcgcaagttggtttgcactagagaaagcgaccaactcactgtatcagatcagcggtgtgaccgactgccccagcctggccatatcaccgagccttgcggtactgattgcgacctacgttggcacgtggcatcaagatccgaatgctctgcgcagtgtgggcttggctataggacattggacatctactgcgccaagtactcacgtcttgacggcaagaccgagaaagtcgatgacggtttttgtagttcccaccctaaaccatcaaaccgggaaaaatgcagcggtgaatgtaacacaggcggctggcgctactcagcgtggaccgaatgcagcaagagctgtgacggaggtacacagcggcgcagagccatatgtgtcaatactcggaacgatgtgctagacgattcaaaatgcacacaccaggagaaggtcactatccagcggtgcagtgagtttccctgcccacagtggaagagcggcgactggtctgaatgcctggtgacctgcggcaagggccataaacatagacaggtgtggtgccagttcggcgaagacagactcaacgatcgcatgtgtgatcccgagacaaagccgacttcgatgcagacctgccagcaaccagagtgcgctagctggcaggcaggaccctggggccaatgttcggtgacgtgcggccaaggctatcaattgcgggccgttaaatgcataataggcacatacatgagtgtggttgatgataacgattgtaatgccgctacaaggcctacggatactcaggattgcgaactcccgagctgccacccacctcccgcagcaccagagacccgacgatcaacctatagcgcacccagaacccagtggcgttttggctcctggactccctgctctgctacctgtggcaaaggtactagaatgcgctatgtgtcgtgccgtgacgagaatgggagcgtcgcagatgagtccgcttgtgcaacgcttccgaggccagttgcaaaggaggaatgctccgttaccccatgcgggcagtggaaggcgttagattggagttcatgttctgtcacatgcggccagggacgggctacgaggcaggtgatgtgcgtcaattatagcgatcacgttatagaccggagtgagtgtgatcaggactacattcccgaaacggatcaggactgcagtatgtccccttgtccccagcggacccctgattccggactggctcagcatcccttccaaaacgaagattaccgccctcggagtgcttcaccatctagaacccacgtgttgggaggcaatcagtggcggactggcccctggggggcttgtagttctacctgcgctggcggcagccagagacgggtggtggtatgtcaagacgaaaacggatacacagctaacgactgtgtggaaagaatcaaaccggacgaacagagagcgtgcgaatcagggccctgcccgcaatgggcatacggcaattggggggaatgcaccaaactctgcgggggcgggatccggacacgactggttgtgtgccagcggagtaacggcgaacgcttcccggatctgtcatgtgaaattctagataagccgccagatcgcgagcaatgcaatacccacgcatgtccccacgacgctgcctggagcactggtccttggagcagttgcagcgtgtcctgtgggcggggccataagcagcgaaacgtgtactgcatggctaaggatggctcacacctggaaagtgactactgcaaacacctggctaagcctcatggacataggaaatgccggggtggtcgttgtccaaagtggaaggcaggcgcttggtcacaatgctctgttagttgcggacgtggggtgcagcagcgccacgtgggttgccaaatagggacccacaagatcgcacgcgaaaccgaatgcaatccatatacacgccctgaatcagaacgcgactgtcagggtcctagatgcccgttgtatacgtggagagccgaagagtggcaggaatgtaccaagacatgcggagagggaagtagataccggaaggtagtctgcgtggacgataataaaaatgaagtgcatggtgctaggtgcgatgtgtcaaagcggcccgtggatcgtgagtcttgtagcctgcaaccatgtgagtatgtctggatcacgggtgaatggtcagaatgttcggtgacttgcggcaagggatacaaacaaagattagtgagttgttccgaaatttacaccggcaaagagaactatgagtattcctaccagaccactatcaattgtccaggcacacaacctccatctgtgcatccatgctacctgagagactgtcctgtctccgctacttggcgtgtcggaaactgggggtcatgcagtgtttcctgcggagtgggtgtcatgcagaggtccgtacagtgcctgactaacgaggaccagccctctcatctatgccataccgacctgaagcctgaggaaaggaaaacctgtagaaacgtgtacaactgtgaactgccacagaactgtaaggaggttaaaaggttgaaaggagcctctgaagatggagagtatttcctcatgatacgagggaagttgcttaaaatcttttgtgccggcatgcactccgatcacccaaaggaatatgtcacgttagtgcacggcgactccgagaacttttccgaagtctatggacaccgtctgcacaacccaacagagtgtccatacaacgggtcaaggcgcgacgactgccagtgccgaaaagactacaccgctgcagggttctcttcctttcagaagatcagaatagatctgaccagtatgcaaatcattactacagacctccagtttgctaggacatctgaaggccaccccgtaccattcgcgacagcaggcgattgctatagtgccgccaagtgccctcaggggagattttccattaatctgtatggtaccgggctgtcactgactgaatcggccaggtggatctcacaaggcaattacgcagtgtcggacattaaaaagtcccccgacggtactcgcgttgttggtaaatgcggtggttattgcgggaaatgtactccgtcatctggaactggccttgaggtaagagttttgtag

SEQ ID NO: 247998 - RNA, 2976 nt, synthetic construct
  misc_feature 1..2976: note = Description of Artificial Sequence: Synthetic coding sequence
  source 1..2976: mol_type = other RNA
taagagtgctccgctcagtgcggcctgggctaccgaaccctcgacatctactgcgcaaaatacagtaggctggacgggaaaacagaaaaagtagatgacgggttctgttcgtctcatccaaagccttctaatagggagaagtgcagcggcgagtgcaatacaggtggatggaggtattctgcttggaccgaatgttccaaatcttgcgatggtggcactcagagaaggagggccatttgcgtgaacacgaggaatgacgtcctcgacgactcgaaatgtacccaccaggagaaagtaactatccagcgttgtagtgagtttccctgcccccaatggaagagtggagattggtccgagtgtctcgtcacctgcgggaaaggtcataaacaccgccaggtgtggtgccagttcggtgaggatcgcctgaacgatcgcatgtgtgaccccgaaaccaaacccacgagcatgcaaacatgtcagcagcctgaatgcgcttcttggcaggccggaccttggggacagtgttctgtgacctgtggacagggctatcagctgcgcgcggtcaagtgtataatcggaacgtacatgtcagtggtcgatgataatgactgcaacgcggccaccaggcctacagatacacaggattgtgaattgccttcttgtcacccaccaccagcagcaccggagacccgcaggagcacgtactccgcacctaggacacagtggcggtttggttcttggactccgtgtagcgccacctgcggtaaaggaacaaggatgcgatacgtgagttgtcgagatgagaatggttccgtggccgatgagtctgcctgcgccacactgcctcggcccgtggctaaggaggagtgttctgtcaccccttgcggccagtggaaagcactagattggagtagctgttcagtaacatgtggccagggcagagcgaccagacaggtgatgtgtgtcaactattcagatcatgtaatcgaccggagtgagtgtgatcaggactatatccctgaaaccgatcaggattgttcaatgtccccctgcccccagcggaccccagactctggcctggcccagcacccattccagaatgaggattatagaccgaggtccgcaagcccaagtcggacgcacgtactggggggtaatcagtggcggactggtccttggggcgcctgctccagcacctgcgccggcgggtcccagcgtagagtcgtggtctgccaagatgagaatggctacacggctaatgactgcgtagaaaggattaagcctgacgagcagcgggcttgcgaaagcggtccctgtccccagtgggcctatgggaactggggcgaatgcaccaaactgtgcggcggcggaattcgaactcgactggtggtatgccagagatcaaatggggagcgtttccctgatctttcttgtgaaatccttgataaacctcctgacagggaacagtgtaatacacatgcctgtcctcacgatgccgcgtggtccaccggtccatggagttcatgctctgtatcttgcggacgcggccacaaacaaagaaacgtctattgtatggcaaaggatggttcacaccttgagtccgattactgcaagcatttagctaaacctcatggacacaggaaatgccggggagggaggtgcccgaaatggaaggctggtgcatggagccagtgttccgtgagttgtggacgcggcgtgcagcagcggcacgtaggttgtcagatcggcacacacaagatcgctagggagaccgagtgcaacccctatacaaggcctgagtcggaacgtgactgtcagggacccagatgccccttgtacacatggcgagctgaagagtggcaggagtgcacaaaaacctgcggggagggatcaagatacagaaaggtggtatgcgtagacgataacaaaaacgaagtccacggagcccgctgcgatgtgtctaagcggcctgtggatagggaatcttgtagcttgcagccttgtgaatacgtctggatcacgggcgaatggtcagagtgtagcgtcacctgcggtaaaggttacaagcagaggctcgtgtcatgcagcgaaatatacaccggcaaggagaattacgaatactcatatcaaactactataaactgtccaggcactcagccaccatcagtccacccttgttacctacgcgactgtccagtctcggccacctggcgtgtggggaactgggggagctgcagtgtgagttgcggagtgggagtgatgcagcgcagtgtgcagtgcctgaccaacgaggatcagcctagccatctgtgccataccgatttgaagccagaagaacggaagacttgtcgtaacgtctacaattgcgaacttccccagaattgtaaagaagtgaaaagattgaagggggcaagtgaggatggagaatatttcctgatgattcgtggtaagctgctcaaaattttttgcgccggcatgcactccgaccatcccaaagaatatgtcactctagtgcacggtgactctgagaacttctctgaagtctacgggcaccgactccataaccccactgaatgcccctataacggatctaggcgagatgattgccagtgcagaaaagactataccgccgccggcttctcctcttttcaaaagatccgcattgatctaactagcatgcagatcataacaactgacctccagtttgcccggaccagcgaaggacaccccgttcctttcgcaactgcaggcgattgctactcggctgccaagtgtcctcagggtcgctttagcattaatctttacggaacaggtttatccctaactgagagcgcgcgctggatttcccagggaaactacgctgtgtctgacataaagaaaagccccgacggaactcgcgtggttggcaaatgcggaggatattgtggcaagtgtacaccaagcagtggtacaggattagaagtgcgcgtgctgtag

SEQ ID NO: 247999 - RNA, 5808 nt, synthetic construct
  misc_feature 1..5808: note = Description of Artificial Sequence: Synthetic coding sequence
  source 1..5808: mol_type = other RNA
atgcagtttgtgtcgtgggccacactcttgacattactggtacgggaccttgcagagatgggaagcccggacgctgcggcagcagtaaggaaggatagactacatccacgacaggtgaaattgctggagaccctcagcgaatatgaaattgtttcgccaatacgggtaaatgctctgggcgaaccttttcccacaaatgtgcacttcaagcggacacggcgttcaatcaatagcgctaccgacccttggcccgccttcgcctcctcgtcaagctccagtacttcgtctcaggcgcattatcgtctttctgcatttggacagcagtttttattcaacctgacagccaatgccggtttcattgcgcccctcttcactgtgacactcttgggcacccctggtgtgaaccaaactaaattttacagcgaggaagaggcagaactgaaacactgcttctacaagggttacgtaaacaccaacagcgagcacaccgcagtgatttccctttgttcaggtatgcttggaacttttcggagccatgatggagactactttattgagccactacagtccatggacgagcaggaggatgaggaagagcagaataagccccatattatttaccgcaggtccgcaccacaacgcgaaccctcaacaggaagacacgcctgtgatactagcgaacataagaacaggcactctaaggacaagaaaaagacaagggcgcgcaaatggggagagcgcataaatctcgcaggggacgtggctgcacttaacagtggactggctactgaggcgttctctgcctatgggaataaaaccgacaataccagagaaaagcggacccaccgtcggactaagcgctttttatcttacccacgattcgtcgaggtgctagtcgtagcggacaataggatggtaagctatcacggtgaaaaccttcagcactacatcctcactctgatgtctatcgttgcgtcgatctacaaggatccctccatcggcaaccttatcaacattgtgattgttaacctcatcgtcattcataatgaacaggacggaccctccatatcgtttaacgctcagaccacactgaagaacttctgccagtggcagcatagcaagaattcgcccggaggaatccaccacgacacagccgtgctcctcacccgacaggacatttgtcgggcacacgacaagtgtgataccctgggactcgctgagcttgggaccatctgcgatccatatcgttcctgctccatcagcgaagatagtggcttgagcaccgcgtttaccatagcacatgagctgggccatgtgtttaatatgccacatgacgataacaataaatgtaaggaagaaggagtgaaatccccccagcacgtaatggcccctaccctcaacttctacacaaacccctggatgtggtctaagtgctcccgaaagtatatcaccgaattcctggacacgggttatggggagtgtcttctcaatgagccagaatcccgcccataccccctgccagtgcagcttcccggtattctgtataatgtgaacaagcaatgtgaactaatattcggccccggaagccaggtctgcccctacatgatgcagtgcaggaggctttggtgtaataatgttaatggtgttcataagggttgtcggacgcagcacacgccctgggctgacggcacagagtgtgaacctggcaagcattgcaagtacggattttgcgtgccgaaagaaatggacgtgcccgttacagacggcagctggggctcatggagcccttttggcacttgctcccggacttgcggagggggaatcaaaaccgccattagagaatgtaaccgccctgaacccaagaatggaggaaagtactgcgtaggcaggcgcatgaaattcaaatcatgtaatacggagccatgtctgaaacagaagcgagacttccgagacgagcagtgcgcccacttcgacggcaagcactttaacatcaatgggctgctgccaaacgtgcggtgggtgcctaagtatagcgggatactgatgaaggatcggtgtaagctgttctgtagggtcgccgggaatacggcatattatcagcttagggatcgcgtcatcgatgggacaccctgcggtcaggataccaacgacatttgcgtgcagggcctttgtaggcaagcggggtgcgatcacgtcctgaacagcaaagccaggagggacaaatgcggcgtctgtgggggtgataactcttcctgtaaaaccgtggccggaactttcaacaccgtccactatggctacaatacagtcgtaaggattcctgccggggccaccaacatcgacgtgcgacagcactcgttttcaggtgagacagacgacgacaactacttagcattgtccagttccaagggagaatttctactgaatggaaacttcgtggtaacaatggccaaaagggaaatccggatcgggaacgcagtagtggagtacagcggcagcgagacagccgttgagcgcatcaattcgaccgatcgaattgagcaggaactgttgctgcaggttctctctgtcgggaagctttacaaccccgacgttaggtatagcttcaatatccctatcgaggataaaccacagcagttctactggaattctcacggcccttggcaggcgtgctctaaaccgtgccagggggaacgcaaaagaaaactcgtgtgtactagagaatcagaccaactgaccgtaagcgatcaaaggtgtgacaggctgccgcaaccgggacatataacagagccatgtggcactgattgtgacctaagatggcacgtggcctcccgaagcgagtgcagcgcccagtgtggactcgggtatagaaccctagatatttactgcgcaaagtactcacgcctggacggaaagaccgagaaggtcgacgatggtttttgctcctcccatcctaagccttccaaccgcgagaaatgttctggagagtgcaacactggaggatggcgctactcagcctggaccgaatgttcaaagtcgtgtgatggaggaacacagcgccggcgagccatctgcgtgaacacccggaacgatgtcctggatgacagcaaatgcacacatcaggaaaaggtcacaatccaacggtgcagtgagtttccttgtccccagtggaaatccggtgactggagtgagtgccttgtcacctgtggtaagggtcacaagcacaggcaagtgtggtgccaatttggagaagatcggctgaatgaccgcatgtgtgaccctgagactaagcctacttctatgcagacgtgccagcaacccgaatgcgcctcttggcaagctggcccatggggccaatgcagtgttacttgtggccaagggtaccagctaagagcggttaaatgtattattggaacctatatgtcagtggtggatgataatgactgtaatgcggctactcggccaaccgacactcaggattgcgagttaccctcttgtcaccccccgcccgcagctcctgaaacaagaagaagcacttatagcgcaccacggacacagtggaggtttggctcctggacaccatgttctgccacatgtgggaaagggacacggatgaggtacgtctcttgcagagatgagaatggcagcgttgccgacgagagtgcctgcgccaccttgccaagacctgtggccaaggaagagtgtagtgttacgccctgtggtcaatggaaagcgcttgattggtcttcttgctctgtgacctgcgggcagggccgggcaacccgtcaggttatgtgcgttaactattctgaccatgtgatcgaccggtccgagtgcgaccaggattatatccccgagacagatcaggactgcagtatgtccccatgcccacagagaacccctgattccggccttgctcagcatccatttcagaacgaggattatcggcctaggtcggcaagccccagccgcactcatgtactgggtgggaatcaatggcgaaccggtccttggggggcctgctcctccacatgtgcaggggggtctcaacgccgggtggtggtgtgtcaggacgagaatgggtacacggcgaacgactgtgtggaacggatcaagccagatgagcaacgtgcatgtgagtccgggccatgtccacagtgggcatacgggaactggggagaatgcacaaaattgtgcggaggaggaatacggacccggctggttgtttgtcagcgatccaatggtgaacggttccccgacctgtcctgcgaaattcttgacaagccccccgatcgcgaacaatgtaacactcatgcatgcccccatgacgctgcatggtcaaccggcccttggtcttcctgtagtgtgtcgtgcggtcgcggccacaagcagcgtaatgtttactgcatggctaaagatggatctcacttggaaagcgactactgtaagcacctggctaaaccccatggccatagaaagtgccgtggaggtcggtgccctaagtggaaagccggtgcttggagccaatgctccgtgtcctgtgggcgaggcgtgcagcagaggcacgtaggatgtcagatcggaactcataaaatagctcgcgagacggaatgtaacccttacacccgcccggaatccgagcgcgactgtcagggccctcggtgcccactgtacacatggagggctgaggagtggcaggagtgtaccaaaacttgtggagaaggatctaggtaccggaaggtcgtgtgcgtggacgataacaagaacgaagttcatggagccaggtgcgacgttagtaagagaccagttgaccgggagtcttgcagcctgcaaccctgcgagtatgtgtggatcactggtgagtggagcgagtgctcggtgacatgtggcaaaggctacaagcagcgactggtctcctgttctgagatttacactggcaaagagaactacgaatactcctatcagaccactatcaattgtcccggtacgcagcccccgtcagtgcatccctgttatctgagggactgtcctgtgagcgctacttggcgggtaggaaactggggatcttgtagtgttagctgtggagtaggtgtgatgcagcgaagcgtgcagtgtctcaccaacgaagatcagccaagccacctctgtcacactgatcttaaacctgaagagagaaagacttgtcggaatgtctacaactgtgaactgccacagaattgcaaagaggtgaagaggctcaaaggggctagcgaggacggggagtactttttgatgatacgtggaaagctgctgaaaatcttttgcgcagggatgcactccgatcatcctaaagagtacgtcactctggtccacggggacagcgagaactttagtgaggtctatggtcatcggctccacaacccgactgaatgtccctacaatggctcacgtcgggatgactgccagtgccgcaaagactatactgccgcaggattctcatccttccagaaaatcagaatcgacctgacatcaatgcagattatcaccacggacctccagtttgcccggacctctgaaggtcatcccgtaccctttgcgacagccggcgactgctactccgctgccaagtgtcctcaggggaggttctccatcaacctgtatggcaccggcttatccctcaccgagtcagctagatggatcagccagggtaactacgctgtttctgacattaagaaatcaccagatggcactcgcgtagttggcaaatgcggtggctattgtggcaagtgcacaccaagcagtggcactggtctggaggttagggtattgtag

SEQ ID NO: 248000 - RNA, 2052 nt, synthetic construct
  misc_feature 1..2052: note = Description of Artificial Sequence: Synthetic coding sequence
  source 1..2052: mol_type = other RNA
atggagtgctgccgaagggccacccccgggaccttgctgcttttcctcgccttcctactcttgtcctctcgcactgctagatctgaggaggatcgcgatggcctgtgggatgcctggggtccatggtccgagtgtagccggacatgtggcgggggcgccagctatagtctcaggcgttgcctcagcagcaagagctgcgaaggacgtaacataaggtaccgcacctgctcaaatgtggattgtccgccagaagctggggattttcgcgctcagcagtgtagcgcccacaatgacgtgaaacaccacggtcagttctacgagtggttgcccgtgagcaacgacccagataatccatgctccttaaagtgtcaggcaaaagggaccacgctggttgtcgagttggccccaaaagttttggacgggaccaggtgctataccgagtccttagacatgtgtatcagtggactctgtcaaatcgtggggtgcgatcatcagctggggagtaccgttaaagaggacaactgcggagtgtgcaacggggatggaagcacttgcagattggtgcgcgggcaatacaagtcccaactcagtgcaactaaaagtgacgacaccgttgtggccatcccatacggctcacggcacatacgcctggtcctgaagggaccggaccatctttacctcgaaaccaaaacacttcagggcacaaaaggagagaattcactcagttctacagggacgttcctcgtcgataacagctcagttgacttccaaaaattccctgacaaggaaattttgaggatggcgggccctctgactgctgattttatagtaaaaattaggaactccggcagtgcagatagtactgtccagttcatattttaccaaccaatcattcatagatggagagaaacggacttctttccctgcagcgccacgtgtggaggcggctaccagctgacgagtgcagagtgttacgacctcagaagcaatcgcgttgtggccgatcagtattgtcactattatcctgagaacattaaacccaagcctaagctgcaggagtgcaacctggatccatgccctgccagcgatggatataaacagatcatgccgtacgacctttaccacccactgccacgatgggaagctactccatggaccgcatgctccagttcatgtggagggggtatacagtcccgtgccgtgagttgtgtggaggaggacattcaaggacatgtaacttccgtagaagagtggaaatgtatgtatacccctaaaatgcctatcgctcagccttgcaacatcttcgactgccccaagtggttagcgcaggagtggagtccctgtacagtgacctgcggtcagggcttaagataccgcgtcgtcctatgcattgaccatagaggaatgcatacaggcggctgttctcctaagaccaagcctcacatcaaagaggaatgcatcgtcccaactccatgttataagcccaaggaaaaattgccagtggaggctaagctgccatggtttaagcaggctcaggaactcgaggagggagcggccgtgtccgaagaacctagtttcattccagaagcctggagcgcatgtaccgtaacctgcggcgtgggaacccaagttaggattgtgaggtgtcaagttctgttaagtttttcacagtcagtggcagacctgcccattgatgagtgtgagggccccaagcccgctagccagagggcctgttacgctggaccctgctctggagaaattccggaatttaaccccgacgaaacggatggcctgttcggaggcttgcaagattttgatgaactttacgactgggaatacgagggattcacaaaatgttctgagtcgtgcggcggaggagtgcaggaggccgtggtttcgtgcctgaacaagcaaacaagagagcctgctgaagagaatctatgcgtaactagccggcggcctcctcagctgctgaagtcttgcaatctcgatccgtgcccagctcggtcaagcatagacagcgcctggaacgcctgcaatgtgctttgttag

SEQ ID NO: 248001 - RNA, 1401 nt, synthetic construct
  misc_feature 1..1401: note = Description of Artificial Sequence: Synthetic coding sequence
  source 1..1401: mol_type = other RNA
atgtgcctgaccgatgaatggggtttcttcttctttttttttctcggggtccctgaagctgaagtcacctggtttcgcaataaaagcaaacttgggagcccacaccatcttcatgaaggatcattgcttctgacaaacgtctctagttcggaccagggactgtactcatgccgggccgccaacttgcatggtgaattgacggaaagtactcagttactgattttagatcctccacaggtccccacacaactggaagatatccgtgccctgctggctgctaccggccccaacctccctagcgttctaacaagcccactgggcacacagctcgtcttggacccgggtaattctgccctgctcggctgccctatcaagggccaccctgtacctaacattacatggttccacggcggccagccaatagtcactgccaccgggctcactcatcacatcctggcagctggccagatccttcaggtggctaacctgagtggcggttcccagggggagttttcttgtctcgctcagaacgaggctggtgtattaatgcagaaagcttctctggttattcaggactattggtggtccgtagatagactcgccacatgcagcgcatcatgtggaaataggggcgttcagcaaccaaggttgaggtgcttgctcaactccactgaggtaaatcctgcacactgtgccgggaaggtccgacccgcggtccaacctattgcctgtaaccgccgggattgcccctccaggtggatggtgacctcatggagcgcctgcactaggagctgcggcggaggcgttcagacccgcagagtgacttgtcaaaaactgaaagcgtctggcatcagcactccagtgtctaatgatatgtgcacccaagtcgcgaagcgtcctgtcgatacccaggcgtgcaaccagcagttgtgcgtggagtgggctttttcaagttggggccaatgtaatggtccttgcattggtccccacctcgctgtccagcatagacaggtcttttgtcaaacacgagacggtatcacattaccatcagagcagtgttcggctttaccacggcccgtctccacacagaactgttggtccgaagcatgctccgtccactggagggtgtctctctggaccctgtgtaccgccacttgtggcaattacggatttcagtcccgccgcgtggaatgtgtacatgcccgaactaataaggccgtaccagaacacctgtgctcttgggggcccaggcccgccaactggcagcgctgtaatattacaccttgcgagaacatggagtgccgggacactacgagatactgcgagaaagtgaagcagttgaaactctgccagctgagccagttcaagagcaggtgctgtggaacctgtgggaaagcctag

SEQ ID NO: 248002 - RNA, 1578 nt, synthetic construct
  misc_feature 1..1578: note = Description of Artificial Sequence: Synthetic coding sequence
  source 1..1578: mol_type = other RNA
atggagtgttgtagacgagcgacccccggaacacttcttctttttctcgccttcctactcctttctagtagaacagcgcgctcagaagaggatcgcgatggattatgggacgcttggggcccctggtcagagtgttcgcgaacctgtggaggaggcgcttcatacagccttcgtagatgcctctccagcaagtcatgcgagggcaggaatataagataccggacctgtagtaatgtggattgcccaccagaagccggggattttagggcccaacaatgtagtgctcataacgatgttaaacaccacggacagttctatgagtggcttcccgtgtccaatgatcctgacaacccatgctccctcaagtgccaagccaaggggaccactcttgttgtcgaactggctccgaaggtgctggatgggacccgatgctacaccgaaagccttgatatgtgtatttctggactgtgccagattgtgggctgcgaccaccagttaggcagtacagtgaaagaagacaattgcggagtgtgcaatggcgacggatcaacttgccgtctggttcgggggcagtacaagagtcaactatccgcaaccaaatccgacgataccgtggtcgccataccctacggatctcggcatatccggcttgtgctgaaaggtccagaccacctctatctcgaaacaaagacccttcaaggcaccaagggcgagaacagtcttagcagtactgggactttcctggtggacaactcatctgttgactttcagaaattccctgataaagaaatcctgcgtatggcgggtcctctcacagccgacttcatcgtaaaaattaggaactcgggttcagctgacagcaccgtgcagttcatcttttatcagccgattatccaccgatggagagaaaccgatttctttccctgctctgctacatgcgggggcggctatcaacttacgtctgcagagtgttacgatctccggagcaatagagtcgtggcagatcagtattgtcattattatcccgagaacattaagcccaaacctaaattacaggagtgtaatttggatccctgcccagcttctgatggttacaaacagataatgccctacgatctatatcaccccctccccaggtgggaagccacaccttggactgcctgttcatcaagttgtggcggtggtatacagagcagagctgtcagctgcgtggaggaagatatccagggccacgtgactagtgtcgaagagtggaagtgtatgtatactcctaagatgcccatcgcacaaccgtgcaacattttcgattgccccaagtggctcgctcaggaatggtcaccttgtactgttacctgcgggcagggcctcagatatcgggtggtcctgtgtattgatcacaggggcatgcacaccggtggctgttctccaaaaaccaagccacatatcaaagaagagtgcatcgtgcctactccctgttataaacccaaggagaagctgcccgtggaagcgaagcttccttggttcaaacaggcccaagagcttgaggagggagccgccgtctccgaagaaccatcctag

SEQ ID NO: 248003 - RNA, 786 nt, synthetic construct
  misc_feature 1..786: note = Description of Artificial Sequence: Synthetic coding sequence
  source 1..786: mol_type = other RNA
atgtgcctcaccgatgaatggggcttcttctttttttttttcctcggagtgcccgaagccgaagtcacttggttcagaaataaatctaaactcggttctccacatcacctacacgagggatctctgttattgacaaacgtctcctcctcagaccaaggactgtattcatgccgggcggccaaccttcacggagaactgacagagtcaactcaactgcttattctggaccccccccaagttcccacacaattggaggacatccgagcgctattggcagcaactggtcccaacctaccctccgtgctcacttctcctctcggaacgcagctagtactggaccccggcaacagcgcattactgggctgtcctatcaagggacatcccgtgcccaatatcacgtggttccacggggggcagccaatagtgactgcaacaggtcttacgcaccacattctagccgccgggcagatcttgcaggtggctaacctgtctggtggaagccagggtgagttttcatgtttagcccagaacgaagcaggcgtcttgatgcagaaagcttctctcgtgatccaggattactggtggtcggtggaccgcctagcgacatgctccgcctcatgtgggaacagaggcgtccagcagcccagactgaggtgcttgctcaactctacggaagttaatccagcccattgtgccgggaaggtccggcccgctgtacagccaattgcatgcaacaggcgcgattgtccttcgagagccatgggcctggccagtggtcttacctag

SEQ ID NO: 248004 - RNA, 5289 nt, synthetic construct
  misc_feature 1..5289: note = Description of Artificial Sequence: Synthetic coding sequence
  source 1..5289: mol_type = other RNA
atggaatgctgtcgccgcgcaacaccgggcacattactgctattcctggctttcctgctgctgtcctctagaaccgctcgaagcgaggaggacagggacggtctctgggatgcgtggggcccttggtccgaatgttctagaacatgtggaggcggcgcatcatactcattgcgtcgttgcttgtcctctaaatcgtgtgaaggcagaaacatacggtacagaacatgttctaacgtagattgtccccctgaagccggtgactttcgtgcccagcagtgctcggcccacaacgacgtcaagcaccatgggcaattttatgagtggctccctgtcagcaacgatccggacaatccgtgctccctgaaatgtcaggcgaagggcaccactcttgtggtcgaattggccccgaaggtgctggatgggacacgctgttacactgaaagtctcgacatgtgcatttccggattgtgtcaaattgtgggttgtgatcatcagttggggagcaccgtaaaagaggataattgtggagtctgcaacggcgacggttcgacatgcaggctagtgcgcggacagtacaaatcacagctcagtgccacaaagagcgatgacactgttgtggccatcccctacggcagccgacatattcggcttgttctcaagggaccggaccatctatacctggaaacaaagaccctacagggaaccaagggggagaacagcctgtcatcgaccggaacgttcctcgtagacaatagctcggtcgattttcagaagttccccgataaggagatactgcgcatggccggccccctcaccgccgactttattgtgaagatcaggaacagcggatcagccgatagcactgtgcagttcattttctaccagccaattatccacagatggagagagacagatttcttcccatgcagcgcaacttgtggcggagggtaccaactgaccagcgccgaatgctatgacctgaggagcaatagagtggtggccgaccagtattgccattattacccagaaaacatcaagcctaagcccaaactccaggaatgcaatctggacccttgtcctgcttccgatggttacaaacagatcatgccatacgacctgtatcaccccctacctcgatgggaggctaccccctggacagcatgctctagttcttgcgggggcggtatccaatcccgagcagtctcctgtgttgaagaagacattcagggtcacgtgacatctgtggaagaatggaaatgtatgtacacgccgaagatgcccatagcacagccatgcaacatcttcgattgtcctaaatggttggcccaggaatggtccccttgtaccgttacttgcgggcagggtctccgctaccgcgttgtcctttgcattgatcaccgaggcatgcacaccggagggtgttctccaaagacaaaaccccacattaaggaggaatgcatcgtgcctactccatgctacaagccgaaagagaaactgcccgtggaagctaagctgccttggttcaagcaggcccaggaactcgaggaaggagcggccgtatccgaagaaccttctttcatccccgaggcatggtcagcttgcactgttacctgcggggtaggcacccaggttcgtattgtcagatgtcaagttctgttgtctttcagccagagcgtcgcagatctgccgatagatgagtgcgagggaccaaagccagcgtcgcagagagcgtgttatgccggtccatgctcaggagagattccagagtttaatcccgacgaaactgatggtctattcgggggccttcaagactttgacgagctctacgactgggagtatgagggattcaccaaatgctctgaatcatgcggagggggcgtccaggaagctgtggtttcgtgtttaaataaacaaacaagagagcccgctgaagaaaacttgtgtgtgaccagccgtcgacccccccagttgttaaaaagctgcaacttggacccttgtcctgcccggtgggagatcggaaaatggtctccatgttctctaacttgcggggttggacttcagacacgggacgttttttgctcccacctcctgtctagagagatgaacgaaacagtgatcctcgctgacgagttgtgtcggcagcctaaaccaagtaccgtgcaggcctgtaaccgctttaattgcccacccgcgtggtaccccgctcagtggcagccttgttctcgaacctgtggcgggggggtgcagaagcgagaggtattgtgtaagcagagaatggccgatggtagcttcctggaactccccgaaaccttttgcagcgcaagcaagccggcatgccaacaggcatgtaaaaaggatgactgcccttctgaatggctactgtctgattggaccgagtgttccacttcctgtggtgaaggcacacagactagatctgctatctgtcggaaaatgcttaagacaggactatcaacggtggtgaattccactctttgccccccactacccttctcctcctcgatcaggccttgtatgctggccacatgtgcaagaccaggaaggccctccaccaagcattcgccccacatcgcggctgctcgaaaagtctacatccaaacaaggcgccagagaaagcttcatttcgtcgtgggcgggttcgcatacctcttgccgaaaaccgcagtcgtactgagatgccctgcacgccgggtgcgaaaaccgctcatcacctgggagaaggatggccagcaccttattagctctacacatgtaacggtcgcgccctttggataccttaagattcaccgccttaaaccttccgatgcaggagtctacacatgtagcgctgggcccgcccgcgaacattttgtcattaagctgatcggaggcaatcgcaagttggttgcccggcctttgtcacctaggtctgaggaagaagtactcgccggtaggaaggggggaccaaaagaggcactccagacgcacaaacaccagaatgggatcttcagcaacgggagtaaagcagagaagaggggattggcagccaaccccggcagccgctacgacgatctggtgtctcgattactggaacagggagggtggccaggcgagctcctcgcgagttgggaggcccaggatagcgcagaacgtaatactacatcagaagaagatcccggtgccgagcaggtgcttctgcatctccccttcacgatggtcactgaacagcgcagattggacgatattctgggaaatctgtcccagcagccagaggaactcagggatctgtactcaaagcaccttgtggctcagctcgcccaggaaatcttcaggagccatttggaacatcaggatacacttctaaagccaagtgaacggagaacgagccctgtcacgctctcccctcacaagcacgtgagcgggttctcctctagcctaagaacctcctctaccggagatgcgggcggcgggagccggaggccccacaggaaacccaccattctcagaaagatttcggctgcccagcagctgagtgcctccgaggtggtcacgcacctgggccaaaccgttgccttggcgagcgggacactttctgttcttctccactgcgaagccattgggcatcccaggcctacaatctcatgggcccgaaatggggaggaagtccagttttcagatcgtatacttctgcaacctgacgatagtttgcagattctggcacccgtagaggccgacgtgggcttttatacatgcaacgccaccaatgctctaggttatgactcggtgtcaatcgctgtcaccctcgccggtaaaccgctcgtaaagacctctagaatgacagtgattaacactgaaaagcccgctgttacagtggacatcggcagtactattaaaaccgtgcagggcgttaacgtcactattaattgccaagtcgccggagtgcccgaagccgaagtcacttggttccggaacaagtcaaagttgggcagcccgcaccacctgcatgaggggtcactgctactgaccaatgtgtcttcctccgatcagggcctgtatagctgcagggcagcgaacttacatggagagctgaccgaatccactcaactccttatcctggatcctcctcaggttcccacgcagctggaagacatccgggctctcctggcagcaaccgggcccaatctgcctagcgtactgacatcacccctaggcactcagctagtgcttgatccaggcaactctgcgctgttggggtgccctatcaagggccatcccgtgcccaatattacatggttccatgggggacagcctattgtgactgctaccggtctgacccaccacatcctggccgctggacagatcctccaggtggcaaacttaagcggggggtcccagggggagttttcatgcttagctcagaatgaagcaggtgtgttaatgcagaaagcctctctggtgatacaggactattggtggtccgtggacaggttggctacttgtagtgcatcctgtgggaatagaggggtgcaacagcctaggttacgttgtctgttaaactccacagaggtcaatcctgcacactgcgctgggaaagtcagaccagcagtgcagccgattgcctgcaatcgaagagactgtccgtccagatggatggtaaccagttggtcagcttgcacaaggtcctgtggagggggggtacagacccgcagggtgacctgtcagaaacttaaggcgtctggaatttcgacacccgtgtcaaacgatatgtgtacccaggttgcaaaaagacccgtagacacccaggcctgcaaccagcaattatgcgtggaatgggcctttagttcctggggccagtgtaacggaccgtgtattggaccgcacctggccgtccaacatcgtcaggtattctgccagactcgagacggtataactctgcccagtgaacagtgctctgcacttcccaggcctgtttccacacagaactgttggtccgaggcttgctctgtgcactggcgggtctccttgtggactctgtgtacagccacatgtggaaattacggctttcagagtcgccgtgtggaatgtgttcacgctaggacgaataaagcagtgccagaacacctgtgttcatggggtccacggcccgctaattggcaaaggtgcaacataacaccttgcgaaaacatggagtgcagagatacaacccgctactgcgaaaaggtgaagcagttaaagctgtgtcagctctcccaattcaagtcccgttgctgcggaacatgcggcaaagcgtag

SEQ ID NO: 248005 - RNA, 1320 nt, synthetic construct
  misc_feature 1..1320: note = Description of Artificial Sequence: Synthetic coding sequence
  source 1..1320: mol_type = other RNA
atggaatgctgccgaagagccacccctgggacattgctgttatttttggccttcctgctccttagctctcgaactgcccgatccgaagaggatagagatggcttatgggatgcctggggcccatggagcgaatgttcaagaacatgcggcggaggcgcgtcttactctttgcgcaggtgcttaagctcaaagtcttgtgagggcagaaatattagatatcgaacgtgctcgaacgtggactgtccacctgaggccggcgactttagagcccagcaatgtagcgcccataatgacgttaaacaccacggccagttttacgaatggttacccgtgagtaatgaccctgacaatccctgttccctgaagtgtcaggccaagggcacgacccttgttgtggagctggcccccaaggtgctggacggaactagatgttataccgaatccctcgatatgtgtataagcggactttgtcaaattgtaggctgtgaccatcaactggggtctactgttaaggaggacaattgtggcgtgtgtaacggcgacggcagcacctgcaggctggtccgggggcaatataaaagccaattgagtgccacaaaatctgacgacaccgtcgtcgccatcccctacggaagtaggcacataagactggtactgaagggacccgaccatttgtacctggagacaaagacactgcagggtaccaaaggcgagaactctcttagcagtacgggaacctttctcgtcgataacagttccgtggacttccagaaattccctgacaaagagatcctgcgcatggctggccccctgaccgcagatttcatcgtgaaaatccggaacagcgggagcgcggattccactgttcagttcatattttaccagcccataattcaccgatggcgcgagacagacttttttccctgttctgccacctgcggcggtggataccagttaaccagcgctgagtgctacgacttgcggtccaacagggttgtcgcggatcagtactgtcactactatcccgagaacattaagccaaagcctaaactccaagagtgtaatctcgacccatgcccagcgcggtgggaagctacaccttggactgcgtgtagctcctcgtgtggaggagggatacagtcccgtgcggtaagctgcgtggaagaagacattcagggacatgtcaccagcgtggaagagtggaagtgtatgtataccccaaagatgccaattgcccagccatgtaacatctttgactgccctaaatggcttgcccaggaatggagccctgtcactgtgccctccttttttgtacactag

SEQ ID NO: 248006 - RNA, 543 nt, synthetic construct
  misc_feature 1..543: note = Description of Artificial Sequence: Synthetic coding sequence
  source 1..543: mol_type = other RNA
atgggactcactgtatcagcactgtttagtagaattttcgggaaaaaacagatgcggatacttatggtcggactggatgccgccggcaaaaccaccattctttacaaactaaaattgggcgaaatcgtgaccaccatacctaccatcgggtttaatgtggaaacagtggagtacaaaaacatttgtttcactgtctgggacgtcggcgggcaggataaaattcgacctctgtggcgccactatttccagaatacccaaggactgatatttgtggtagactcaaatgatagagagagggtgcaagaatccgccgatgagctccagaagatgttgcaagaggacgagctgcgtgatgccgtgctcttagtctttgctaataaacaggatatgcctaacgcaatgccggtgtccgagctcacagacaaactaggtctgcagcatttaagaagccgaacatggtacgtgcaggccacatgcgctacgcagggaactggtctctatgatgggctggattggctaagtcacgagctgagcaaaagatag

SEQ ID NO: 248007 - RNA, 7251 nt, synthetic construct
  misc_feature 1..7251: note = Description of Artificial Sequence: Synthetic coding sequence
  source 1..7251: mol_type = other RNA
atgacaacactgttgtgggttttcgttacactgcgggtgataaccgcggccgttaccgtagaaacttccgatcacgacaactcactgtccgtttcaattccccagcccagccccctacgcgttctgctgggaacatcccttacaatcccttgctacttcattgatcctatgcaccccgtaacaactgcccctagtaccgcccccctggctccacggatcaaatggtccagggtgtccaaagaaaaagaggttgtgttgctggtagcgacagagggtagggtcagagtgaacagcgcttaccaggacaaggtgtcccttcccaattaccccgctattccaagtgatgcaaccttggaagttcagtcactccgatcgaacgactccggggtttacaggtgcgaagtgatgcacggcatcgaggactcagaggcaactctggaagttgtggttaaaggaattgtcttccattatcgggccatctctaccagatataccctggactttgaccgagcccagagggcttgcctgcaaaactctgctattatcgctacccccgagcagctgcaagcagcatatgaagatggatttcaccaatgtgatgccgggtggctggctgaccaaaccgtgcgctatccaattcacacacccagagagggatgttacggggacaaggatgaatttcccggagtgcggacttacggtattcgcgacacgaacgagacgtacgacgtatattgctttgccgaggagatggagggcgaagtattttatgccacttcccctgagaagttcacattccaggaagccgccaatgagtgtcgtcgcctcggcgcgagactggccacaactggtcagttatatttagcctggcaggccggcatggacatgtgcagcgccggctggctggccgaccgttcggtgcgatatcccatcagcaaagcaaggccaaactgtggtgggaacctgcttggcgtccggacggtgtatgttcacgccaaccaaaccggctaccccgatccgtctagcaggtacgacgctatatgttacacaggagaagatttcgttgacattcccgaaaactttttcggcgtaggtggtgaagaggatatcactgtgcagacagtgacttggccggatatggaacttccgttacctcggaatatcaccgaaggagaagctagaggctctgtaatcctgacggttaaacccatattcgaggtcagtccctccccactagagcctgaggagcccttcacattcgctcccgaaatcggcgcgaccgcattcgctgaagttgaaaacgagaccggagaagcgacccgcccatggggctttcccacccctggcttaggtcccgctacggcttttacatcagaagacttagtggttcaagtgacagcggtaccagggcagccacatcttccaggtggagtggtattccactacagaccaggtccaaccaggtattcattaaccttcgaggaggcccagcaggcctgtctccgaacgggagcagtaattgcctcgcctgagcaactgcaggcagcctatgaagccggctacgaacaatgcgacgctggctggctccgcgaccagactgtgcggtatccaatcgtctcacctcgcactccatgtgtcggtgataaagacagcagccctggggtgagaacttacggggtcagaccaagcactgaaacttatgatgtgtattgcttcgtcgatcgtctcgagggggaagtgtttttcgccacaaggctcgagcagtttacctttcaagaagctctcgaattctgcgaatcccataacgcaacgctcgcgacaactggccagctctatgcggcctggagccggggactggacaagtgctatgcaggatggctcgccgacggttcattgcgctacccgatcgttactcctcgacccgcatgcggtggggacaaacctggcgtccggactgtgtatttgtacccaaaccagaccggattgcccgaccctttgtcgaggcaccatgcattctgttttagaggaatatccgcagtcccgagtcctggcgaggaggaaggcggtacccctacatccccgtcgggcgtagaggagtggattgtaactcaagtagtgcctggagtcgcagctgtccccgtagaagaggaaactacggctgtcccttccggagagacgacagctattctggaatttacaacggaaccagaaaatcagactgaatgggaacccgcttatacgccggttggaacatcaccactgccagggattctcccgacttggccacctacaggagccgccactgaggaaagcaccgagggtccatctgccaccgaagtgccttctgcctctgaggagcccagcccgtccgaagtccccttccctagcgaagagccctcaccgtccgaggagccttttcccagtgtgagaccatttccgtcagtagagcttttcccctcggaagagcccttccccagcaaggagcctagcccgtccgaggagcctagcgcctccgaagagccatacacaccctctcccccggtcccgagctggaccgagctgccatcttccggtgaagagtccggcgctcccgatgtgagcggggattttactggtagcggcgacgtgagtggccacctggacttttccgggcagctctccggcgacagagcttccggcctgcccagtggcgaccttgactcttctggccttaccagtacggtggggagcggactccccgtggagagtggccttcccagcggcgatgaggagaggattgagtggccgagtacgcctaccgtaggcgagcttccatctggtgctgagattctggaaggttcagctagtggggtgggggacctctccgggctccccagtggcgaagtgctggagacctccgcttcgggtgtcggcgatctttctggcctaccgtctggggaagtgctcgagaccacggcccctggcgtggaggatataagcggcctcccatcaggcgaagttttggagactacagcccccggcgtagaggacatctctggactcccctccggcgaggtcttggaaacgacagccccaggggtggaagatataagtggtctgcccagtggagaggtgctcgagaccaccgctccaggggtggaggacatttccggcttgcccagcggagaggtgctggagaccacagctccaggggttgaagatatcagcggtttaccctctggggaagtcctggagacagcagcgcccggggtcgaggacatttccgggctccccagcggagaagtgctggaaaccgcagcgcccggagtagaagatatttccggcctgccttcgggcgaagttttggagactgccgctcctggagttgaggacatatcaggcttgcccagtggagaggtcctggagaccgccgctcccggagttgaggacatctctggcctgccatctggagaagtgctagaaacagccgcgcctggagtggaagatatctcaggcctgcccagcggtgaggtcctcgaaaccgcagcacctggcgttgaagacattagcggcctgccctctggcgaagtgttggagacagccgctcctggcgtggaggatatttctggacttcctagcggagaggtgctagagaccgcagcgcctggtgtggaggacatctcggggctcccgtctggggaagtcctggagacggcagccccaggtgttgaagatatctccggcctgccgtctggtgaggtgctagaaaccgctgcccccggtgttgaggatatcagtggcttaccatcgggtgaagtgctcgaaactgcagcccccggagtagaagacattagtgggttaccatccggggaagtactggagaccaccgctccaggagttgaggagatctcagggcttccaagtggtgaagtgttggagactaccgcacccggagtggacgagatcagtggcctaccaagtggagaagtgctggaaactacagcccccggcgtggaagaaatctcaggcctgccctctggagaagtgctcgaaacaagtacatctgctgttggcgacctgagcggcctgcctagtgggggagaggtcctggaaataagcgtatctggcgtggaagacatttcaggccttccctcaggggaagtggttgaaacgtcagcgtccggaattgaagatgtctccgaactgccctccggtgagggactggaaacaagtgccagcggagtcgaggatctgagcagactgcccagtggtgaggaggtgctggagattagtgcctccggattcggagatctctctggactgccatctgggggtgaaggcctggagactagtgcaagcgaggttgggacggatctgtcagggctcccaagcggtcgggaagggcttgagaccagtgcaagcggagccgaagatttgtccggcctaccctccggcaaggaagacttggttggatctgccagcggcgacctggatctaggaaagctcccaagcggaaccttggggtccgggcaggctccggagacatcaggactcccaagcggcttctctggtgaatactccggggtcgacctaggctccggtcctccctccggccttcccgatttcagcggattgccctccggatttcccaccgtgtccctcgtcgacagtactttggttgaggtagtcactgcaagtaccgcctctgaattggaaggacgcgggacgattggaatatccggggccggcgaaatcagtgggctgccttcgagcgagcttgatatctccgggcgcgcctctgggctccctagcggaaccgagctatctgggcaggcgtcgggtagtccagatgtatctggcgagatccctgggttgttcggagttagtggacagccctctggctttcccgacacatctggcgagacgtctggggtgacagaactgagtgggttgagctctggacagcctgggatatctggcgaagcttcaggggtgctgtatggaacctcccagccttttgggatcaccgatctctccggggagactagcggcgtacctgatctgtccgggcaaccgagtgggttgcctggtttcagcggtgctacttctggcgtgcccgacctggtttccggaaccacatctggcagtggggaatcgtccgggattacattcgtagatacatccctagtggaggtggcaccaactacatttaaagaggaagaaggcttgggcagtgtcgagctgtctggcctaccttcaggcgaggctgacctttctggaaagtcaggaatggtcgatgtaagtggacagttctcaggcaccgtggatagcagcggattcaccagccaaacccccgaattctccgggttaccctcagggatcgctgaggtgtccggggagagttccagggccgaaattgggtcgagcctgccgtcaggagcatactacggatccgggacacctagctcattcccaactgtttccttagtggatcgcactctggtcgagagtgttacccaagcacctacagcacaggaagccggggaagggccatccggtatcctcgagctgtccggggcccactctggggccccagacatgtccggagagcacagcggcttccttgatttgagtggcttgcagagcggtttgatcgagccctcgggagaacctccaggcaccccttacttctctggagatttcgcaagtaccaccaatgtctctggggagtcttctgtcgccatgggcactagtggtgaggcgtctgggctaccagaagtcacactcattacatctgagttcgtagagggagtcacagaacctaccatctctcaggaactggggcaacgtcctcccgtcacccatactccccaactgtttgagtctagtggcaaggtctccactgccggtgatatctctggcgcaactcccgtactgcccggatcaggtgtggaggtatccagcgtgccggagagtagttctgaaactagcgcttacccagaagcaggctttggtgcatctgcagctcccgaagcgagccgcgaggattcagggtctccagatctgtctgaaaccaccagcgccttccacgaggctaatctagagagaagttctggcttaggagtgagcggtagtacattgacatttcaagagggggaggcaagtgcggcgccagaagtgtcaggggagtctactacgacctccgacgtgggcacagaagcccccggactgccctctgcaacccccacggcgtccggtgaccgaaccgagatatctggagatcttagcggacatacatcccaactgggcgtggttatatctacatctatcccagaaagcgaatggacacagcagacccagagacccgcagagacccatctggaaattgaaagttccagcctgctctattctggcgaggagacccacaccgtcgagacagccacatccccaactgatgcaagcatccccgcttcccccgaatggaagagagaaagcgagagtactgccgcagccccagcccgctcatgcgctgaggagccctgcggcgcaggaacctgcaaagaaacagaggggcatgtcatttgtctgtgtcctccagggtataccggcgagcactgtaatatcgaccaagaggtttgtgaggagggttggaataaataccagggtcactgttatcgccactttccagatagagagacctgggtagacgccgagcggcggtgtagagagcagcagtcccacctcagtagcatcgtgacaccagaagagcaagaattcgttaacaataacgctcaggactaccaatggatcggcttgaatgacagaacaatagagggggactttcgatggtctgatggacacccgatgcaatttgagaactggagacctaatcaacccgataatttcttcgctgccggcgaagattgcgttgtgatgatatggcacgagaaaggagagtggaacgatgttccctgcaactatcaccttccttttacctgtaagaaaggcaccgtggcgtgtggagagccaccggtcgtggaacacgctcgcacatttgggcagaagaaggacagatacgaaatcaatagcttggtaagataccagtgtacagagggcttcgtccagcgccatatgcctacgattagatgccagcctagcggtcactgggaagaaccccaaattacgtgtactgatcctacaacttacaagcgaagactccagaagcgatcaagccggcaccctcgacgctcaagacctagcacggcccattag

SEQ ID NO: 248008 - RNA, 7296 nt, synthetic construct
  misc_feature 1..7296: note = Description of Artificial Sequence: Synthetic coding sequence
  source 1..7296: mol_type = other RNA
atgacaactctcctgtgggtcttcgtgaccttgcgtgtgattacagccgctgtcaccgtcgagacgtcggatcacgacaatagcttgagcgtgtccattcctcagccgtctcccctacgcgttctgctgggtaccagcctgacaataccgtgttatttcatagatcccatgcacccagtgaccaccgccccgtcaaccgccccgcttgcccccagaataaagtggagccgcgtaagcaaggagaaggaagtcgttctgctcgtggcgacagaaggcagggtaagagtaaattccgcataccaagataaagtcagcctcccaaattaccctgctatccctagcgacgccaccctcgaggtccagagccttaggagtaatgattctggagtgtacagatgcgaggtgatgcacggaattgaagacagtgaggcaacgctagaggttgttgtcaagggtatcgtcttccattatagagcgatttctactagatacacactggattttgacagggctcagagggcgtgtttgcagaattctgctattatcgccacccctgagcagttgcaagccgcttacgaggacggcttccatcaatgcgacgccgggtggctggctgatcagacagtccggtacccaatccatactcccagagaaggctgctatggtgacaaggatgaatttccaggtgtgagaacctacggaatacgcgataccaacgaaacctacgatgtgtattgcttcgccgaagagatggaaggagaggtgttttatgcaacatctcccgagaagttcacctttcaggaggccgcaaatgagtgccgccgtctgggcgctaggcttgcaactactggccagctgtatttggcttggcaggctggaatggatatgtgttccgccggctggcttgctgaccgttctgtacggtacccaatatcgaaggcaaggccaaactgcggcggtaatttgcttggagtgcgcacagtttatgtacacgccaatcagactggctatccagaccccagttcaagatatgacgccatatgttacaccggagaagactttgtggacattcccgagaactttttcggcgtgggcggggaagaggatataaccgttcaaaccgtgacctggccagacatggagcttccactcccacgcaatattaccgaaggcgaggcaagaggaagcgtgatcctcaccgtgaagcctatcttcgaggtgagtccttcacctttggaaccggaggaacctttcacattcgccccggagatcggagctaccgccttcgccgaagtggaaaatgagacaggagaagctacccgtccttggggctttcccacccccggtctgggccctgccaccgcatttacatcagaagaccttgtggttcaggtcacagccgtcccaggacaacctcacctgccaggaggcgttgtgttccattaccgtccgggcccaacccgctatagtctgaccttcgaggaagcccagcaagcttgtctcaggaccggggcagtgattgccagccccgaacaattgcaggccgcctatgaggctggttacgagcagtgcgacgccgggtggctccgtgatcagactgttagatacccgatcgtgagcccaaggaccccttgtgtaggcgacaaggattcgtctcctggcgtacgtacatatggcgtcaggccgtctaccgagacttacgacgtctattgcttcgtggatagacttgaaggggaggtttttttcgctacacgactagaacagtttactttccaggaagctcttgaattttgcgagtcccacaatgccacactggcaaccaccgggcaattatatgcggcttggtcgaggggactggataaatgttatgccggatggctggccgatgggagtctgaggtatcccatcgtgacccctcgacccgcttgcggtggcgataaaccgggagtcagaactgtctacctgtatcctaatcagaccgggctgcccgaccctctgagccggcaccacgccttttgcttccgaggcatctccgcagtccctagccctggagaggaggaaggaggcacccctacatcaccaagcggggtggaggaatggatcgtaacacaggtagtgcctggcgtggccgccgtaccagtggaggaggaaacaacagctgttcccagcggtgagactactgcgatcctcgaattcactactgagccagaaaaccagacagagtgggaacctgcatatacccccgtggggaccagccctctgcccggaatcctcccaacatggcctccaaccggggcggctaccgaggaatctacggaaggcccctccgcaacggaagtgccaagcgccagcgaggagccctcaccttctgaagtgccctttccgtctgaggaaccatccccctccgaagaaccctttcctagcgttcgaccattccctagcgtggagttgttcccttcggaggaaccgttcccatccaaagagccaagtcccagcgaggaacctagcgccagtgaagaaccatatacgccctctcctcccgtgccaagttggactgaattgccttccagtggcgaagaaagtggcgcaccagacgtttccggggactttacaggttcaggcgatgtgtcaggccacctggatttttccggccaactgagcggtgatagggcctccggcttgccaagtggtgacctcgattcgtccggattgacctccacagttggcagcggcctccccgtcgagtctggactccctagcggcgatgaggagcgaatcgagtggccttcaacacctacagtgggtgaacttccatccggcgccgaaatcctagaagggagcgccagcggtgttggcgatctgagtggactgcccagcggtgaggtcctggagacctccgcctctggagtgggggacttaagcgggttgccttcgggagaggtgctcgagactacagcccccggcgtggaggacattagcgggttaccatccggcgaggtactcgagactacggccccaggggtggaagacatcagtggtcttccatcgggggaggttctggaaacaaccgctcctggggtcgaagacatctccggtctgccctctggtgaggtattggaaacaaccgcccccggtgtcgaagatatcagcggactcccatcaggagaggtgctggagaccacagccccgggagtggaagatattagtggtctacctagcggtgaagtgctcgaaaccacagccccaggggtggaggacatcagcggcctgcctagcggggaggtactcgagactgccgcgcccggcgtcgaggatatcagcggactgcccagcggggaagtgctggaaacggccgcgcctggcgtggaagacatttcagggctcccctcgggagaagttctcgagaccgcagctcctggggttgaggatatcagcggattgccaagcggcgaggttctggagaccgccgcacccggcgtggaggacatttctggccttccgagtggtgaggtgttggagacagccgccccaggcgttgaggacattagcgggcttcccagtggcgaagtgcttgagaccgctgcccccggcgtcgaggatatttctggcctgccctcaggcgaggttctcgaaaccgctgcccctggagtggaagacatatccgggctgccctctggtgaggttctggagactgcggcccctggcgtcgaggacatttccggactccccagcggcgaagttcttgagacggcagcacccggtgtggaagacatctccggcctgccttccggagaagtcttggaaacagccgcaccaggagtggaagacataagcggtttacccagtggtgaggtcctggagaccgcagcgccaggggttgaagacatcagtggcctacccagcggagaggtcttagagacagcagctcccggcgtggaagatatctccggcctgcccagcggggaggtccttgaaacagcagccccaggcgtcgaggatatttccggcctgccatctggcgaagtgctggagaccgcagcccctggggttgaagacatctcaggactgccatccggggaggtgctcgagaccgcagcgccaggcgttgaagacatttcaggactgccctccggagaagtcctggagaccgctgcaccaggtgtcgaggatatatcaggactccccagcggagaggtacttgaaacaaccgcacctggcgtggaagaaatcagcggcctgccgtccggcgaagtgcttgagactacggcccccggagtcgacgaaatcagtggcttgccatccggcgaagtccttgaaacaactgcgcccggcgtcgaagaaatcagtggcctgcccagtggagaggtgctggaaacttctaccagcgcggtcggcgacctcagcggactaccatccggaggagaggtgctcgagatctctgtgtcaggcgttgaagatatatctggcttaccctccggagaagtcgtggaaacatcagcctccggtattgaggacgtcagcgagcttccttctggggaggggctcgaaacatccgcttctggagtggaagacttgtctaggctgccaagcggcgaggaagtgcttgagatcagcgcttccgggttcggagacctgtcgggcctgccctcaggaggggaaggcctggagacttcagcatcagaagtcggtactgacctgagcgggttgccgtcgggccgtgaaggactcgaaacaagtgcttcaggcgctgaggacctctccggactaccaagtgggaaagaagatctggtgggctctgcgtcgggtgacttggacttgggcaaactaccctcagggactctgggctccggccaagcccccgaaacatctggattgcctagcggcttttccggagagtacagtggggtggacctaggatctgggccgccctccgggctgccagatttctccggactgccaagtggcttccctaccgtgtccctggtggattctactctggtcgaggtggtaactgcgtctactgcctccgagctagagggaagaggtaccatcggaatttcgggggccggtgagattagcggcctcccgtctagtgaattagatatctcaggcagggccagtggactcccctctggcacggaactgtcaggacaggcttctggaagccccgacgtgtcaggggagatcccagggcttttcggcgtcagtggacagccctcaggttttccagacacaagcggcgagaccagtggagtaacagagctgagtggcctgtctagcggacagcccggtatatccggcgaagctagcggagtgctttacggcacgagtcaaccttttggcattaccgacctcagcggagagacaagcggtgtgcccgacctgagcggccaaccttcagggctcccaggcttctctggggctactagcggcgtgcccgatctcgtctctggtactacatctggctcaggcgagagctcaggtatcactttcgtggatacctctcttgttgaggtagcgccgacaaccttcaaggaggaggagggactaggctcagtggagctcagcggcctcccttcaggggaagccgacctgtccgggaagtccgggatggttgatgtcagcggccagttttcaggcacagtggactctagtggctttacgagccagaccccggaattcagtggccttccttctggaatcgcggaagtgtcaggggagtcgagtagggcagaaatcgggtcctcccttccctccggagcttactacggatctggcaccccatcatcattccctacagtgtccctagtggaccgcacgctagtcgaaagtgtgactcaggcacccaccgcacaagaggcaggcgagggcccttcaggcatactggaattatccggagcccacagcggagcgcctgatatgtcaggcgaacacagcggcttcctagacctcagcggtctacagtcagggctaatcgagccatcgggagagccgcccggaacgccttacttttctggagacttcgcgagcacaacaaacgtgtctggcgagagctctgtggccatggggacctctggcgaagcgagcggtctgccagaggtcaccctaatcacatccgagtttgtcgaaggagtgacagaaccgacaattagccaggagctgggccaacgacccccagtgactcacactccgcagctgtttgagagttcagggaaggtgtctacggccggcgatatatccggggccacgcccgttctgccagggtcaggcgtggaagtgtcttcagttcctgagagttcttcggagaccagtgcctaccccgaagcgggtttcggtgcctccgcagcccctgaggcttcaagagaggattccgggagtccggatcttagtgaaactacctctgctttccacgaggctaacctggaaagatctagcggactgggcgtgtcgggaagtacactgaccttccaagagggcgaagcctccgccgcacccgaagtaagcggagagagcacaacaacaagcgacgtcggaaccgaggcacctggcctgccgtccgccacccccacggcatcaggcgacaggaccgagatctccggagatctgtctggccacactagccagctcggagtcgtgatttctacctccatccctgagtccgagtggacccagcagactcagcgtccggccgagacgcacttagaaatcgaatcttctagcctgctttattcaggcgaggaaacgcatacagtggagacagcaaccagtcctacagacgcttcgatacctgcaagccccgaatggaaacgagagtcagagagcaccgccgcagatcaggaggtctgcgaagagggctggaataagtaccaggggcactgttaccggcatttccccgatagggaaacttgggtggatgccgaaagaagatgtagggaacagcagtcacatctttcctcaattgtgacccccgaggagcaggaattcgtcaacaataatgcacaggattaccaatggatcgggctgaacgacagaactatcgagggagatttccgatggtccgatggccacccaatgcaatttgagaattggcggccgaatcaacctgataattttttcgccgccggcgaagactgcgttgtgatgatttggcacgagaaaggggaatggaatgatgtgccctgcaattatcatcttcctttcacctgtaaaaagggaactgctacaacatataaaagaagactgcagaaaagaagttcacgccatcccaggcggtcacggcccagcacggcccattag

SEQ ID NO: 248009 - RNA, 7593 nt, synthetic construct
  misc_feature 1..7593: note = Description of Artificial Sequence: Synthetic coding sequence
  source 1..7593: mol_type = other RNA
atgactacactgctatgggtattcgttacactgcgggtgataacagccgccgtgactgtcgagacatccgaccacgataatagtctgtctgtgtctatcccccaacccagtccattacgtgtgttgcttggcacaagtcttaccattccttgttatttcatagatcccatgcaccctgtgaccaccgctccatccactgctcccctggcacctcgcattaaatggagtcgcgtgtcgaaggaaaaggaggtggtgctcctcgttgctaccgagggaagggtgagagttaactcggcctaccaggataaggtatctcttcctaactatcctgcaatcccgagcgacgcgaccttggaggtgcagtctctcaggagtaacgattcgggggtctacagatgtgaggttatgcacggcattgaagattccgaggcgacgctagaggtcgtggtcaagggtatcgttttccattatagggcaatctccaccagatatacactggactttgatagggcccagagggcctgcctgcagaattccgccattatcgccacccctgaacaacttcaggcagcgtatgaggatggcttccaccagtgtgacgccgggtggctcgccgaccaaactgtgaggtaccccattcatacgccacgcgaaggttgctacggggacaaggatgaattccctggagtgaggacttatgggatccgggataccaacgagacctatgatgtgtactgctttgctgaggaaatggaaggcgaagtattttatgcgacctctcctgagaagttcacattccaagaggctgccaacgaatgccgaaggctgggcgccagattggctactacaggacaactgtacctggcttggcaggccggcatggatatgtgtagtgctgggtggcttgccgatcgttccgttaggtaccccatttcgaaagcccggcctaattgtggaggcaatcttctgggagtacggactgtgtatgttcacgcaaaccaaaccggttaccccgatccttcttccaggtacgatgccatttgttataccggggaagatttcgtcgacatacctgaaaatttctttggagtcggaggcgaggaggacatcactgttcagacagttacctggcctgatatggaattgccgctgccgcgaaatataacggaaggcgaagcccggggaagcgtgatacttacagtgaagccaattttcgaggtttcaccatcaccactcgaaccagaggagcccttcacctttgcgcctgagattggcgcaaccgcgtttgccgaagtagagaacgaaactggggaagcaaccaggccatggggctttcctacccctggactcggaccagccaccgcttttacatccgaagacttggtggtgcaggtaaccgccgttccaggacagcctcatctcccaggaggagttgtgttccactacagacccggccctactcgttattcgctgacctttgaggaagcgcagcaggcctgcctcaggaccggcgcagtaattgcctcccccgaacagcttcaagcagcatatgaagcaggttatgaacagtgtgatgctggatggctccgtgaccagaccgtccggtaccccatagtgtcaccccgcactccttgtgtgggcgacaaagactcttctcccggagttagaacttatggcgtaaggccctcaacagagacctacgacgtctactgcttcgttgacaggctagagggagaggtgttttttgcgacccgcctggagcagtttacctttcaggaagctctggagttttgcgagtcacacaacgcaacactcgcaactaccggacagctttacgctgcatggtctaggggactggataagtgctatgcgggatggctggctgacggttctcttcgctatccaatcgtcacacccagacccgcctgcgggggggacaaaccgggcgtacggaccgtgtacctctatccaaatcagactgggctgcccgaccccctgagccgtcatcatgctttctgttttcgtggcatttctgctgttccttcccccggcgaggaggaaggcggtacacccacaagcccgtccggagtggaggaatggatcgtgactcaagtcgttcccggggtcgctgctgtccccgtagaggaagaaaccaccgctgtgcctagcggcgagactaccgccatattagaatttaccacagaacccgagaaccaaactgaatgggaacctgcatacacacctgtgggcacaagtccgctccccggtatcctgcccacctggccgcctacaggggccgcaacggaggagagcacagaaggtccctccgcaacagaggtccccagcgccagcgaagaaccatcaccatccgaggtaccctttccatctgaggagccaagtcctagcgaagaaccatttcctagcgtgcggccctttccttcggtggagctgttcccctctgaggaaccctttccatccaaagagccctcaccaagcgaggagccctccgcctctgaagagccttataccccgtccccacctgtaccctcctggacagagctgccctcaagcggagaggagagcggcgccccagatgtgtctggtgacttcactggctcaggcgacgtgtccggacatctggactttagcggccagcttagtggcgaccgggcttccggtttaccttcgggagatctggactcgagcgggttgactagcacagttggatccgggcttccagtggaatccggcttgccgtctggggacgaggaaagaatcgagtggccaagcactcctaccgtgggggagctgccatccggagcagaaatcctcgagggttcggcctctggagtgggggatctgtccgggctgcccagcggcgaggtccttgagacgtccgctagcggggtgggcgatctttccggtcttccaagcggggaggtgctcgagaccactgctcctggggtggaggacatatcagggttgccttccggcgaagtactggagaccactgctccgggcgtggaggacatcagcggccttccaagcggggaggtactcgagaccactgcaccgggcgtcgaggacatatctggcttgccgtccggagaggtgctggagactacagctccgggcgttgaagacatctctggcctcccgagtggagaggtgctggaaacgacagccccgggagttgaggacatctccggcttgcccagcggagaagttctagaaaccactgccccaggcgtagaggatatttctggattgccatccggtgaggtgctggaaaccgctgcccccggtgttgaggacatttccggactacccagcggagaagtgttagagacagcagcccccggtgtggaggatatttccgggcttccttcaggagaggtgctggaaaccgcggcccccggggtggaagacatatccggcttgcccagcggagaggttctggaaacagctgcccctggcgtggaagatatttctggcctccccagcggtgaagttctcgagacagctgcacctggggtggaggatatcagtgggttaccatctggcgaggtgcttgaaactgccgcacctggcgtggaggacataagcgggcttccatcaggcgaggtgttggagactgccgccccaggcgtggaagacatcagcggcctaccatcaggcgaggtacttgagacagcggcccccggtgtagaagatatttctgggttgccctcgggcgaggttctcgaaaccgccgctcctggggtggaggatatctcaggattacctagtggtgaagtgcttgaaactgcagcacccggtgtcgaggatattagcgggttaccatccggtgaggtcctggagacagctgcgccgggagtggaagatatttcagggctgccgtccggcgaagtcttagagactgccgcccccggtgtggaagacatctctgggcttccatccggagaagtactggaaactgcagctccaggagttgaagacatctccggactaccctctggggaagtcttagaaacagctgcccctggggttgaggatatcagcggtctgcctagcggcgaggtgctggagaccgcagcccccggagtagaggatatatctgggttaccatccggcgaagttttagagaccgccgcacctggcgtggaggatataagtggcctgcccagtggagaggttttagaaacaactgcaccaggcgtcgaagagataagcgggctgcctagcggggaggtgctggaaacgacagcaccaggcgtggacgaaatcagcggcttgcccagcggagaggtgttggagacaaccgcccctggcgtggaagagatttctggcttgccaagcggcgaagtacttgagaccagcacatctgccgtgggtgacctgtccgggttgccatcagggggggaggttttagagatatccgtttctggagtggaggacatcagcggtctgccctcaggtgaggttgtagaaacttccgcatctggcatagaagatgtgtccgaactaccctctggggaaggattagagactagcgcatcaggggttgaggatcttagtagactcccgtctggagaggaggttcttgagatttcggcaagcggttttggggatttgagtggcctgcctagcggaggagaaggactggagacatcagcaagcgaggtagggacagatctcagcggtctgccctctggccgagaggggcttgaaacgtccgcttctggcgccgaggatcttagtggcttgccatcaggcaaagaagatctggttggttctgcaagcggtgacctagacttgggtaaattaccgagcggaaccttaggttccgggcaggcccccgagacaagcggtctgcctagtggcttttctggggagtacagtggtgtggatctggggtccgggcccccatctggtctccccgattttagtggactgccatcgggctttcctacagtgtcattggtggacagtacactcgtcgaggtcgtcaccgctagcactgcctcagaactagaaggccgcggtaccatcggtatctccggtgcaggcgagatctctggtctcccctctagcgaactggacatctccggccgggcctctggactgccaagtggaaccgagttgtctggccaggcttccggatctccagacgtttccggagaaatacctggattattcggcgtttcagggcagccaagcggctttcccgataccagtggggagacctcaggggttaccgaactaagtggcctgtcgagcggacaaccggggattagcggggaggccagcggtgtgctttacggcaccagccaaccattcggcatcacggacttatcgggagaaacttctggcgtacccgacctgtctggacagccatcaggcctcccaggcttttcaggagcaactagcggagttcccgatctggtttcaggcactacgagcggaagcggtgaaagttctgggattaccttcgttgatacctctctcgtggaagtagccccaaccacctttaaggaggaagagggtttggggtcagtggaactctcaggcctaccctctggcgaagctgacctgtcaggcaagtctggaatggtggatgtgtcgggccagttcagtgggaccgtcgacagcagtggtttcacaagtcagactccagagttcagtgggttacccagtggaatcgctgaagtctccggtgaatcatctcgggctgaaattggctcatcccttccatccggtgcctactacggctccgggacgcctagtagctttccaactgtgtccctagtggatagaacccttgttgagtccgtcacccaggctcctacagcacaggaagccggagagggcccatccggcatcctcgaactgtctggcgctcattcgggcgcacccgacatgtccggcgagcactccggattcctggacctgtccggattgcagtctggactgatcgaaccctctggcgagcctcccggaactccgtactttagcggtgacttcgcctccacaacgaacgtgagtggagagagctccgtagcgatgggaacatcgggagaggccagcggcctgccagaagtaactctcattacgtccgagtttgtggagggcgtcacagagcccacgataagtcaggagctgggccagaggcctcccgtgacccacacaccccagctgtttgaatcaagtggaaaggtgtccaccgccggcgacatctctggcgccaccccagttctgcccggttcgggagttgaggtgagtagcgtcccagagagtagctccgagacgagtgcatacccagaggcaggtttcggtgcaagtgccgctcccgaggctagccgtgaggattcaggaagccctgatctgtccgagacgacttccgctttccacgaggccaacctcgaaaggtcctccggactgggggtcagtggtagtacgctgactttccaagaaggcgaggcatccgctgcaccagaagtaagcggcgaaagcaccactactagtgatgtgggaacggaggctcccggattgccaagcgctacaccgaccgcttctggggaccgcactgagatttccggcgacctctccggtcacaccagccagttaggagtggtaatcagtaccagcataccagagtcagaatggacacagcaaactcagaggccagcggagacccacctagaaatcgaaagtagctccctcctgtattccggtgaggaaacccacacagttgagaccgccacatcaccaaccgacgctagtatccctgccagtcccgagtggaagagggagtcagagtccacagcagccgcacccgctaggtcttgtgcggaggagccctgtggcgcgggtacttgtaaggaaaccgaggggcatgtcatctgtctgtgtccacccggctacactggagagcattgcaatatcgaccaggaggtgtgtgaagagggttggaataaatatcagggccattgctaccgccacttccctgacagagagacctgggtggacgccgagcggaggtgtagggaacagcagagccatctctcttctatcgtcacccccgaggaacaggagttcgtgaacaacaacgcccaggactatcagtggatcgggttgaatgataggaccattgagggcgactttcgatggtcagatggccatccgatgcagttcgagaattggagaccgaatcagcccgacaatttttttgccgccggagaggattgcgtggtcatgatttggcatgaaaaaggagaatggaacgacgtgccctgtaactaccatctgccttttacttgcaagaaaggaaccgtggcctgtggtgaacctccggtggtcgaacacgccagaacgttcggacagaaaaaggacagatacgagataaatagcttggtgagatatcagtgcaccgaaggatttgttcaacgccacatgcctacaatccgctgccagcctagtggccattgggaggagcctcagatcacgtgcaccgatcccaccacctacaaacggcgccttcagaaacgaagctcaagacatccacgccgctcccgtccgtctactgcgcactag

SEQ ID NO: 248010 - RNA, 7479 nt, synthetic construct
  misc_feature 1..7479: note = Description of Artificial Sequence: Synthetic coding sequence
  source 1..7479: mol_type = other RNA
atgacgacattgctttgggtgttcgttaccctccgcgtcattaccgccgcggtcaccgtggaaacttctgaccacgataattcattgtcagtgtcaattcctcaaccttctccccttcgcgtgctcctcgggacttctttgactataccctgctacttcatagatccaatgcatccagtcaccacagcgccgtccactgcgccactggcacccagaattaagtggtcacgcgtgagcaaggagaaggaagtagtccttctggtagcaaccgagggacgcgtgcgagttaactccgcctaccaggataaggtgtccctgcctaactatccagctatccctagcgatgcaacacttgaggtccaatctctccggtctaacgactccggcgtttataggtgtgaagtgatgcatggaattgaggactccgaagccaccctggaggtggtggtcaaaggcatcgtgttccactaccgcgcaattagcacccgatatactctggattttgatagagcacagagggcctgcttgcaaaattctgctataatcgcaaccccagaacagctccaggccgcatacgaggatgggtttcatcaatgcgacgcgggttggttggccgaccagactgttaggtatccaatacacaccccccgcgagggctgctacggagacaaagatgaatttcctggcgtacgtacctatgggatccgggatactaacgagacatatgacgtttactgctttgccgaagagatggaaggagaggtcttttatgcaacttcccccgaaaaattcacgttccaggaagctgctaatgagtgccgaaggctgggggctcgactcgcaactaccgggcaactgtacctggcctggcaagcagggatggatatgtgttctgccggctggctggcggacagatctgtgcggtatccaatcagtaaggcccgccccaactgcgggggcaacctactgggagtaaggactgtttacgtacacgccaatcagactggttacccagatccatcctcaagatacgatgcaatttgctacaccggcgaggacttcgtggacataccggagaacttttttggagttgggggggaggaggatatcacagtccagaccgtcacctggcccgacatggagctgcctctgcccaggaacatcaccgagggggaggctcgagggagcgtgattttgaccgtcaagcctatttttgaggtgagtccctctcctctggaacccgaggagcctttcacatttgcccctgaaattggggccacagcgtttgctgaggtggagaacgaaaccggcgaagccacaagaccatggggcttccccaccccagggcttggcccagccactgcattcacgagtgaggacttagtagttcaggttaccgctgttccagggcagccgcacctgccaggaggggtggtgtttcattatcgccctggccccaccaggtattcactgacctttgaggaggcccaacaggcatgcttgcgcaccggggccgtaatcgcatctcctgagcaactacaagctgcatatgaagcagggtatgagcagtgtgacgctgggtggctccgcgaccagaccgtccggtatccaattgtctcaccccgcacaccatgtgttggtgataaagattcatctccaggagtcagaacatatggtgtgcggcctagtacagagacctatgatgtctactgcttcgtggaccgtctggaaggggaggttttcttcgctacaagactggaacagttcacattccaggaagccctagagttctgtgagtcacataatgcaacattggccaccacaggccagctgtatgccgcttggagcagggggctggataagtgttatgccgggtggctggctgatgggagtcttagatacccaatagttacacctcggcctgcatgtgggggagataagcctggcgtgcgcacagtgtacttataccccaatcaaaccggcctccctgatcccctgtcaagacaccacgctttctgcttccgcggcatctcagcagtcccttctcccggagaggaagagggtggtactccgacatcaccaagtggcgtggaagagtggattgtcacacaggtcgtgcctggagtggcagccgttcctgtcgaggaagagacaactgctgtgccctcgggcgaaaccactgccatactggagtttaccaccgaacccgagaaccaaacagagtgggagcccgcttatacccctgtcggtacttctccacttccgggtatccttcccacctggcctcccaccggtgcagccacagaggaatctactgaaggccccagcgcaaccgaggttccatccgctagtgaggaacctagtcccagtgaagtaccttttccctctgaggagccatctcccagcgaagagcctttcccttctgtgagaccattcccgtctgttgaactgttcccctccgaggaaccatttccctccaaagagcctagtcctagtgaggaaccgtctgcatccgaggagccgtataccccaagtcctccagtccccagttggactgaactgccctcttctggcgaagagtctggagcccctgacgtcagcggggatttcactgggtccggcgacgttagcgggcacttggatttctctggacagttgtccggcgatagggctagtggacttcccagtggcgaccttgacagcagcggactgacatctaccgtggggtcaggactgcccgtagaatcaggcctcccctcaggagatgaggagagaattgaatggcctagcactccaacagtcggagaacttcctagcggcgctgagatattggagggctcggcatcaggggtaggtgatctcagcggcctgccctctggggaagtgcttgagacgagtgcgagcggcgtcggcgatttgtcagggctgcctagcggcgaagtgctggagactactgcgccaggcgttgaggacatctccgggttgccttcaggagaagttctagagaccactgctccaggcgtggaagatatttccgggcttccaagtggtgaagtcttggagactacagccccaggagtcgaagatattagcgggctcccatccggggaggttctggaaacaacagcacctggcgtggaagatataagtggcctgccctccggcgaggtgctcgagacaacggcacctggagttgaagatatctcaggcttgccaagcggggaggtgcttgagaccactgcccctggagtggaggacatttccggattgccgagcggcgaggttctggagaccgcggcgccaggggttgaggacatttccggactacccagtggggaggtgctggaaacagctgctcccggagtagaagatatctccggcctgccatccggagaggttttagagacagccgcacccggagtcgaggatatctcaggactaccctccggggaggtcttggaaaccgctgctccaggagtcgaggatataagcgggctgcccagcggggaagttttagagaccgccgctcccggtgtggaagatatcagtggcctgccctcaggcgaggtgctggagactgcagcacccggcgtggaagacatctccggtttgccatcgggggaggttctcgagaccgcagcccccggggtggaggatatctctgggctgccctctggcgaagtgctggaaaccgccgcacctggagttgaagatatatctggcctgccttccggcgaagtactcgagaccgcagccccaggtgtggaggacatctccgggctgccatcgggtgaggtattggagactgcagctcccggggttgaagatatctctggtctcccttcaggggaagttctcgagactgctgcgcctggagtcgaagacatttcaggtctgccctcaggagaagtgcttgagacggctgccccgggcgttgaggatataagcggattgccttctggggaagtgctcgagacagccgccccaggtgttgaggacatcagtggtttgccatctggcgaggtcctcgagacggcagctccgggcgttgaggacatttccggactgccgtctggtgaagtgctggagaccgctgcccctggagtggaagacatctccggtcttccaagcggagaagtacttgagacagcagcacccggcgtagaggatatctctggcctgccctccggggaagtgctagagaccacagcccccggagtggaagagatttctggtcttcctagtggcgaggtcctagaaactacagccccgggggtagatgaaattagcggactgccctcaggggaagtactcgaaacaacggcacctggcgtggaagagatctccggactgccctccggagaggtgctcgaaacctcgacctcagccgtgggagatctctcgggtctgcccagtggaggggaggtactagagatttctgtatccggagtagaggacatcagtggactcccatctggagaagtggtggaaacaagcgctagcgggattgaggatgtcagtgagctgccctccggcgagggactggagacttcggcctcaggagtggaggatctctctcgcctgccctctggagaggaagttctggaaatctccgcgagtggatttggcgacttatctgggctgcccagtgggggcgaaggccttgaaacatctgcctctgaagtagggacagatctgagtggactaccatccggacgtgaaggcctcgaaacaagcgcttcaggtgctgaggacctttccggcctccccagcggaaaggaggacctggtgggcagcgcatctggggatctcgacctggggaagctcccttccggcactctcggcagtggtcaggcccccgagacatctggcctaccgtcggggttttcaggggagtatagtggtgtcgatcttggatcaggaccgcctagcggactcccagatttcagcgggcttccaagcgggtttcctaccgtcagcctggtcgattctacactagtggaggtggtaaccgcttccactgcctctgaactggaggggcgagggacaatcgggatatcaggcgctggtgagatttctggcctcccgtcctcggagctggacatttctggtagggcatcgggtcttccctctggtaccgagctgtccggccaggccagcggtagtcctgacgtctccggagagataccgggactctttggcgtgtccggccagccgagtggctttcccgacacctcgggcgagacatccggggtgaccgaactcagcggcctgagctctggccagcccgggatctccggcgaagccagtggagtgctgtatggcacaagtcagccatttgggataaccgatctcagtggggagacctctggagtgcctgacttaagcggccagcctagcggcctgcccggtttctccggggctacgtctggggtgcctgatcttgtttctggaaccacatcgggatctggtgagtccagtggtattaccttcgtggacacctccctggttgaggttgcacctactacctttaaggaagaggagggactgggctcagtcgagctctccggtctaccttcaggtgaggccgacctttcagggaaaagtggtatggtcgatgtgtccggtcaattcagcgggactgtagactccagcggcttcactagccagacccccgagttttccggcctgccatccggaatcgcggaagtaagcggcgaatcatcacgagctgagatcgggtcatcactaccctcaggcgcgtactatggcagcgggacacccagttcattccctactgtaagccttgtagacaggactctggttgaaagtgtgacacaggccccaacagcgcaggaggctggcgagggcccttctggcattctagagctctcaggcgcccattctggggctccagacatgtccggggagcactccgggtttctggacctctccggtctgcaaagtgggttgatcgagccatccggggaaccacccgggacaccttacttcagcggagactttgcaagtaccaccaacgtctccggagagagctctgtcgccatgggaacatctggcgaggccagtggcctccctgaggtcaccctcatcacatcagaattcgtggagggtgtaacagagccaacaatcagccaggagcttggtcagagacctcctgtcacccatacgccccaactcttcgagagcagcggaaaggtgtcgacagcgggcgacattagtggggcaacaccggtcctaccaggcagtggcgtcgaagtgagttcagtcccggagtcctccagtgaaactagtgcataccccgaggcaggattcggtgcaagtgctgcccctgaagcgagtcgagaggattctggttctcctgacctgtccgagaccacatccgcctttcatgaagcgaacctggagcggtcctcaggcctcggagtatcagggagcacattaacatttcaagagggagaagcatcggccgctcccgaggtttccggagagagcacaaccacctccgacgtgggtactgaggcacccgggctgccatctgctactcccactgccagcggtgataggactgaaattagcggagatctctcagggcacacctcacaactcggcgtggtaatcagcacttctatcccagagtcagagtggacccagcagacgcagaggccagctgagacccacttagaaatagaatcctcatcattactgtattccggagaggaaacgcacactgtggagaccgccacgtcacccacagatgccagtatcccagcctcgcccgaatggaagcgggagagcgagtctaccgccgctgatcaggaagtgtgtgaagagggatggaataagtatcagggacattgttatcgccacttccctgaccgggaaacctgggtcgatgccgagcgccgctgcagagaacagcagtcacacttgtcttcgatcgtcaccccagaagagcaggagttcgttaataacaacgcacaggattaccagtggatcggcttaaacgaccgaacgatagaaggcgactttagatggtcagacgggcaccccatgcagttcgagaattggcgtcccaatcagccagataatttctttgccgcaggggaggattgtgtagtgatgatatggcacgaaaagggagaatggaatgacgtcccttgcaattatcatctcccctttacctgcaagaaagggacagtcgcctgcggtgagccccccgtggtcgaacatgcacggacttttgggcagaaaaaggaccgctacgagattaacagtctcgtccggtaccaatgtaccgaggggtttgttcagcgccacatgcccaccatcagatgtcaaccctctggccattgggaagagcctcagatcacctgtactgatccaactacttacaagcgtcggttgcagaagagatctagcaggcatcccaggagatctagaccgtcgacagctcactag

SEQ ID NO: 248011 - RNA, 7593 nt, synthetic construct
  misc_feature 1..7593: note = Description of Artificial Sequence: Synthetic coding sequence
  source 1..7593: mol_type = other RNA
atgaccacactcctgtgggtattcgtgactttacgcgtcatcaccgctgctgtaaccgttgaaacctctgatcatgataactccttgagcgtgtcaattccccagccctcccccctcagagttctcctcgggacatccctgaccattccttgttacttcatcgatcctatgcatccagtgacgacggcccccagcacagcccccttggctccaaggatcaaatggagtagagttagcaaagagaaagaggtggtcctgcttgtagccactgagggcagagtgcgcgtcaattcagcttaccaggataaagtgtccctcccaaactatcccgctatcccttccgacgctaccctcgaggtgcagtccctccggtcaaatgatagcggtgtgtatcgatgcgaagtaatgcacgggatcgaggatagcgaagcaacattagaggttgtcgtgaaggggatagttttccactatcgggccatcagtacgcgttacacactagacttcgacagagcacagcgtgcttgcctgcagaacagtgccattattgccactccagagcaactgcaggccgcttacgaggatggttttcaccaatgtgacgccggatggctggctgaccagactgtacgttatcccattcacacaccacgggaggggtgctacggagacaaggacgaattccccggcgtccgtacctatggcattcgggacactaacgaaacttacgatgtgtactgctttgcagaggaaatggagggagaagtattttacgcgacttcccctgaaaaattcactttccaggaggccgccaacgagtgtagaagattaggagcgcgcctggcgactactggccagctatatctagcatggcaggcagggatggatatgtgcagcgctgggtggctggctgatagatcagtccgctatcctattagtaaggcccgtccaaactgtggcggaaacctcttgggggttcggactgtttatgtgcacgccaatcagactggctacccggatcctagcagtaggtatgatgcaatttgttacactggcgaagacttcgtcgatataccagaaaactttttcggcgtggggggagaggaggacatcaccgtgcagactgtcacttggcctgatatggaattgcccctgccaaggaatatcaccgagggagaagctcgaggaagcgtgatcttgacagtgaagcccatcttcgaggtgagtccctcccctttagaacctgaggagccgttcacgtttgctcccgaaatcggcgcaactgccttcgccgaagtggaaaacgaaaccggcgaggctaccaggccgtggggcttcccaactcccgggctggggccggccaccgccttcacatcagaggaccttgtggtgcaggttaccgccgtcccaggacagcctcatctgccaggcggagtggtctttcactaccgtccaggtcctaccaggtacagtcttacatttgaggaggcacagcaggcttgcctgcgaaccggagcagtgattgcttcaccagagcagctacaagccgcgtacgaggcaggctacgagcagtgtgatgccggatggctccgtgatcagactgtgcgctacccaatagtgtccccaagaactccatgtgtgggggataaagacagctcgcctggagtgcgaacatacggagttcgcccttctacggagacttatgacgtgtactgctttgttgatcgtttggaaggcgaagtgttctttgccacgcggctcgagcagttcactttccaggaagcacttgagttttgtgagtctcacaacgcaactctggcaacaactggccagctgtacgctgcgtggtctcgtggcctcgacaagtgttacgctggctggctcgccgacggatcactgcggtatccgattgttacacctcgcccggcttgcgggggcgataagcccggcgtgcgcacagtctatctctatcccaaccagacagggctcccggaccccctgagtcgacaccacgccttttgcttcaggggaatcagcgccgtgccttccccaggcgaggaagaggggggcacccccactagtcccagcggcgtcgaagagtggatcgtcactcaggtggttcccggggtggctgctgtgccggtggaagaagaaacgacagcggtgcccagcggggaaacaactgcaattcttgaattcaccaccgaacctgagaaccaaaccgagtgggagcccgcctacactcctgtgggaacttccccactcccaggtatcctgccaacctggcctccaacgggtgccgcaacggaagagagtaccgagggacctagcgctaccgaggtgccctcagccagcgaggaaccttctccctctgaggtcccttttccaagcgaggaacctagcccatcagaagaacccttcccatctgtgagacccttccccagtgtggaacttttcccctctgaggagccctttccttctaaagagccctccccatctgaggagccctcagcgagcgaagaaccctacactccgtcaccaccggtgccgagctggactgaactgccctcaagcggtgaggagtcgggagcaccggatgtgagcggggattttaccgggagcggggatgtgtcaggtcatctggacttcagcggccagctcagtggagatcgcgctagtggcctgccttccggagacctggatagcagtggactcacctctacagtcggctcagggctgcccgtagagtcaggattacctagtggtgacgaggagaggattgaatggcctagtacccctacagtgggcgagctgccctccggcgccgaaatccttgagggatccgcctccggagtgggcgacctgtcaggcctgccttctggagaggtgctcgagacgtctgccagcggagtcggtgatttgagtggactaccctccggagaggttctggagacaaccgcacctggcgtagaggacataagtggtctgccgagcggcgaagtgctggaaacaactgctccaggcgtggaagacataagcgggctgccttcaggggaggtcctggaaacaactgctccaggagttgaagatattagcgggctgccctcgggcgaggtattggagaccacagctccgggggtcgaagacatatcaggactgccatctggtgaggtcttagagaccactgccccaggtgtagaagacatcagcgggctccctagcggagaagtgctggaaacaaccgccccaggtgtcgaggacatcagcggcctgccttctggtgaagtgctagagaccgctgcccctggagtggaagatatctccggcttgcctagtggggaagtcctagagacggctgcccccggtgttgaggatatttctggactaccttctggcgaggtactggaaacagccgcgccgggggtcgaggacatctctggtttaccatctggggaggtgctcgagactgccgcgccaggtgtggaggacatctcaggtctcccttcaggcgaggtgttggagacggccgcccctggtgtggaggatatcagtggcctgcctagcggcgaagtattggagactgcggcccctggggtggaagacatatccggactgccatccggtgaggtgctcgagacagcagcccctggagttgaagatatatcagggctgccatccggggaagtcttggagactgcggctcccggcgtcgaagacattagcggtctgcccagcggtgaggtactggagaccgccgcccctggcgtggaagacatctcaggattaccttccggcgaggttctggagacagctgcacccggtgtagaagacatttccggcctccctagtggtgaggtcctcgagactgcagctcccggcgtcgaagatatctctggactaccctccggtgaggtgttggagaccgctgcccctggcgtagaagatatctcaggactgccatccggcgaagtcctggagaccgctgctccgggcgtggaagatatctccggtctcccctccggagaagtgctagagacggctgccccaggcgtggaggatatttcaggcctgccctcaggtgaagtcttggagaccgccgcacctggcgtggaagatatcagcgggctgccctccggagaagtgctggaaaccgcggcgcccggggtggaggacatttctgggctcccatctggagaagtgctcgagacgaccgcgcctggagtggaagagatctccggactgccatcgggcgaggtattggagactacagcacccggagtagacgagattagtggcctgccctcaggggaagttctagagaccacagcccctggggttgaagagatctccggcttaccctccggtgaggtccttgagacaagcactagcgccgttggcgatctgtctggtctgccgagcggcggagaagttcttgagataagtgtctctggtgtcgaagacatcagtggtctgccatctggagaagttgttgagacctccgccagcggaattgaggatgtgagcgaactcccatctggagaggggttagagaccagtgcaagcggagtggaagacttatcacgcttacccagcggtgaggaagtcctggaaataagcgcaagtgggttcggagacctatcaggtttgccctccgggggggaaggcttggagacttctgcatccgaggttgggacggatctctctggacttccctccggaagagaaggtctagaaacatctgcgtccggtgcggaggacttgagtggtctgcccagcggcaaagaggatttggtgggcagcgcgagtggcgatctcgatctcgggaagctcccttccggcacattgggaagcgggcaggcacccgagactagtggcctcccttccgggttttcaggcgaatactccggtgtggatctgggatcagggccacccagcggattaccagacttcagtgggcttccatcgggttttcccacagtgagccttgtggacagcaccctggtcgaggttgtgaccgcctctaccgcttctgaactggagggacgcggcacaatcgggataagcggggccggcgaaatttccggactgccatcctccgagcttgatatctcgggacgcgcttccggactcccatctggcaccgagctttccggtcaagcgagcggcagtcctgacgtcagtggagaaattcccggcctctttggtgtaagcgggcagccctcaggatttcctgacactagtggagaaacctcaggagtaacggagctatcaggtttgtctagcggacaacccgggatctctggggaagcaagcggagtgttgtacgggacaagccagcctttcgggatcacagacttgtctggcgaaacaagtggggttcccgacctatctgggcaaccttctggcttaccaggcttctctggcgctacgagtggtgtacctgatctcgtttccggcacaacctccgggtcaggtgagtcatccggaattaccttcgttgacaccagcttggtagaggtggcaccgactacttttaaggaagaggaaggtctcggttcagtagagctctccggacttccgagcggcgaagccgacctttcaggaaaaagtggcatggtcgacgtgtccggtcaatttagtggtactgtcgacagcagcggttttacttcccagacccctgaattcagcggactgccctctgggattgccgaggtgagcggggaaagcagtcgggcggaaatcggttcttctcttcctagcggagcgtattacgggtcggggaccccttcctcttttccgaccgtgtctcttgtggatagaaccctcgtggaaagcgttacccaagccccgactgcccaggaagccggcgagggcccttcaggcatcctggaactctctggagcccatagtggggcaccagatatgagcggcgaacattctgggttcctcgacttgtcgggccttcaatcagggctgatcgagccttccggcgagccacctggaactccctatttctccggggactttgccagcaccactaatgtgagcggggaaagctcggttgctatgggcacttcaggcgaagcctcagggctaccagaggtgacattaatcaccagcgagttcgtcgaaggagtgactgaaccaaccatcagccaggaactggggcagcgaccaccggtgactcataccccacaacttttcgagtccagtggaaaggtaagcacagcaggtgatattagcggcgccacaccagtgcttccaggcagcggcgtcgaagtgtctagcgttcccgagagtagctcagagacaagcgcatacccagaagcagggtttggggccagcgcagctcccgaagcctctcgtgaggacagcggatccccagatctctccgaaacaacatctgcctttcatgaagcaaacctggagagatccagcggactcggggtgtcaggcagcactctgacattccaggaaggtgaagcctctgcagcccctgaggtttcgggcgagtccactacgacttcagacgtaggcacagaggccccaggtttgcccagtgccacccccaccgcctccggggaccgcacagagatctcaggagatctgtcgggacacacctcccaactgggcgtcgtcataagtaccagcattccggagtccgaatggactcagcagacccagcggcccgcagaaacccatttagagatcgagagctcaagtctgctatattcaggcgaggagacacacactgtggagactgcaacgagccctaccgacgcttctatccctgcatctccagagtggaaaagagaaagtgagtcaacagcagcagcccctgcaagatcatgcgcagaggagccctgcggtgctggcacctgcaaggagaccgaaggccacgtgatttgtctctgccctcctggttacactggcgagcattgcaatatcgaccaggaagtttgcgaagagggctggaataaatatcaaggccactgctatcggcactttccggatcgtgagacttgggtcgacgccgagcgtcgatgtagagagcagcagtcgcacctttctagcatagtgacccccgaagagcaggagtttgtaaataataacgcccaggattaccaatggatcggactgaacgataggacgatcgagggggacttccggtggagcgatgggcaccccatgcagtttgagaattggcggccaaaccaaccggataacttttttgccgcgggagaggattgcgtggtgatgatttggcacgagaaaggagagtggaacgacgtcccatgtaattaccatctgccatttacttgtaagaagggaactgtcgcatgtggcgaaccgccagtcgttgagcacgcgaggacttttggacaaaagaaggatcggtatgagatcaactccttagtcagataccagtgtacagaggggttcgtgcagaggcatatgcccactattagatgccagccgagcggtcattgggaagagccacagatcacttgtacagacccaaccacttacaaacggcgtctacagaagcgttcctcgcgacacccgaggcgatcccgtccaagtacagcccactag

SEQ ID NO: 248012 - RNA, 1758 nt, synthetic construct
  misc_feature 1..1758: note = Description of Artificial Sequence: Synthetic coding sequence
  source 1..1758: mol_type = other RNA
atggccgccgtggaactcgagtggatccctgaaactctttataacactgccattagtgcggtcgtcgacaattatataagaagcaggcgcgatatcaggagtcttccagaaaatatccagttcgacgtttattataaactttaccagcaaggaaggttatgtcagctaggaagtgaattctgtgagctggaggtcttcgctaaagtactgagagccttggataagaggcatctgcttcaccattgtttccaggccttgatggaccacggagtgaaagttgcgtcagtgctggcctattctttctcacgtaggtgttcttacattgccgaaagtgacgccgccgtaaaagaaaaagctattcaggttggattcgtgctgggcgggttccttagcgacgccggatggtattccgacgccgaaaaagtttttctgtcttgcctgcagctttgtacactgcatgatgagatgttacactggttcagagctgtggaatgttgcgtgagactcttacacgttcgaaatggaaattgtaaatatcaccttggcgaagagacgttcaaacttgcccaaacttacatggataagctgtcaaagcacggacagcaagccaataaggctgcattgtacggagaactatgcgcactgctatttgctaaaagccactacgacgaggcttataaatggtgcatcgaggctatgaaagagatcaccgctggcctgccagtgaaagtagtcgtcgatgtcctcagacaagcctctaaggcctgcgtcgtcaagcgggagttcaagaaagcagagcagctaatcaaacacgctgtatatctcgcacgtgaccacttcggatccaagcaccccaagtactctgataccttgctcgactacggattttatctgctcaacgtggacaacatctgccagtctgtggcaatctatcaggccgcactcgatatcagacagagtgtatttggcggtaagaacattcacgtcgccacggctcatgaggatctggcctattcctcttacgtgcaccagtactctagcgggaagtttgacaacgccttgttccacgctgagagggctattggcatcataacccacattctgcctgaggatcatctgcttcttgccagtagtaaacgcgtaaaggccctcatactggaggagattgctattgactgccataacaaggagaccgaacaaagactgctgcaagaagcacacgatctgcacctgtcttctcttcaactggcaaaaaaggctttcggcgaattcaacgtacagactgcaaagcactacgggaacttgggcagactttatcagagcatgaggaaatttaaggaggccgaggaaatgcacattaaggccatccagattaaggaacagctcctaggccaggaggattatgaggtcgctctgagtgtgggccatttggcctcactatataattacgacatgaatcaatacgaaaatgccgagaaactgtatctccggtctatagccatcgggaagaagctgttcggcgagggttattccggtcttgagtacgattacaggggtctgataaagctctacaactctattggtaactatgagaaagtctttgagtatcataacgttctctccaactggaatagattacgagataggcagtattccgttaccgacgctttggaggacgtgagcacatctccacagtcaacggaggaagtcgttcaaagtttcctcatttcccaaaacgtggagggtccttcctgttag

SEQ ID NO: 248013 - RNA, 354 nt, synthetic construct
  misc_feature 1..354: note = Description of Artificial Sequence: Synthetic coding sequence
  source 1..354: mol_type = other RNA
atgggaacctggggcgccccacatcggaccctgccatgcagaaatcgcggcgctatgcagccgcgtgtcttactagtggtggccctcctcgcccttcttgcttctgctagggccagtgaagcggaggatgcgtcccttttatcgttcatgcagggctacatgaaacatgctaccaagaccgccaaggatgctttgagctccgtccaggagtcacaagtcgcgcagcaggctagaggatgggtaacagatggcttttcttccctgaaagattattggtctactgttaaggacaagttctccgagttctgggatctggatcctgaagtcaggcccactagcgcagtggctgcctag

SEQ ID NO: 248014 - RNA, 168 nt, synthetic construct
  misc_feature 1..168: note = Description of Artificial Sequence: Synthetic coding sequence
  source 1..168: mol_type = other RNA
atgcagcccagagtcttactcgtagtcgccctactagccctgttagcgtccgctagagcgagcgaggcagaagacgccagtctactgtcctttatgcagggatacatgaagcatgccactaaaactgcaaaagatgccttgtcctcagtccaagaatcacaggtgtag

SEQ ID NO: 248015 - RNA, 954 nt, synthetic construct
  misc_feature 1..954: note = Description of Artificial Sequence: Synthetic coding sequence
  source 1..954: mol_type = other RNA
atgaaggtcctctgggcagcactgctggtgacattcctggctggctgtcaggctaaagttgagcaagctgtcgagacagaacctgagcccgagctgaggcagcagaccgagtggcagtcaggccagagatgggagttagccctggggaggttttgggattacctgcggtgggtacagacactgagtgaacaggtccaggaggaattgctgtcgtcacaggtgacacaggagcttagagcactgatggatgaaacgatgaaggagctaaaggcgtacaagagcgagcttgaagagcaactgacccccgtcgccgaagagaccagggcccggctttccaaggagctacaagcggcccaggccagactcggagccgatatggaggacgtgtgcggacgactggtgcagtacaggggcgaagtgcaagcgatgctcgggcagtctaccgaggaactgcgggtcagactggcaagtcacctgcgaaaacttagaaaaagattattgagagatgccgacgacctgcagaagagactcgccgtttatcaggctggcgctagggaaggcgctgaaagaggactcagcgcaattcgggagagactggggcctttggtggagcagggaagagttagagcagcgaccgtgggatcgctcgcgggacagcctctccaggagagagcccaggcctggggtgagagattacgggccaggatggaggagatgggcagccggacaagagatcgcttggacgaagtgaaggagcaggtcgcggaagtcagagctaaattggaagagcaggctcagcagattaggctacaggccgaagcctttcaggcgagactgaaaagttggttcgagccccttgtggaggacatgcagagacaatgggctggattagtggaaaaagtgcaagctgcagtgggaacctcagctgctcccgtcccctctgacaaccactag

SEQ ID NO: 248016 - RNA, 660 nt, synthetic construct
  misc_feature 1..660: note = Description of Artificial Sequence: Synthetic coding sequence
  source 1..660: mol_type = other RNA
atgaaggtactttgggcagcattattagttacgttcctggcgggatgccaggccaaggtcgaacaagccgttgagacagaaccggagccagaactgcgtcagcagactgaatggcagagtggtcagcgttgggagctagcactaggcagattttgggactacctgcgctgggtgcagactttatcggaacaggtccaggaggagctcttatcctcacaagtcacccaggaactcagggccctgatggacgagacaatgaaggaactgaaggcctataaatccgaactcgaggagcaacttacaccagtggctgaggagacgagggccagactgtccaaggaactgcaggcagcccaagcacgtctgggagcagatatggaagacgtatgtggacggcttgtccaatatcgcggggaggtccaagccatgctggggcagtctaccgaggagcttagggtgcgattagccagccacctgaggaaactgcgaaaaaggttactcagagacgccgacgacttgcagaaaaggcttgccgtctaccaggccggagcacgcgaaggggccgaaaggggcctgagcgcaatcagggaacgcctgggtccactagtggagcagggccgcgtcagagccgcgaccgtcgggtccctggcagggcagtag

SEQ ID NO: 248017 - RNA, 867 nt, synthetic construct
  misc_feature 1..867: note = Description of Artificial Sequence: Synthetic coding sequence
  source 1..867: mol_type = other RNA
gaagtcaaagatgtgctaccgcaggagccagtgcgatccgcagtgggcggcacaggaatgtcctcaggcgctagccgcaaatcatgggatcccggcaatccatggccaccggactggccgattacgggccgcaaaatgaaagtgctttgggcagccctactggtcacattcctggctggctgccaggccaaggtcgagcaggcagtcgagacggagcccgaaccagagctgagacaacagaccgaatggcaatcaggacagaggtgggaactagcgttggggcggttttgggattatttgcgatgggtccagacactctccgagcaggtacaagaggaactactgtcaagtcaggtaacgcaggaattgcgcgctctgatggatgaaaccatgaaggagctgaaggcatataagtccgagctggaggaacaactcactccggtcgctgaagaaactcgcgcgagactgagcaaggagcttcaggcggcccaagccagacttggtgccgatatggaggatgtgtgtggcagactagtccaatacagaggcgaggtgcaggcaatgctgggtcagagcacggaagagctccgcgttaggctggcctcccatctgaggaagcttagaaagagactactacgggatgccgatgatcttcagaaaaggttggccgtatatcaggctggcgcgcgggaaggagccgagagaggactctctgcaataagagagagattgggccctctggtggaacaggggcgggtcagggctgctaccgtgggttctttggcggggcagcccttacaagaacgggcacaggcttggggcgagcgtttgcgggccagaatggaagagatgggctcaagaacatag

SEQ ID NO: 248018 - RNA, 651 nt, synthetic construct
  misc_feature 1..651: note = Description of Artificial Sequence: Synthetic coding sequence
  source 1..651: mol_type = other RNA
atgaaagtactgtgggcagccttgctcgtgacgtttttggcgggttgccaagccaaagtcgaacaagcagtcgagacagagcctgaacctgagcttcgacagcagaccgagtggcagagtggccagaggtgggaacttgctctcggacgtttctgggattatttgcgttgggttcagacgctaagtgaacaagttcaggaagagcttttaagctcccaggtgactcaggagttgcgtgccttgatggatgaaacaatgaaggaactgaaggcatataagagcgagttggaagaacagttgaccccagtggctgaggaaactcgggcccgattgtctaaggaactgcaggccgcccaagcaagactcggcgctgacatggaagacgtctgcgggcgtctagtgcagtatagaggtgaggtgcaagctatgcttggccagtccactgaagagttaagagtgagactagcaagtcacttgaggaaactgagaaaacgccttctgcgcgatgctgacgatctgcaaaaacgattggctgtgtaccaggcaggagcgagagagggcgctgaacgcgggctgtctgcaattagggagagactcggtcccttagtagaacaagggagggtccgggcggctacggttggttcattgtag

SEQ ID NO: 248019 - RNA, 1245 nt, synthetic construct
  misc_feature 1..1245: note = Description of Artificial Sequence: Synthetic coding sequence
  source 1..1245: mol_type = other RNA
atgcggttcaagtctcacactgttgagcttcggaggccatgttctgatatggaaggcgccgcacttttacgagtatccgtgctatgcatctggatgagtgcgttgtttctaggggtgggcgtgagagccgaggaggcaggggcacgcgtgcagcagaacgtgccttcaggaactgacaccggagacccacagtcaaagccccttggggattgggcggcaggaacaatggacccggaatctagtattttcattgaggacgccataaaatatttcaaagaaaaggtaagcacccaaaatttgctacttctactaacagataatgaggcatggaatggattcgttgccgctgcagaactccccagaaacgaggccgacgagcttcgcaaggctctagataatctcgctagacaaatgattatgaaggacaagaattggcacgataaaggtcagcagtacagaaattggtttttaaaagaatttccacgcctgaagtctgagctagaagacaatattcgtcggctgagagcccttgccgatggggtgcaaaaggtccacaaggggacaaccattgctaatgttgtcagcgggtcactgtcaatttcctcgggtatccttaccctggtcgggatgggcctcgcaccattcaccgagggcggtagcctcgttctgctggagcctggtatggaactggggatcactgcagccctgacagggataacttcgagcaccatggattacggaaagaagtggtggacacaggcccaggctcacgacttggttattaaaagtcttgataaacttaaggaagtgagggaatttctcggtgagaacatttcaaatttcctctctctcgccggcaacacttaccagttaaccagaggcatcgggaaggatattcgcgcactgcgccgagctcgagcaaatctgcaatccgtgccacatgctagcgcttcccgtcctcgagttacggagccaatctcggccgagtccggagaacaggtagagagagtaaatgagccaagtatcttagaaatgagcagaggggtgaagcttactgacgtggccccagtcagttttttcctggtgctcgacgtggtttacctagtgtacgagagtaaacatttgcacgagggagccaagtcagagaccgccgaagaactgaaaaaagtagcccaagagctggaggagaaactcaatatcttaaataacaactataaaattctgcaggcggatcaggaactttag

SEQ ID NO: 248020 - RNA, 834 nt, synthetic construct
  misc_feature 1..834: note = Description of Artificial Sequence: Synthetic coding sequence
  source 1..834: mol_type = other RNA
atgattatgaaggacaagaattggcacgataaaggacaacagtacaggaactggtttctgaaggagttcccccgcttaaaatccgagctggaggacaacattcgcagattaagggccttagcggatggagtgcagaaagtgcataaggggaccaccatcgctaatgtggtctcaggctcgctctctatctcatcagggatactcactctagtaggcatgggcctcgctcccttcactgaggggggttcactcgtactcctcgagcctggcatggagctggggattacagcggccctgacaggcataacttcaagcacaatggattacggcaaaaaatggtggacccaggcccaagcgcatgaccttgtgatcaaatctctagataaactgaaagaggtacgggagttccttggcgaaaatatctccaactttctatccctggcaggcaatacgtaccagctgacaagaggcatcggtaaagacatccgcgccctccggagagctcgggctaacctacagtccgtgccgcatgctagtgcgtctagaccacgtgttactgaacccatctcagcagaatccggcgaacaggttgaacgggtaaatgaaccctcaattctcgagatgagcagaggagtgaagctcacggacgtggctcctgtgtctttttttttggttctggatgtggtctacctcgtctatgagagcaaacacctgcacgagggcgccaagagcgaaacagccgaggaactgaagaaggtggcacaggagctggaagaaaagcttaatattctgaacaataattataaaattctccaggctgatcaggaattgtag

SEQ ID NO: 248021 - RNA, 1197 nt, synthetic construct
  misc_feature 1..1197: note = Description of Artificial Sequence: Synthetic coding sequence
  source 1..1197: mol_type = other RNA
atggaaggagcagctttattacgggtgagcgtgttatgcatctggatgtctgccctttttctgggcgttggcgtgcgcgcagaggaggccggtgcccgtgttcagcaaaacgttccctctggcactgacaccggagacccccaaagcaaacccctaggagattgggcagcgggaacgatggaccctgaatctagcatcttcattgaagatgccatcaaatacttcaaagagaaagtgagtacacaaaatctgctcttgttgcttaccgacaatgaagcgtggaatggattcgtagcagcggcagagctgcctaggaacgaggctgacgaactgcggaaggcactcgacaatcttgcacgtcagatgatcatgaaggacaaaaactggcatgacaaggggcagcagtaccgcaattggttcctcaaagaatttccacgtctcaaaagcgagcttgaagataacatacgcaggctccgcgccctggcagatggcgttcagaaagttcacaaagggacaaccatcgccaacgtagtgtccggatccttatcaattagcagcggaatactgacactcgtcggaatgggtttagccccattcactgagggcggaagcctggttctgctcgagccaggcatggaattaggaattacggcagctttgacaggcattacgagctccaccatggactatgggaagaagtggtggacacaggcccaggcccacgacctggtgatcaagagcttggacaaactgaaggaagtgagggagtttctaggggaaaacatctcaaattttttgagtctggccgggaatacatatcagctcacaagagggattgggaaagatattcgagcgctaagacgggccagggcaaacttacagtctgtgccacatgcatcagcaagtcgtcctcgcgtaaccgaacctataagtgcagagtcaggtgagcaggtggaaagagtcaacgaaccatctattttggagatgtccaggggagtgaaactcaccgatgtcgctcccgtttccttctttttggtcctggatgtagtatatctggtgtacgaatctaaacacctccacgaaggggcaaagagtgaaactgccgaggagcttaagaaggtagcacaagagctggaagagaagctgaacatcctgaataataattataaaatccttcaggccgatcaggagttatag

SEQ ID NO: 248022 - RNA, 1197 nt, synthetic construct
  misc_feature 1..1197: note = Description of Artificial Sequence: Synthetic coding sequence
  source 1..1197: mol_type = other RNA
atggagggagcagcactccttagggtttcagtgctatgtatatggatgtctgcacttttccttggcgtcggcgtgcgcgcagaagaggctggtgccagggtacagcaaaatgtcccgtcaggtacagacaccggtgatccacagagcaaacctttaggagactgggctgccggcactatggacccagagtcctcaatttttatcgaagacgcaatcaagtactttaaggaaaaggtatccacccaaaatcttctattattgctgaccgacaatgaggcctggaatggatttgttgccgccgccgaactgcctaggaacgaagcagatgagctcagaaaggccctcgataatttagcccggcagatgattatgaaagacaagaattggcacgacaaaggacaacaatacagaaactggttcctgaaggagttcccgaggcttaaatctgaattggaggacaacatacgcagactaagagcactggccgacggagtccaaaaagtgcacaagggcacgactattgcaaacgtcgtcagcggcagtctgtcaatctcgtctggaattctgaccctcgtggggatgggactggcccccttcaccgaaggtggttccctggtgcttctggaaccaggaatggagttgggcattacagccgccttgacaggaatcacttcttcaaccatggactacgggaaaaagtggtggacccaagcccaggcccacgatctcgtcatcaagtccctggacaagcttaaagaagtcagagagtttctcggagaaaacatctctaattttttaagtctggccggtaatacctaccagttaacacgagggatcggcaaggatattagggctttaaggagggccagggccaatcttcagagcgtgccacacgcctccgcgtctaggcctcgagtaaccgaacctataagtgctgaaagcggagagcaggtggaaagggtgaatgagccctccatactggaaatgtcacgcggagtgaagctgacggacgtggcaccagtgtctttttttcttgtgctggatgtcgtctatctggtgtacgaatctaaacacctgcacgaaggcgcaaaatcggagactgctgaggaactgaagaaggttgcacaggagctcgaggaaaaactgaacatcctgaataataattataagattttgcaggccgaccaggagctctag

SEQ ID NO: 248023 - RNA, 1197 nt, synthetic construct
  misc_feature 1..1197: note = Description of Artificial Sequence: Synthetic coding sequence
  source 1..1197: mol_type = other RNA
atggagggcgcggctctgttgcgagtctctgtgctgtgcatctggatgagtgctttattcctcggggtgggcgtacgagccgaagaggctggagcacgcgttcagcagaatgtgccctccgggaccgatactggcgatccacagagtaagcccctcggagactgggctgccggtactatggatcccgaatcatcaatttttatagaggatgctattaagtacttcaaggaaaaggtttccacccagaatctattattgctcctcaccgacaatgaagcttggaacgggttcgtagccgccgcagaactcccaaggaacgaagccgatgaactcaggaaagctctggacaacctagcgcgtcagatgattatgaaagataaaaactggcacgacaaaggacagcagtatcgaaattggtttctgaaagagtttccgcggctgaaaagcgagctcgaggataacataaggcggttacgagcactggcagacggtgtacagaaggtgcataagggcacaactatagctaacgtcgtctcaggctcactgtcaatttcctcaggcatccttacactggtgggtatgggacttgccccctttacagaaggtggctctctggtcctgcttgaaccagggatggaactcggcatcacagccgccctgacaggaatcacgtcttccactatggattacgggaagaaatggtggacacaggcccaggcacacgacttagtgataaaaagcttagacaaacttaaggaagtccgggaattcttaggcgaaaacatctctaattttttatccctggcggggaacacatatcagctgacgcgcggaattggaaaggacatcagagcgcttagaagagcccgcgctaacctccagtccgtcccccatgctagcgctagccgccccagagtcaccgagcccatctccgctgaatccggagagcaagtcgaacgggtgaatgaacccagtatccttgaaatgtcccgtggcgtaaaactgaccgatgtggcgcctgtttccttttttctggtgttggatgttgtttatctcgtttacgagagtaagcatctccatgaaggtgccaaatccgagactgccgaggagctgaagaaagttgcccaggaactggaggaaaaactcaatattctgaacaataattacaagattctgcaagccgaccaggagctatag

SEQ ID NO: 248024 - RNA, 1197 nt, synthetic construct
  misc_feature 1..1197: note = Description of Artificial Sequence: Synthetic coding sequence
  source 1..1197: mol_type = other RNA
atggaaggtgcggcactgcttagggtctctgtcctgtgcatatggatgagtgcattatttttaggtgtaggagtaagagctgaagaagccggagccagagttcagcaaaacgtgccttcaggtacagacaccggagacccgcagtccaaacctctgggcgattgggccgcaggcactatggaccctgagtcaagcattttcattgaagacgcaattaagtacttcaaagagaaagtgtcaacccagaacctccttttgctgctcacggataacgaagcatggaacgggttcgtcgctgctgctgagctgcccagaaatgaagctgacgaattgcgtaaagcccttgacaatcttgctcgccaaatgatcatgaaggataagaattggcacgacaaaggccagcaatatcgaaactggtttctgaaggagttcccaagattaaaatctgagttagaagacaatattcgtcgtcttagggccttggccgacggggttcaaaaggtccacaaagggacaacaatcgctaacgtcgtctccggatcactatctatcagcagcggtatcctgacacttgtgggcatggggcttgcaccctttacagaaggagggtcactcgtacttctggaaccaggaatggaactgggcatcactgctgccttgactggaatcactagttccacaatggattacgggaaaaagtggtggacccaggcccaagctcacgacttggtgattaagagcctggacaagctaaaggaggtgcgcgagtttctcggggagaatatttctaactttttatctctggcaggaaatacctatcagctgactcgcggcattggcaaagacattagggcattacggcgggcccgcgctaacctccagagcgtcccccatgcaagtgcaagccggccgagggtgacagagccaatcagtgctgagtcaggcgaacaggtggagcgcgtgaacgaaccctcaatcctcgaaatgtcgcgcggcgtgaagttaacagacgttgctccggtgtccttcttccttgtcctcgacgtggtatatctggtctacgaatctaagcatctccacgaaggggcgaaaagcgagaccgctgaggagttaaagaaagtggcccaggagctagaggaaaagctgaacattctgaataataactataaaattttgcaagctgaccaagaactctag

SEQ ID NO: 248025 - RNA, 1143 nt, synthetic construct
  misc_feature 1..1143: note = Description of Artificial Sequence: Synthetic coding sequence
  source 1..1143: mol_type = other RNA
atggaaggggccgccctgttgcgagtatcagtgttgtgtatttgggtgcagcagaacgttcctagcggcactgatactggcgacccccaatctaagcccctcggagactgggcagcaggaactatggaccctgaatctagcatatttatagaggacgccatcaaatactttaaagagaaggtgtcaacacagaacttactgctacttctgactgacaatgaagcatggaacggatttgtggccgccgccgagctcccccgtaacgaggctgatgagctgcgtaaggcactggataaccttgcaaggcaaatgatcatgaaagacaaaaattggcatgacaaaggccaacaatatcgaaactggtttctcaaggaattcccacggctgaagtccgaacttgaagacaacattcgaaggttaagagccttggcagatggggtccaaaaggttcacaaaggcacaactatcgccaacgttgtgagcgggtctctgtcaatctcctctggaatcttaacactcgtgggaatgggattagccccgttcacagagggcggatcactggtactgctggaacccgggatggaactgggaatcactgcagccctcactggaatcaccagcagcaccatggactacggcaaaaagtggtggacccaagctcaagctcacgacctcgtaatcaaatcactggataaactcaaagaagtcagagaattccttggagaaaatatttcgaatttcttaagcctggctggaaatacctaccaactcacacgtggaatcggcaaagatatacgagcgctgcgccgagcaagggcaaacttgcaaagcgtgccccatgcaagtgctagtaggccaagagtaacggagccaatttcggcggagagtggggaacaggttgagagagtgaatgagccaagtatcttagagatgtctcgaggcgttaaactcacagatgtggctcccgtgtcattctttctggtgctcgacgtggtttacctggtgtatgagtctaagcacctgcatgagggcgcgaaaagcgagacagcagaggaactcaagaaggtggcccaggagctcgaagagaaactcaatatcctgaacaataactacaagattctccaagctgatcaagagctatag

SEQ ID NO: 248026 - RNA, 483 nt, synthetic construct
  misc_feature 1..483: note = Description of Artificial Sequence: Synthetic coding sequence
  source 1..483: mol_type = other RNA
atggagggagcagccctgttgagagttagcgtgttatgtatttggatgtcagccctgtttctgggggtcggagttagagctgaagaagcgggagcaagggttcaacagaacgtaccctcagggacggacaccggagaccctcaatccaaacctctgggtgattgggccgccggaactatggatcccgagagctccatctttattgaggacgccatcaaatattttaaagagaaagtttccacccagaatctgctcttgctactcacagataacgaggcttggaatggcttcgtcgctgctgcagagttgccaagaaacgaggctgatgagctgaggaaagccctggacaatctagcccgccaaatgatcatgaaagataagaattggcatgataagggccagcagtacagaaattggtttcttaaggagttccctagactgaagtcagagctggaagacaatatacgacgcctgagagcttag

SEQ ID NO: 248027 - RNA, 426 nt, synthetic construct
  misc_feature 1..426: note = Description of Artificial Sequence: Synthetic coding sequence
  source 1..426: mol_type = other RNA
atggaaggagctgcgttattgcgtgtttccgtgctgtgcatatggatgagcgctctatttctcggggtcggcgtgagggcagaagaagcaggggccagagtgcagcagaatgttccctccgggaccgataccggagatccgcagagtaaacctctgggagactgggccgcaggcacaatggatcccggacccgcagggtctcgaggtgactcaggcgaaccgtgtacattgaggcctgcatgccgtggacagagacagcacggcggggcttcgcgtatcagtgccgaaggaccagccccgatgccacgtagacgtacgccatcgactgcgcacctccgtgtaccaaagacttcaagacgcaatctgctgtgcatgagggccgtgtcattactcagaatgcccctctccatcagcagaaagaagtag

SEQ ID NO: 248028 - RNA, 357 nt, synthetic construct
  misc_feature 1..357: note = Description of Artificial Sequence: Synthetic coding sequence
  source 1..357: mol_type = other RNA
atgcgcttcaaaagtcacactgtcgaactccgaagtacgttgagccagccactgttctcctgctcaagacgacgcccttgcagtgatatggaaggcgctgcgctgctgcgggtgtctgttctgtgtatttggatgtccgctctgtttctgggcgtgggagtcagggccgaagaggccggtgctagggttcagcagaatgtgccaagcgggacagacaccggagatccccagagtaaacctctcggagattgggccgcaggcaccatggaccccgaatctagtatcttcatcgaagacgccattaaatacttcaaggagaaagtttccacacaaaacctgctgttactcctgacctag

SEQ ID NO: 248029 - RNA, 426 nt, synthetic construct
  misc_feature 1..426: note = Description of Artificial Sequence: Synthetic coding sequence
  source 1..426: mol_type = other RNA
atggagggcgctgcattgctccgcgtgagcgtcctgtgtatttggatgagcgcactatttcttggagtcggagtccgagcagaagaagctggcgctagagtgcaacagaacgttccatctggcactgatactggagacccccaaagcaaacccctaggtgattgggccgccggcaccatggaccccggaccagcgggctctcggggagacagtggtgaaccctgtacactgcggccagcctgccgaggtcagcgacagcacggaggcgcaagcagaattagcgctgaaggccccgctcccatgccacgcagacgaaccccaagcactgcacacctgcgggttcccaagacatcccggcgtaatttgctgtgtatgcgggcggtgtcactgttacggatgcccttaagtattagccgtaagaagtag

SEQ ID NO: 248030 - RNA, 1014 nt, synthetic construct
  misc_feature 1..1014: note = Description of Artificial Sequence: Synthetic coding sequence
  source 1..1014: mol_type = other RNA
atgaacccagagtcctcaattttcatcgaagattacctaaaatacttccaagaccaggtttctagggaaaacctactccagctacttaccgacgatgaagcctggaacggattcgtggctgcagcagagcttcctagagatgaagctgacgagctgcgcaaagccctcaacaaactggcctctcatatggtcatgaaggacaagaatcggcacgacaaagaccaacagcatcgacaatggttcctcaaagaattccccagactcaagcgggagcttgaggaccacatcagaaaattacgggccttagctgaggaggtcgaacaggtgcatcggggcacaacgatagccaatgtagtgagcaacagcgtagggacaactagcggcatccttacattactggggctaggactcgctcccttcacggagggaatctctttcgtgctcctcgacactggaatggggttgggagccgcagctgcagtggccggaataacttgttctgtggtggaactggttaataagttacgagcccgtgcccaggcccgaaatctcgatcagagcggaactaatgtcgccaaagtcatgaaggagtttgtggggggaaacacacctaatgtccttaccctcgtggacaactggtaccaagtgactcagggaattggcaggaatatcagagccattcgccgggcgcgcgctaatccccagctgggtgcctacgcaccgccccctcacattattggcagaatcagcgcggaggggggcgaacaggttgagcgtgtggtggagggccccgcccaggccatgagtcggggcactatgatcgtgggggccgcaacagggggcattttactcctgctggacgtagtctctctagcctacgagagtaaacacctgttagaaggagcaaaatcagagagcgcggaagaattaaaaaaacgggcacaagaactcgagggtaaattgaacttcttgacaaagattcatgagatgcttcaacctggccaggatcaatag

SEQ ID NO: 248031 - RNA, 1014 nt, synthetic construct
  misc_feature 1..1014: note = Description of Artificial Sequence: Synthetic coding sequence
  source 1..1014: mol_type = other RNA
atgaaccctgagagtagcatcttcatcgaggactacttaaaatactttcaggatcaagtgagtcgcgaaaacctgcttcagcttctgaccgatgacgaggcctggaacggttttgttgctgcagctgagttaccgcgcgacgaggcagatgagttaagaaaggcgctgaataaactcgcctcacacatggtaatgaaggacaaaaaccgccacgataaggaccagcagcatagacaatggtttctcaaagagttcccccgcctgaagcgcgagctcgaagaccatatccgcaagttacgggcactcgcagaagaggtggaacaggtgcaccggggcaccacgatagctaatgtggtcagcaattctgttgggacgacatcaggcatccttacactcttaggtctcgggctagctccatttactgagggtatcagcttcgtcctgcttgacacgggcatgggccttggtgcagccgctgccgtcgctggaatcacatgctctgttgtagagctcgtaaataagcttagagctagggcacaggcccgcaacctcgatcagtctggcacaaacgtcgctaaggttatgaaggaattcgttggtggaaatactcccaatgtactgacactggtggacaattggtaccaggtgacccaaggcatcggccggaacatcagagctattcggagagctagagcaaacccccagctgggagcttatgccccccctccacacattatagggaggattagtgctgaaggaggagagcaggtcgaacgagtagtggagggtcccgcccaggctatgtccagaggcaccatgatcgtaggcgccgccactggtggtatactactcctcctggacgtagtaagcctggcttacgaaagcaagcatctccttgagggtgccaaaagtgaaagcgcagaagaactgaagaaaagagctcaggagctcgagggaaagttgaattttctaactaagattcatgagatgctgcagccaggacaggaccaatag

SEQ ID NO: 248032 - RNA, 1350 nt, synthetic construct
  misc_feature 1..1350: note = Description of Artificial Sequence: Synthetic coding sequence
  source 1..1350: mol_type = other RNA
atgcattcctggacatgggatccacattcaagtgaacagctcgacctggctcagtcactgagcgaggaagatccactatctagcctgcgaggttctattcagccccagcctccagccgaggctccagacaaaggcgggtcccaagcaaacaatgatcctggcggatgggatcccggttgttctagctcccaggtgctggggcgcaccaggggtccttgcctaggggtcagggttagggaagaagaagccggaaccagggtgaaggaaaatctacccgtttggaccgtgacaggggaactacaaggaaaacctctcggaaaccctgccgccgggaccatgaatccagagtcctccatcttcattgaggattaccttaagtatttccaggaccaggtctcacgagaaaatctcctacagttgcttaccgatgatgaggcgtggaacggttttgtggctgccgccgagcttccacgtgacgaggccgacgaattgaggaaagctctgaataagcttgcgagtcacatggtaatgaaggacaaaaaccgacatgataaggaccagcaacaccggcaatggtttttgaaagaattccctagactcaagcgggaactggaggaccatatccgtaagctcagggcattggcagaggaagtggaacaagtgcatagaggtacgacaatcgccaacgtagtaagtaattccgtgggtacaacctctggcatactcaccctgcttgggctaggtctcgcaccttttactgaaggaatctcattcgtgttgttggatacgggcatgggcctcggcgcagcagccgccgtggcaggcattacttgttcagttgttgagttggttaacaaactgcgcgccagggcacaggcaaggaacctggatcagtccggcaccaacgttgctaaggtaatgaaggagttcgtcggtgggaacacaccaaacgtgcttactcttgtagacaattggtatcaggttactcaaggaatcggccgtaatattcgtgccataagaagggctcgagcgaacccccaactaggggcctatgcaccacccccccacatcattggaaggatcagcgcagaaggcggcgaacaggtcgaacgtgttgtagagggccctgcccaggcaatgtcacgtggaacaatgatcgtgggcgccgccaccggtgggatcttactccttttagacgtggttagccttgcatatgagagcaaacatctcctcgagggcgcaaaaagtgagtccgctgaagaactgaaaaaaagagcccaagaactggagggtaagctgaattttctgactaaaattcatgaaatgctacagccaggacaagatcagtag

SEQ ID NO: 248033 - RNA, 225 nt, synthetic construct
  misc_feature 1..225: note = Description of Artificial Sequence: Synthetic coding sequence
  source 1..225: mol_type = other RNA
atgaaccctgaaagcagcattttcatcgaagactaccttaaatactttcaagaccaagtcagtagagagaatcttcttcaactgcttactgacgacgaagcctggaacggcttcgtggctgcagctgaactaccaagggacgaggcagatgaactgagaaaggctcttaacaagctagcttcccacatggttatgaaggataagaaccggcacgacaaagactag

SEQ ID NO: 248034 - RNA, 387 nt, synthetic construct
  misc_feature 1..387: note = Description of Artificial Sequence: Synthetic coding sequence
  source 1..387: mol_type = other RNA
atgaaccccgaatcgtctattttcattgaggactatcttaaatacttccaggatcaggttagccgggaaaacctactgcaattgctgaccgacgacgaagcttggaacggatttgtggctgctgccgagctaccgagagatgaagctgacgagttgcggaaggcgttaaataagcttgccagccatatggttatgaaggataaaaatagacacgacaaagaccagcagcaccgccagtggttcctgaaggagttccctagactgaaaagagaactggaagaccatatccggaaactgagggcattggctgaggaggtggaacaagtgcatcgcgggactactatagcaaacgtggtgagcaattccgtgggcacaacatctggatag

SEQ ID NO: 248035 - RNA, 324 nt, synthetic construct
  misc_feature 1..324: note = Description of Artificial Sequence: Synthetic coding sequence
  source 1..324: mol_type = other RNA
atgggatcctgggttcagctcatcacctcagtcggcacgagcgggctctttctaggcgtacgcgtccgggaagaaggcgcgggaatgcgatgttcgaaaaccatacaggcgggccaatggctggacagtagtaaaggcccacttggtccttcccccccccctgttcccaccgcaggttactccagctccttttgcgtgcactacgtcaacttgctccccggcgtacttgtcctgtcagttacctctcagtacccacatctctcgatggctctttgccagttagccgcccacgactggccccgtctgtcttgtgtgtgtgtttag

SEQ ID NO: 248036 - RNA, 1044 nt, synthetic construct
  misc_feature 1..1044: note = Description of Artificial Sequence: Synthetic coding sequence
  source 1..1044: mol_type = other RNA
atgggatcctgggtgcaattaataacaagtgtcggcgttcaacaaaaccatccaggctggaccgttgcaggacaatttcaagagaaaaagagatttaccgaagaggtcatcgaatatttccaaaagaaggtaagtccagttcaccttaaaattctactgacttcggacgaagcctggaagagattcgttcgggtggctgagctgcccagagaagaggctgacgccctttacgaagctctgaaaaacttaacaccatacgtggctatcgaggacaaggacatgcagcagaaagagcaacagtttagagaatggttcctcaagtttcctcagatcaggtggaaaatccaagaaagtattgagcggctaagggtaattgctaatgaaatagaaaaggtacaccgcggatgcgtaattgcaaacgttgtatccgggtcaaccggcatcctctccgtgattggagttatgctggcccccttcaccgccgggctttcactaagcatcaccgcagctggtgttggactcggtattgcttcggccaccgccggaatcgcttcttccatcgtggagaacacgtacaccagatctgcagagctaacggcaagcagactcaccgcaacctccacagatcaactcgaagcactccgagatatcctgcgagatatcacacctaatgtactgtcttttgcattggacttcgatgaggctaccaaaatgatcgcaaatgacgtccataccctgagaagatccaaggctacagtcggcaggcctttgatcgcttggcgatacgtcccaattaacgtcgtggaaaccctccgcactagaggcgctcccacgaggatcgtgcgtaaggtggcaaggaatcttgggaaagcaacttctggtgtgctggtcgtacttgatgtggttaatctggtgcaggactctctcgaccttcacaagggagccaaatcagagtccgcagaaagtcttcggcagtgggcacaagagctcgaagagaacctgaacgagcttactcacattcaccagagcctcaaggcagggtag

SEQ ID NO: 248037 - RNA, 1053 nt, synthetic construct
  misc_feature 1..1053: note = Description of Artificial Sequence: Synthetic coding sequence
  source 1..1053: mol_type = other RNA
atggaaggtgctgcattactgaagatctttgtggtttgcatctgggtgcaacagaatcaccctgggtggactgtggccgggcagttccaagaaaaaaaacgcttcacagaagaggtcattgagtatttccaaaagaaggtgtcccctgttcatttaaagattttactgacgagtgacgaagcctggaagcggtttgtgcgtgtcgccgaattgccacgcgaagaagccgatgcattatacgaggctcttaagaacctgacaccatacgtggccatagaagataaggacatgcagcagaaggaacagcaattccgggagtggtttcttaaatttccccagataaggtggaagatccaagaatctattgaacgattacgagttatagccaacgaaatagagaaggtgcaccggggctgtgtcatagctaatgttgtcagcggcagcacaggaattctgtctgtcattggcgttatgctggcgccattcacggcaggactgtcactaagtattacggcagcaggagtggggctcgggattgcatccgctaccgccgggattgcctccagtattgtggagaatacatacacaaggtctgcagagctcaccgcctccagactgaccgccacaagtactgatcagctggaagccctgagagacattcttcgcgacataacacccaacgtcctgtcctttgccctagactttgacgaagccaccaagatgattgccaacgacgtgcacaccctccggcggtcaaaagcgacagtcggaagaccgttaatcgcctggcgttatgtgcctattaacgttgtcgagaccctgcgcaccagaggtgcgccaacacgaattgttcgcaaggtggcacgaaatctgggaaaagccacatctggggttctggtggtgcttgacgtggtgaatttggtgcaggatagtctcgacctccacaaaggcgcaaaaagcgaatcagccgagagcttgcggcagtgggcccaggagctggaagagaatctaaacgagctgacacacatccatcaaagtctgaaagccggttag

SEQ ID NO: 248038 - RNA, 393 nt, synthetic construct
  misc_feature 1..393: note = Description of Artificial Sequence: Synthetic coding sequence
  source 1..393: mol_type = other RNA
atggaaggcgctgcacttttgaaaatattcgtggtttgcatttgggtgcaacaaaatcatcctggttggacagtcgctgggcagttccaagaaaagaaaaggtttaccgaggaggtaattgagtacttccagaagaaagtgtctcctgtgcatttaaagatattactgactagtgatgaggcatggaagcgattcgttcgcgtggctgagttgccccgggaggaagcagacgccctgtacgaggcccttaaaaatctgaccccctacgtcgctattgaagacaaagacatgcagcagaaggaacaacagttcagggaatggtttctgaaggtatcaagtaatcaaatggaagacagcggagttcaccgtaaggcctcatgccactgcaagtag

SEQ ID NO: 248039 - RNA, 384 nt, synthetic construct
  misc_feature 1..384: note = Description of Artificial Sequence: Synthetic coding sequence
  source 1..384: mol_type = other RNA
atgggtagttgggtccagctgattacctccgtgggtgtgcagcaaaatcaccccggctggacagtggccggtcaattccaagagaagaagcgatttactgaggaggtcatcgaatacttccagaagaaggttagccccgtgcatctgaaaatcctgctcacaagtgatgaggcctggaaaagatttgtccgcgtggccgagctaccacgggaagaagccgacgcattgtatgaggctctgaagaatctaaccccttacgtcgcaatagaagataaagacatgcagcaaaaggaacagcagtttcgcgaatggtttctaaaggttagctcaaaccaaatggaggattccggcgtgcatcgtaaagccagttgtcactgcaaatag

SEQ ID NO: 248040 - RNA, 198 nt, synthetic construct
  misc_feature 1..198: note = Description of Artificial Sequence: Synthetic coding sequence
  source 1..198: mol_type = other RNA
atgggttcttgggttcaactcatcactagcgtaggcgtccagcagaatcaccccggatggactgtggcagggcagttccaagagaaaaagcgcttcaccgaagaagtcatcgaatatttccagaaaaaagtcagcccagtgcacctgaaaattctgttaacctctgatgaggcctggaagaggttcgtcagggtctag

SEQ ID NO: 248041 - RNA, 384 nt, synthetic construct
  misc_feature 1..384: note = Description of Artificial Sequence: Synthetic coding sequence
  source 1..384: mol_type = other RNA
atggggagctgggtgcagctgatcacctctgttggggttcagcagaatcatccaggctggaccgtggccggacaattccaggagaagaaaagatttacagaagaagtgatcgaatacttccagaagaaggttagtcctgttcacctcaaaatactcttgacctccgacgaggcatggaagaggttcgtccgtgtagcagaattgccccgcgaagaagctgacgcactttacgaagctctcaagaatttgacaccttacgttgccatcgaggacaaggatatgcagcagaaagaacagcagtttagagagtggttcttaaaagtttccagtaaccaaatggaggactcaggagtgcaccgcaaggcttcgtgtcactgcaagtag

SEQ ID NO: 248042 - RNA, 183 nt, synthetic construct
  misc_feature 1..183: note = Description of Artificial Sequence: Synthetic coding sequence
  source 1..183: mol_type = other RNA
atgggaagctgggtgcagttgattacttctgtcggagtccaacagaatcaccctggatggacagtcgccgggcaatttcaggagaagaaaagatttacagaagaagttattgagtatttccagaaaaaggtaagtccagtgcatctgaaaattcttttgacttccgatgaagcatggaaatag

SEQ ID NO: 248043 - RNA, 219 nt, synthetic construct
  misc_feature 1..219: note = Description of Artificial Sequence: Synthetic coding sequence
  source 1..219: mol_type = other RNA
atgggctcatgggtgcagttaatcacaagcgtgggagtgcaacaaaatcacccaggatggactgtggctggacaattccaagaaaagaagcgattcacagaggaggttatagagtatttccagaaaaaggtgagccccgttcatctgaaaattttgcttacttcagatgaggcctggaaaagatttgtgcgagtggctgagcttccaagagaggagtag

SEQ ID NO: 248044 - RNA, 213 nt, synthetic construct
  misc_feature 1..213: note = Description of Artificial Sequence: Synthetic coding sequence
  source 1..213: mol_type = other RNA
atgggctcgtgggtgcagctgataacttctgtgggcgtccagcagaatcatcccgggtggaccgtagctggccagtttcaagaaaaaaagcgttttaccgaagaagtgatcgaatatttccaaaagaaagtgtcacccgtgcatctgaagatactccttaccagcgatgaggcttggaaacggtttgtccgcgttgccgagctacctagatag

SEQ ID NO: 248045 - RNA, 2223 nt, synthetic construct
  misc_feature 1..2223: note = Description of Artificial Sequence: Synthetic coding sequence
  source 1..2223: mol_type = other RNA
atgacagtgaaactcgacttcgaggaatgtctcaaagactcgcctcgcttccgcgctagcatcgagctggttgaggctgaggtgtcagaactcgagactcgcctggagaaacttcttaaactgggcacaggactgctggagagcggacgccattatctagccgctagtagagcctttgtagttggaatttgtgatttggccaggctgggcccgccggaacccatgatggcagaatgcttggaaaaattcactgtcagcctgaaccataagctggatagccatgcagaactgctcgatgccacccagcacactttgcaacagcagatccagacactggtgaaggagggcctgagaggcttcagggaggcacggcgggatttctggagaggggccgagtcgttggaagcagctttaacgcacaacgcagaggtgcctagacgaagggcccaggaggctgaggaagccggcgccgcgctgagaacagcacgagcaggatatagaggtagagctctggactacgctctgcagatcaatgtcatcgaggacaaacgcaagttcgacataatggaattcgtactcagactggtagaagcacaggctacacactttcagcaggggcatgaagaattatcaagactgagccagtatagaaaggaattgggcgcccagctgcaccagttggttttgaattccgcacgcgagaagcgagatatggaacagcggcacgtgctcctgaagcagaaagaattgggtggagaagagccagaaccgtctttgcgcgaaggccctggaggactcgtgatggaagggcatctcttcaaaagagctagtaatgctttcaagacctggtcccgtagatggttcacgattcagtctaatcagttggtgtatcagaagaagtataaagatcccgtgacagttgtcgtagatgacctacggctgtgtacagtcaagctatgccccgacagcgagcgcagattttgctttgaagtggtaagtacctcaaaatcttgcctgttacaagctgattcggaacgccttttgcagctgtgggtatcagcagtgcagtcctctattgcctcggccttcagccaggcaagactggacgattctcccagaggacctggccagggtagtggacatttggcaattggtagcgcggccactcttggctcaggcggtatggcgcgcgggcgagagcctggcggggtgggacacgtcgttgcgcaagtgcagtcggtcgatgggaacgcccagtgctgcgactgccgcgagcccgctcccgaatgggcttcaatcaaccttggggtgaccctttgcattcagtgttctggaattcatcgaagcctgggggtgcatttttctaaggtgcgaagtctgacgctagatagctgggagcctgaattggtcaagctgatgtgtgagttaggaaatgtgataatcaaccagatttatgaagcccgcgtagaggcgatggctgtgaaaaaacctgggccaagctgcagtaggcaggagaaggaggcgtggatccacgctaagtatgtcgaaaagaagttcctgacaaagcttcccgaaatcaggggaagacgcggtggacgtggaagaccacgaggccagcctcccgttcccccaaagccgagtatcagaccccgtcctggcagcctgcgcagcaagcctgaaccccctagcgaggatctgggatcactccaccctggagcgttgttgtttagagctagtgggcaccccccatctttgcctacaatggccgatgctttggctcacggtgccgatgttaactgggtcaatgggggccaggacaatgccacccctctgattcaggcaaccgccgcaaattccctcctggcttgcgagttcttgctgcagaacggggccaatgtgaatcaagccgacagtgccggaaggggacccctgcaccacgctacaattcttggtcatacagggctagcctgcttgttcctcaaacgcggggccgacctaggcgcaagggattccgaaggtagagatccgctgacaattgccatggagacggctaatgctgacattgtgaccttactccgcctcgccaagatgcgagaagcagaggccgcccaaggccaggctggagatgagacatacctcgatattttccgggatttctccctgatggcgtcagatgaccccgagaagctcagccgccggtctcatgaccttcatactctgtag

SEQ ID NO: 248046 - RNA, 1290 nt, synthetic construct
  misc_feature 1..1290: note = Description of Artificial Sequence: Synthetic coding sequence
  source 1..1290: mol_type = other RNA
atgcaactgcggaaccccgagctgcatctgggctgtgcactcgccttgcgatttctggccttagtctcttgggatattcccggcgcccgcgctttagacaatggcctagctaggacccctacaatgggttggctgcactgggagcggttcatgtgcaacctcgactgccaggaggaaccagactcttgtatttctgaaaaattattcatggaaatggccgaattaatggtcagcgaaggctggaaggatgctgggtacgagtatctctgcattgacgattgctggatggcaccgcaaagagactcagaggggaggttacaggccgatccacaacgcttcccacatggcatcaggcagttggctaattacgtgcacagcaaaggcctgaagctgggcatctatgccgacgtcggaaacaaaacttgtgccggcttccccggctcattcggatactatgatatcgatgctcaaacatttgccgactggggagttgacttacttaaattcgacggttgctattgcgacagtctcgagaacctcgcagatggctacaaacacatgtccctcgccctcaatcgtactggccggtcaattgtttatagctgtgagtggcccctctatatgtggccgtttcagaaacccaattatacagagataagacagtactgtaatcattggaggaattttgccgatattgatgatagctggaaatcgataaagagcatcctagattggacatcattcaaccaagagagaattgtggacgttgctggtcctggcggatggaatgatccggatatgctggtaattggcaatttcggcctctcctggaaccagcaggtcacccagatggccttgtgggccattatggcagcccccctgtttatgagcaacgacctcagacacatttccccgcaggcaaaggcattgttgcaggacaaggacgttatagcaatcaaccaagatccactgggaaagcagggttaccaactgcgtcaaggagataatttcgaagtgtgggaacgtcccttgagtgggctcgcatgggctgttgctatgattaatagacaggagatcggtggtcctcgctcatacactattgcggttgccagcctgggcaaaggggttgcgtgtaatcccgcatgcttcataacacagctgttgccggtgaagcgcaaactgggcttctatgagtggaccagcaggctccggtctcacatcaatcctacaggcaccgttctcctgcagctagagaatacaatgcagatgtcactgaaagacctgctgtag

SEQ ID NO: 248047 - RNA, 1386 nt, synthetic construct
  misc_feature 1..1386: note = Description of Artificial Sequence: Synthetic coding sequence
  source 1..1386: mol_type = other RNA
atgcagcgcgttaacatgatcatggcagaaagtcctggccttatcacaatatgtcttcttggatacctgttgagcgcagaatgcactgtatttctcgaccacgagaatgcaaataaaatccttaatcgacctaagaggtataattccggcaaacttgaggagttcgtgcaaggcaatcttgaacgcgaatgcatggaagagaaatgcagtttcgaggaagccagagaggtatttgaaaacaccgaacgtacaactgaattttggaagcaatacgtggatggggaccagtgtgagtcaaacccatgtctgaacggagggagttgcaaagatgatatcaactcttacgagtgctggtgcccatttgggttcgagggcaagaactgtgaattagatgtgacttgcaatatcaaaaatggccggtgtgaacagttctgtaaaaactcagccgacaataaagtcgtctgctcatgtactgaagggtaccgcctggccgaaaatcagaagagctgtgaacccgctgtgccctttccgtgcggacgtgtctctgtgtcacagacctcgaagctgacgcgagcagagacagtgttccctgatgtggactacgtgaacagcacagaggcggagacgatactcgataacatcacacagagcactcagtcatttaacgattttacaagggtagtaggaggtgaggacgcaaaacccggacagtttccttggcaggttgtactgaatgggaaagtagatgcgttttgcggtggttcaatcgtgaacgaaaaatggattgtgacagccgctcattgtgtggaaactggagtgaaaataaccgtagtcgccggagaacacaacattgaagagaccgaacatacagagcaaaagcgcaacgttatacggatcattcctcaccataactataatgccgcaataaacaagtataatcacgacatagcacttctggaactcgacgagcccctggtactgaattcttacgtgacaccaatttgcatcgctgacaaagagtacaccaacatatttctaaagtttggtagcggatacgtgtcaggctggggtagagtgtttcataagggtcgttcagccctagttctgcagtacctcagagttccactggtcgatagagctacttgcttaagaagtacaaaatttactatctacaataacatgttctgtgccggctttcatgaaggagggagagactcatgtcagggagatagcggaggccctcacgttaccgaagtggaagggacgagttttttgaccggcataatcagctggggcgaggaatgtgcaatgaaaggtaagtacggcatctacactaaggtttccaggtacgttaactggatcaaggagaagaccaagctgacatag

SEQ ID NO: 248048 - RNA, 1365 nt, synthetic construct
  misc_feature 1..1365: note = Description of Artificial Sequence: Synthetic coding sequence
  source 1..1365: mol_type = other RNA
atgcctcgctgcccagctggcgccatggacgaaggtccggttgatctgcgcaccagaccaaaggcagcggggctgccaggagctgctttgcccctcaggaaacgcccactgcgtgccccatcacctgagcctgctgccccccggggagctgcgggcctagtggtaccactcgaccccctaagaggcggctgcgatctgcccgctgtacccgggccgccgcatggattggcaagacccgaagctctctattaccccggagcactgttacccctgtacccaacccgggccatggggtcccccttccccctggtcaatctcccaactccactttaccctatgatgtgccccatggagcatccgctcagtgccgatattgccatggctacacgggcagacgaagacggagacaccccactgcatattgccgttgtgcaggggaatctgccagctgtacacagattggtgaatttgttccagcagggagggcgcgaactcgacatttacaataatttaagacaaactccccttcaccttgctgtaattaccaccttgccctcagtggtgagattactcgtgacagcaggtgccagcccaatggccctcgatcgacatggccagacagctgcccacctggcctgcgagcaccgctctcctacctgcctgcgtgcacttctggatagtgccgcccccggtacactggacctagaagcccggaactacgacgggcttaccgctcttcacgtggcagtgaatactgagtgccaagaaacagtgcagctcttgcttgaacggggcgcggatattgacgcagtggacatcaaaagtggaagaagcccgctgatccacgcagtcgagaataactctctgagcatggtgcaactgttactgcaacacggtgcaaatgtgaacgcccaaatgtactcagggtcaagtgctctgcatagcgcgagtggtagggggctgctcccccttgtgagaacccttgtaaggagtggggctgacagttctctgaaaaactgccataacgacacacccctcatggttgcacgcagcagacgcgtcatcgacatcctaagagggaaagctactcggcctgccagcacaagccagccggacccatcccccgaccggtcagcgaacacttccccagaatccagcagtagactttcttccaacggccttctctcagcaagccccagcagtagtcctagtcagagtccgccccgggaccctccaggatttcccatggcaccaccaaacttttttttgccctcccccagtcctcccgcatttctgcctttcgccggggttctccgcgggccaggaagaccagtaccgccttctcccgcacccggcggatcttag

SEQ ID NO: 248049 - RNA, 417 nt, synthetic construct
  misc_feature 1..417: note = Description of Artificial Sequence: Synthetic coding sequence
  source 1..417: mol_type = other RNA
atgaaggaatactcaggttttgccggggtcagtaggcccagaggaacattctttcggatcagagggcgggggcgagctcgaggtgtgttcgcgggcactaatacaggtcctaacaatagtaataccacttttcaaaaacggccaaaggaagaagagtgggatccagaatatactcccaaatctaaaaagtacttcctccacgacgatcgagacgacggtgtagattattgggctaaaagaggtagaggcagagggacattccagcgaggaaggggtagatttaatttcaagaagagcggatcatcaccaaaatggactcacgataaataccagggggatggcatcgtggaggatgaagaagagacaatggagaataacgaggagaagaaagaccggcgtaaagaagagaaggaatag

SEQ ID NO: 248050 - RNA, 1530 nt, synthetic construct
  misc_feature 1..1530: note = Description of Artificial Sequence: Synthetic coding sequence
  source 1..1530: mol_type = other RNA
atgaccgtcacctacacagcacgcgtcgccaacgcacggttcggcggattcagccagctgctgttgttatggcgtggtagtatttataagctactttggagggaactcctgtgctttctcggtttctatatggccctctctgccgcctacagatttgttcttacagaaggccagaaacggtacttcgagaagctcgtcatttactgtgatcagtatgccagtctgattcctgtgagttttgtgctgggattctatgtgaccctcgtggtcaatcgctggtggtcgcagtacctgtgcatgcccctccctgacgcacttatgtgcgtggtggccggcaccgtgcatgggcgagatgaccgcggcaggctgtacaggcgcaccctgatgcgctatgcaggtctatccgccgtcttgatcctgcgtagcgtgtccaccgctgtgttcaagcgatttcctacaattgatcatgttgttgaagcaggatttatgaccagagaagaacgcaaaaagtttgagaacctcaattcatcatataacaaatattgggtcccttgcgtgtggttcagtaacctggcagcgcaggcacgtcgggaaggacggatccgagataacagcgcccttaagttgctgcttgaagagctgaatgtgttccgtggcaaatgcggcatgctctttcactatgactggatcagtgttccactcgtttacacgcaggtcgtcaccatcgccctttattcttatttcctagcttgtttaatcggccgccagttcctagatcctgctcagggttataaagatcacgacctcgatttgtgcgttcctatcttcaccctactgcagtttttcttttatgccggatggctgaaagtagcggagcagctgattaatccgttcggagaagacgacgacgattttgagaccaactttctcattgaccggaactttcaagtttccatgcttgctgtcgatgagatgtatgatgacttggctgttttggagaaggatttgtactgggacgcagccgaagcccgagctccctataccgctgccactgtgttccagctgcgacagccaagtttccaggggtccacttttgatattacacttgcgaaagaggatatgcagttccaaaggttagacggactggacggccccatgggcgaagctccaggcgactttctccagagactgcttcctgccggggcaggtatggtggctggcggaccacttggtcggagactgtctttcctcttaaggaaaaattcatgtgtcagtgaagcctccacgggtgcatcctgctcctgtgctgtcgttcctgagggagcagctcctgagtgttcatgcggggaccctctgttggacccaggattgcccgagccagaggctcccccccctgccggtccagaacccttgactctcatccccggaccagtcgagccattctccatagtgacgatgcccggcccacggggccccgcccctccatggttgccatcacccatcggcgaagaggaggagaacttagcgtag

SEQ ID NO: 248051 - RNA, 306 nt, synthetic construct
  misc_feature 1..306: note = Description of Artificial Sequence: Synthetic coding sequence
  source 1..306: mol_type = other RNA
atgtcccgatccgttgccctcgctgtcctcgcccttttatctttgagcggacttgaagccattcagcgaacccctaaaatccaggtatactctaggcacccggccgagaacgggaagtccaattttctgaattgctatgtcagtggttttcacccttctgacattgaggttgacctgctgaagaatggcgaacgcatcgagaaggtcgagcactctgatttaagcttttcaaaagactggtccttttatctgctgtactatactgagtttactccaactgaaaaaatgtccatgccagcggtgtag

SEQ ID NO: 248052 - RNA, 369 nt, synthetic construct
  misc_feature 1..369: note = Description of Artificial Sequence: Synthetic coding sequence
  source 1..369: mol_type = other RNA
atgtccagatccgtggcacttgccgtgctcgcattactctccctgtcaggcctcgaggctatccagagaacgccgaaaatccaggtctacagtcgacatccggcggagaacggaaaatcaaacttcttgaactgctacgtctcaggatttcatccaagcgacatcgaggtggacttgcttaagaatggagaacgcattgaaaaagtcgaacacagcgacctaagtttctctaaagattggtcattctatctgctttattatacagaatttacgccaacagaaaaagacgagtacgcatgtagagttaaccacgtcacattgagtcaacctaagatcgtgaagtggggaaaaagctacatcctcctgtag

SEQ ID NO: 248053 - RNA, 360 nt, synthetic construct
  misc_feature 1..360: note = Description of Artificial Sequence: Synthetic coding sequence
  source 1..360: mol_type = other RNA
atgagccgctctgtggccctcgccgtacttgccctcctttctctgagtgggctcgaggcgatccagcgaaccccaaagatacaagtctattccagacatcccgcagagaacggtaaatctaattttctaaactgttacgtctctggctttcacccctctgatattgaggtagatttgcttaaaaatggagaacgtattgaaaaagttgaacattcagacctatcgttcagtaaagactggtctttttacttgttatattataccgagtttacaccaactgagaaggacgagtatgcatgtcgagtcaaccacgtaactttaagtcagccaaaaatcgtgaaatgggacagagacatgtag

SEQ ID NO: 248054 - RNA, 369 nt, synthetic construct
  misc_feature 1..369: note = Description of Artificial Sequence: Synthetic coding sequence
  source 1..369: mol_type = other RNA
atgtcgaggtcagtggccctggctgtgctagccctgctgtccctttccggactagaagctatccaaaggacgccaaagattcaggtctattcacgacatcctgccgagaacgggaaatctaactttttaaactgttatgtgagtggattccatccatccgatatcgaagtcgaccttctcaagaatggagaacgcatagagaaagtcgagcactccgatctgagtttttctaaggactggtccttctatctcctctactataccgagttcacccccactgagaaagatgagtacgcatgccgggttaaccatgtcaccctgtctcagcctaaaatcgtcaaatggggaaaatcttacattctcctatag

SEQ ID NO: 248055 - RNA, 360 nt, synthetic construct
  misc_feature 1..360: note = Description of Artificial Sequence: Synthetic coding sequence
  source 1..360: mol_type = other RNA
atgtcacggtctgtagcactcgcagtgttggcccttctgagcttatctggtcttgaagctattcagcgcacgccaaaaatacaggtgtacagtcgacatcctgctgagaatggcaaaagcaattttctgaactgctacgtgtctggcttccacccatcagatatagaagtcgatcttctcaagaacggcgaaagaatagagaaggtggagcacagtgatctatctttttccaaggattggtctttttacttgctttactatacagaatttaccccaacagaaaaggacgagtatgcatgcagagtaaaccatgtcaccctgagccagccaaagatcgtgaaatgggatcgggacatgtag

SEQ ID NO: 248056 - RNA, 360 nt, synthetic construct
  misc_feature 1..360: note = Description of Artificial Sequence: Synthetic coding sequence
  source 1..360: mol_type = other RNA
atgagccgctccgtcgcactcgccgtcctggcccttcttagtttgtctggtttggaggctatccaaaggacccccaagatccaagtttacagtcgccaccctgctgagaatggaaagagcaatttcctcaattgctacgtttcaggctttcatccttccgatatcgaggtcgatctactcaaaaatggggaacggattgaaaaggtggagcacagcgacctgtctttttcaaaggactggtccttttacctgttatactataccgaatttactccaaccgagaaagatgagtatgcatgtcgggtcaaccacgtaacactgtctcagccaaaaatcgtcaaatgggatcgggatatgtag

SEQ ID NO: 248057 - RNA, 1536 nt, synthetic construct
  misc_feature 1..1536: note = Description of Artificial Sequence: Synthetic coding sequence
  source 1..1536: mol_type = other RNA
atgagcagaggtccagaagaagtgaaccgcttgactgagtcaacttaccgcaatgtgatggagcaattcaatcctggcttgaggaacttaattaacttgggaaagaactacgagaaagctgttaacgccatgatcctcgctggtaaagcctactacgatggggtggccaaaattggggagatagctacaggttcacccgtgagcacagaactgggccacgttttaattgaaatcagctccacccataaaaagctgaatgagtctttagatgagaatttcaaaaaattccacaaagagattatacacgagttagagaaaaagattgagctggacgtcaagtatatgaacgctactttgaagaggtatcagacagaacacaagaataagttagagtctttggagaaaagtcaggctgaactgaaaaaaatccgacggaaaagtcagggatctcggaacgccctcaaatatgagcataaggagatagaatacgtggagactgtcacctctcgacaatccgagatacagaagttcatcgccgatgggtgcaaggaggcccttcttgaggagaaacgtcgtttttgctttctggtggacaaacactgtggcttcgctaaccacatacactactaccatctgcaatctgctgagctgctgaattccaaattgcccagatggcaggaaacatgcgtagacgcgatcaaggtgcctgagaaaataatgaacatgatagaagagataaagacccctgcctctaccccagtgagcggcacaccccaagcttctcctatgattgagagaagtaacgtcgtgaggaaagattatgatactctgtccaagtgttccccaaaaatgcccccagccccctccggacgagcctatacttcacctctgatcgacatgtttaacaaccccgctacagccgccccaaactcccagcgtgttaacaactcaactggtacatccgaagacccctctctacagaggagcgtgagtgtcgctacaggcctgaatatgatgaaaaaacagaaagtgaaaaccatcttcccccacaccgcaggttcaaataaaacactgctgtctttcgcgcaaggcgacgtcatcaccctgctgatccctgaggagaaggatggatggttgtacggcgaacacgacgtgtccaaggctcgcggctggttcccatctagctatacaaagctcctggaagagaacgagaccgaagccgtgacagtacctactcccagccccactcccgtgagaagcataagcacagtcaacttaagcgaaaattcaagcgtggtgatcccaccccccgactatctggagtgtcttagtatgggcgccgccgccgacaggagagctgacagtgccagaaccacaagtaccttcaaggccccagcatctaagccagagacagcagctcctaacgacgcgaacggaacggctaagccaccctttctctctggggaaaatcccttcgcaaccgtgaagctgcgtcctacagtcacaaatgatcgcagcgccccgattatccgatag

SEQ ID NO: 248058 - RNA, 1809 nt, synthetic construct
  misc_feature 1..1809: note = Description of Artificial Sequence: Synthetic coding sequence
  source 1..1809: mol_type = other RNA
atgcactccaaggttacgatcatttgtattaggtttttgttttggtttctgctcctgtgtatgctgatcgggaaatcccatacagaagacgacatcattatcgccacgaaaaacggcaaagtccgggggatgaatctgacagtctttggtggtaccgtgactgcgttcctcggaataccgtacgcccagccccccttgggccggctccgattcaagaagccccagtccctgactaaatggagcgatatctggaacgccactaagtacgcgaacagctgctgccagaatatcgatcagtccttcccgggctttcatggaagtgagatgtggaatcctaatactgacctttccgaggactgtctgtacctgaacgtatggatacccgcaccgaaacccaagaacgctactgtcttaatttggatttacggcgggggatttcagaccggcacaagctcactccatgtatacgatggaaaatttctggccagggtggaacgtgtgattgttgtttccatgaactacagggtaggagctctaggctttctcgcccttcccgggaatcccgaggcccccggaaatatgggtctgttcgatcagcagcttgcactgcagtgggtgcaaaagaacatcgctgcgtttggagggaatccaaagtccgttactctgtttggagagagtgccggagcagcctctgtgagcttgcacctgctctccccaggcagccactccctgtttacccgggccattctccagagcggatcctttaacgcgccttgggctgtgactagtttgtatgaagcccggaaccgcaccctgaacctcgcgaagttaactggctgtagccgcgagaacgagactgaaatcatcaaatgtctgaggaacaaagaccctcaagagattttactcaatgaagctttcgtggtgccttatggcacacccctgtctgtcaattttggacctacagtcgatggcgatttcctaactgacatgcctgatatcttactcgagctggggcagttcaagaagacacaaatccttgttggtgtgaacaaggacgaaggcactgctttcttggtgtacggcgcaccgggcttctccaaagataacaacagcatcataactagaaaggaatttcaggaaggcctcaaaatattttttccaggagtatctgaattcggaaaagagtccatcttattccactatactgattgggtcgatgaccaacgtccagaaaattaccgagaggcattaggcgacgtcgtcggggattacaattttatttgtcccgccttggagttcacaaagaagttctctgaatggggaaacaatgcattcttttactattttgagcataggtcgagcaaactcccatggccagaatggatgggcgttatgcacgggtacgaaattgaatttgtctttggcttgccattggaaaggcgggacaactataccaaggctgaggagatcctatccagatcaatcgtcaagagatgggctaactttgccaaatatggcaacccaaacgagacccagaacaatagcacgagctggcccgtatttaagtccacagaacagaaatacctaacactgaataccgagtctacaaggataatgaccaagctcagggctcaacaatgcaggttttggacgagtttctttccaaaggtactggagatgacgggaaatattgacgaagcagagtgggaatggaaggctggtttccacagatggaataattacatgatggactggaagaatcagtttaatgactacacaagcaaaaaggaatcatgtgtcggactgtag

SEQ ID NO: 248059 - RNA, 399 nt, synthetic construct
  misc_feature 1..399: note = Description of Artificial Sequence: Synthetic coding sequence
  source 1..399: mol_type = other RNA
gccgtccaattcacaggctggagctcatcctgcattttacactttcctgaagtcctgcatgattttcacagcttgcagaccctgcctagtctcctccaaagaataggcaaccctaacgagacgcagaataattctacatcctggcccgtatttaaatccactgaacagaaatacctgaccttgaatactgagagcactcgcattatgacaaaactccgcgcacagcaatgccgattctggacaagtttctttcccaaagttctggagatgacagggaacatcgatgaggccgaatgggagtggaaggcgggtttccaccggtggaacaactacatgatggattggaaaaaccagtttaatgattatacctcaaaaaaagagagctgtgtggggctctag

SEQ ID NO: 248060 - RNA, 195 nt, synthetic construct
  misc_feature 1..195: note = Description of Artificial Sequence: Synthetic coding sequence
  source 1..195: mol_type = other RNA
atgacaaagctgagagcgcaacagtgccgtttctggacttcgttctttcctaaagttcttgagatgaccggaaatatagacgaggcagaatgggaatggaaagccgggtttcaccgatggaacaattatatgatggactggaaaaatcagttcaacgactacactagcaaaaaggagagctgcgtaggactctag

SEQ ID NO: 248061 - RNA, 2499 nt, synthetic construct
  misc_feature 1..2499: note = Description of Artificial Sequence: Synthetic coding sequence
  source 1..2499: mol_type = other RNA
atgattctgcaggctcatctgcactccctctgtctcctcatgctttatttagccacaggttatggacaggaaggaaaattttcaggccccctcaagcctatgaccttcagtatatacgagggccaggagcctagccagatcatattccagttcaaagccaatccacccgctgttactttcgagctgactggcgaaactgataacatctttgtgattgagagagaggggttgctgtattataatcgtgctctcgaccgggagacccgctcaacacacaacctccaggtagccgccctcgacgctaacggaataattgttgaaggcccagtccctatcaccattaaagtcaaggatatcaatgataatcgtccgacatttctgcagagtaaatacgagggctcagtgaggcaaaactccagaccaggcaagccattcctgtacgtaaatgcgactgacctggacgatccagcaactccaaacggacaactttactatcaaatcgttattcagctgcccatgataaataatgtgatgtacttccaaataaacaacaagacaggggctatttcactgaccagagagggaagccaggagctcaatcctgcaaaaaacccgagctataaccttgttattagtgtaaaggacatgggcggacagagcgagaactccttctccgacactacttctgtggatatcatcgtgactgagaacatatggaaagccccaaaaccggtcgaaatggtggaaaactccactgatccgcacccaattaagattacccaggtaaggtggaacgatcctggagcccaatactcacttgtcgacaaggagaaactgccccggttcccgttcagcattgatcaggaaggagatatctacgttacacagccgctggatagggaagaaaaggacgcttatgtcttttatgcagttgccaaagatgagtacgggaagccactcagttatcctctggaaatccacgtcaaggtcaaggacatcaatgacaatcccccaacatgcccaagtcctgtcactgtgtttgaagtgcaagagaatgagcggctgggcaactccatcggcacacttaccgcacacgacagagacgaagagaatacagcgaactcattcttgaactatcggatagttgaacagactcctaaattgcctatggacgggctgtttttaatacaaacctatgcaggcatgcttcagctggcgaagcaatctttgaagaagcaggacacacctcagtacaatctcacgatcgaagtgtcagataaggattttaagaccctctgctttgtccagatcaacgtcatcgacatcaatgatcaaatcccaatttttgagaagagtgactatggaaaccttaccctagccgaagacacgaacatcggtagcaccatactgaccattcaggctactgatgctgatgaaccgttcaccggatcgtctaaaatcctgtaccacatcattaagggcgacagcgaaggaaggctgggcgtggataccgatccacacacaaacacgggatacgtaatcataaaaaagcctctggatttcgaaaccgccgccgttagtaatattgtatttaaggccgagaaccccgagccactggtatttggggtcaaatataacgctagttcctttgcaaagtttaccctcattgtcaccgacgtcaacgaggcgccacagttctctcagcacgtttttcaggccaaagtcagcgaagacgtagccataggcaccaaagtcgggaatgtgacagctaaagaccccgagggactggacatctcttattctctgaggggcgacacacgcgggtggcttaaaattgatcacgtgactggcgagatttttagtgtcgctcccctagatagggaagccgggagcccatacagagtgcaggtggtcgcgactgaagttggcggatcttcgttatctagtgtgtccgaatttcatctcattcttatggatgttaacgataatccccctcgactggcgaaagactatacaggccttttcttctgccaccctttaagtgcccccggctctctcattttcgaggcaacagatgacgatcagcatctgtttcgcggcccccatttcacgtttagcttaggatccggatcgctccaaaatgactgggaggtgtctaaaatcaacggtactcatgccagactgtcgacacgccacaccgagttcgaggagagggagtatgttgtattgataagaataaatgacggtggccgcccgcctctggaagggattgtgtcactgcctgtcactttctgctcttgcgtcgaaggaagttgttttaggcccgctgggcaccaaactggaatcccaacggtgggcatggcggtcggcattctgttaacgacactgctggtaatcggtattatcctcgctgtggtttttattcggatcaaaaaggataagggcaaagataatgtagagagcgctcaggcttctgaggtgaagccccttcggtcctag

SEQ ID NO: 248062 - RNA, 795 nt, synthetic construct
  misc_feature 1..795: note = Description of Artificial Sequence: Synthetic coding sequence
  source 1..795: mol_type = other RNA
atgacaaagttttcttccttctctctctttttccttattgtgggggcctatatgacgcatgtatgctttaatatggagatcataggaggaaaagaagtttcaccacattcccgcccctttatggcatctatccaatacggaggccaccacgtgtgcgggggagtgctcatcgatccacaatgggtcctgaccgccgctcactgccagtatagattcaccaaaggccagagcccaactgtggttctaggggcccattccctttcaaaaaatgaggcctcgaagcagaccctcgagatcaagaaatttatccccttctcccgggtgaccagcgatccacaatctaatgacataatgctcgtaaagttacagacagccgccaaacttaataagcacgtgaaaatgctccatatccgatctaaaacaagtctgaggtcaggaacgaagtgcaaggtcaccggttggggagcgacagaccccgattcccttcgtcctagcgataccctccgggaagtcactgtgaccgtcctatctagaaaactgtgtaattcccagtcgtactacaacggagacccatttatcaccaaagacatggtgtgtgctggcgacgccaaaggccagaaggatagttgcaagggggacagcggcggcccccttatctgcaaaggcgtttttcatgcgatagtgtcaggcggccacgaatgcggcgtggcaaccaagccaggcatttacactttacttactaaaaaatatcagacatggattaagagtaatctagtgcctcctcacactaactag

SEQ ID NO: 248063 - RNA, 9939 nt, synthetic construct
  misc_feature 1..9939: note = Description of Artificial Sequence: Synthetic coding sequence
  source 1..9939: mol_type = other RNA
atgatggcgcggaggcccccttggagggggctcggcggcaggtccaccccaatcctgctgctcttgctgctgtccctgttccctttgtctcaagaagaactgggcggcggaggacaccagggttgggatccaggactggccgcaactaccgggcctagggcgcacatcgggggtggggcactcgcactgtgccccgaaagctcaggtgttagggaagatggcggtccagggctcggagtcagggagcccatctttgtgggactgaggggaaggagacagagcgcaagaaatagtcgtgggccaccagaacagcccaatgaagaactaggaatcgaacatggtgtccaacccctcggctctcgggagcgcgaaacaggacaaggacccggaagcgtgctctactggcggccagaggtctcgtcttgtggcagaactggccctctacagcgaggaagcttaagccctggcgccctctcctctggcgtccccggctcaggtaatagttcccccctaccctcagatttcctgattcgccatcacggacccaagcctgtcagcagccagaggaatgctggaacgggatcacgcaagagagtcggaaccgctcgctgttgcggtgaactgtgggcaaccggttccaagggccaaggcgaaagagcaacaacctcaggggccgaaaggactgctccacggcggaattgcctgcccggcgcatctggctcaggacctgaactggattccgcacctcgcactgctcggaccgccccagcctccggctctgcacccagggaatctcgaacggctcccgaacctgccccaaaacggatgaggtcacgtggcctgttccgctgtaggttcctgccgcagcggcctggaccccgccctcccggattgcccgctcggccagaggcccgaaaagtgacatctgccaatagggctagattcagacgggcagcgaacagacaccctcagttccctcagtacaattaccagacactggtcccggaaaacgaagccgccggaactgccgtgctcagagttgttgctcaggatccagacgctggtgaagccggtagattagtctattccctggctgcactcatgaactcccggagtctggaactgttttcaatagacccccagtctggactgatcagaaccgcagctgccctggacagagagagcatggaacgccactatcttagagtgacggcgcaagatcacggatctcccaggctgtccgccaccaccatggtcgcagtgacggttgccgatcggaatgatcatagtccggttttcgagcaggctcaataccgagaaactctgagagaaaacgtggaggaaggatatccgatcctacagctcagagctactgacggtgacgcacctccaaacgctaatctgaggtaccggtttgtgggaccccctgcagccagagctgcagctgccgcagcatttgaaatcgacccgcgtagtggattgataagtaccagcgggcgggtcgaccgtgaacacatggagagttacgagcttgtcgttgaggcttctgatcagggccaggaacccgggcctcgttcagccacagttcgggtccacatcacggttttggatgagaacgataatgccccacagttcagcgaaaagcgctatgtcgcacaggtccgggaggacgtccggccccacacagtcgtgttgcgcgtgaccgccaccgacagagacaaggatgccaacgggcttgtgcattacaacattatctcagggaactctcgtggccactttgccatcgactccctgaccggcgagattcaggtggttgctcccctggatttcgaggcagaacgtgagtacgcactgcgtatacgggcccaggacgccgggaggccacctctgagcaataacacaggcctggcttctatacaggtcgtagacatcaatgaccacatccctatctttgtttctactccattccaggttagcgtcctggaaaacgctcctctggggcatagcgtgattcacatacaggctgtcgacgcagatcacggagaaaacgctaggctggaatactccttaactggcgttgctcccgatacaccttttgttattaattcagccactggctgggtcagcgtgagcggccccctcgaccgggaatccgtcgaacactattttttcggcgtggaagcaagagatcacgggtctcccccattgtctgcgtccgctagcgtaacggttacagtgctggatgtgaacgacaacagaccagagtttaccatgaaggaataccacctccggttgaacgaggatgccgcagtcggcacctctgttgtgagtgtgacagctgtagatcgcgatgccaacagcgcaatctcctaccagatcaccggaggaaatacacgcaatcgtttcgctatcagcacacaaggaggggtgggactggtaactctggcactgcctctggattacaaacaagagagatattttaagctggttctgacagcttccgaccgcgctcttcacgatcactgttatgtacatattaatatcactgatgccaacactcatcgccctgtctttcagagtgcccactatagcgtgtccgtcaatgaagatagacctatgggatcaacgatcgtcgttatctccgcgagtgacgacgacgtgggtgagaatgctcgaataacctacttgcttgaggacaatcttccacaatttcgcatcgatgccgactccggcgctatcactctgcaggccccactggattacgaggaccaagttacctacactctcgcaatcaccgcccgtgacaacggaatcccacagaaagccgacaccacttatgtcgaggtcatggtaaacgacgtgaacgataacgcacctcagttcgtggcgagtcattatacaggactcgtgtccgaagacgctcccccttttacctccgtgctgcagatctccgcaacagatagggatgcacatgctaatgggcgagtccagtacacgtttcagaatggagaggacggggatggagacttcaccattgagccaaccagcggcatcgtgagaacagtccgaagactcgaccgcgaggcggtgagcgtgtacgagctgacggcctatgccgtcgatagaggcgttcctccactgaggacacctgtgagcatccaggtaatggtccaagacgtgaatgataatgcacccgtgttccccgccgaagaattcgaggtgcgagtcaaagaaaacagcatcgtagggtcagtggtcgcacagatcacggccgttgaccctgatgaagggccaaatgcccatattatgtaccagatcgtcgagggaaatatccccgagctgttccagatggacatattctcaggggagctgactgccctgatagacctcgattatgaagcacgccaggaatatgtaattgttgtgcaggcgacctcagccccccttgtgtcacgtgccaccgtacacgtgaggcttgtggatcaaaatgacaattccccggtgctgaacaactttcagattctgttcaacaactacgtgtccaaccgtagcgataccttcccaagcggcatcatcggtaggattccagcttacgaccccgatgtgtcagaccatctgttttactcctttgaacgcggaaacgaattgcagctgctggtagtgaatcaaacatctggggagcttcggctgtcccggaaactcgataacaaccgcccgctcgttgcctctatgctcgtgacggtcacagatggcctgcactctgtgactgcccagtgcgtactacgcgttgtgatcatcactgaggagttactggccaactcccttaccgttagactagagaacatgtggcaggagcggtttctgtcacccctgcttggaaggttcttagaaggcgtggccgccgtgctggccacccctgctgaggatgtgtttatttttaatatccagaacgacaccgacgtcggcgggacagttctaaacgtcagcttttccgctttggctccacgtggagccggagccggcgctgccggtccctggttttcatcggaggaacttcaggaacagttatatgtcaggagagctgccctcgccgcgcgatctttactggacgtgcttcctttcgatgataacgtttgtctccgggaaccttgtgagaactatatgaaatgtgtgtcagtgctcaggttcgactctagcgcccccttcctcgcctctgcttctacactgtttcgtccaatacagccaattgccgggctgaggtgtcggtgccctccggggttcactggggacttttgtgaaactgagctggatctttgctattccaatccgtgtcgcaatggcggagcttgcgcacgccgggaaggaggctatacctgtgtctgccgacctcgatttacaggagaggattgtgagcttgataccgaggcaggccgctgtgttccaggcgtatgtagaaacggcgggacatgtaccgacgctcctaatgggggcttcaggtgccaatgcccagccggaggtgcatttgagggaccccgatgcgaggtagctgcaaggagttttccaccctcctcgtttgttatgtttagaggtctgaggcaaaggttccatttgaccctgtccctgtccttcgctaccgtgcaacagtccggactgttgttttacaatggccgtctgaatgaaaaacatgactttcttgcactcgagctggtagcggggcaggtgagactcacatatagcaccggggagagcaatactgtggtctcccccacagttccaggcgggctgtccgatggccagtggcataccgtacatttgcgctactataacaaaccacgcaccgatgcactgggcggagctcagggacctagcaaggataaagtcgcggtgctgagcgtagacgattgtgatgtggccgtggcactgcagtttggggctgagattgggaattattcctgtgcagctgccggcgttcaaactagcagcaaaaaatcactcgacctgaccggccctctcctgctcggtggagttccaaacttgcccgagaattttcccgtatcccacaaggattttattggctgcatgagagacttgcatatcgacggtcgccgagttgatatggcggccttcgtggctaacaatggcacgatggctggttgccaggccaagctccatttctgcgactcaggaccgtgtaaaaactctggcttttgctctgaacgctgggggtcattcagctgcgattgtccagtaggtttcggcggaaaggattgtcaacttacgatggcacacccccaccattttaggggtaacggaacattaagctggaacttcggttctgatatggcggtgtctgtaccatggtacctgggactggccttccgcacacgggccactcagggagtactaatgcaggtccaagcaggtccccattccacactgttgtgtcagttggaccgtggattactgagtgtaacagtcacgaggggaagcggtcgggcatctcatctgctgttagaccaagtcaccgtttcagacggccgctggcatgatctgagactggagctgcaggaagagcccggaggccgccggggccaccacgttctcatggtgtctctggacttctcactgttccaggatacgatggcagtcggatccgaattgcagggcctgaaggttaagcagctccacgtcggaggactgccacctggcagcgccgaagaagcgcctcaaggcctggtcggttgtattcagggagtctggttaggcagcaccccaagcggatctccagctttgcttccaccttcacacagagtaaatgcggaacctgggtgtgtggtcactaacgcatgtgcctccggcccttgtccccctcatgcagactgccgggatttgtggcagaccttttcatgcacatgtcagccgggttactacggaccggggtgtgtagatgcttgcttgcttaatccgtgtcagaatcagggctcgtgcaggcacctgccaggggctcctcatggttacacgtgcgattgtgtagggggttacttcgggcaccattgcgaacataggatggatcagcaatgtccccgtggctggtggggcagcccaacatgcggaccatgcaattgtgatgttcataagggctttgacccaaactgcaacaagaccaacggtcagtgtcattgcaaagaattccactatcgacctcggggctctgattcctgcctgccctgcgattgttatccagtaggctcaacatcccgcagctgcgctcctcactctggacagtgtccttgcagaccaggggctctcggtaggcagtgcaacagttgcgattcaccttttgctgaagtgaccgccagtggctgcagggtgttgtacgacgcatgcccaaaatctctgcgaagtggtgtgtggtggccccagaccaagtttggcgtgctggcaacagttccttgccctcgaggggcattgggggcagcagttcggctctgtgacgaagcccagggatggcttgagcccgacctgtttaattgtaccagcccagcctttcgcgagctgagccttctcctcgatgggctcgaactgaacaagactgcgctcgatactatggaggccaaaaagttggcccagcgccttcgagaggtcactgggcatactgatcactacttttcccaggatgtgcgggtgacagccagactcctggcgcatttactagcattcgaaagccaccaacagggctttggtttgaccgccacacaggatgcccattttaatgaaaatctcctttgggctgggagtgcccttttggccccggagaccggggatctctgggctgcactcgggcagagagctcctggcgggtcaccagggtctgccggcctggtcaggcacttagaagagtatgccgccacgcttgctcgtaatatggagctaacgtacctgaaccctatgggcttagtgacacccaacattatgctctctatcgatcgcatggagcacccatccagccccaggggggctcgccgctatcctaggtaccacagcaacctgtttagggggcaggacgcatgggatccccacacacatgttctcttgcctagccagtccccccggccctctccgagcgaagtgttgcccacatcatcgtccatcgagaattctaccactagttctgtggtacccccgccggcgcccccagagcctgagcccggaattagcataatcatcctgttggtgtataggacattaggcggactcctccccgcacagtttcaggcagagcggaggggggctagattgcctcagaaccctgtaatgaactcacctgtggtgtcagtagctgtgttccatggccgaaactttctgagaggtattcttgagagcccaatttctctggaatttagattactgcaaactgccaacagatccaaggctatatgcgttcagtgggatccaccagggttagccgagcagcatggagtttggacagcccgggattgcgagctggtccacaggaacggatcccatgcgcggtgtaggtgctcccgcactggcacgttcggagtgctcatggacgcatctcctcgagaacggcttgagggtgatctggagttacttgccgttttcacacatgtcgtggtggctgtaagcgtcgccgcccttgtgttgaccgcggcgatcctcctatccctgaggtcccttaagtccaacgttcggggcattcatgcaaatgtggcagccgcgctcggcgtcgccgagctcctattcctcttggggatccatcgaacccacaaccaactagtttgcactgcagtcgcaatcttgctgcactatttctttctttctacatttgcatggctgttcgtgcagggactgcatttataccgcatgcaggtggagccgaggaatgtcgatcgtggagcaatgagattctatcacgccctaggctggggcgtgcccgcagttctcctggggctggccgtgggactcgatcccgaaggatatgggaatccagatttttgttggatttctgtccatgagcccctgatatggagttttgctggtcccgttgttcttgttatcgtgatgaacggaaccatgtttcttctggcagcacggactagttgcagtacgggtcagagagaagcaaaaaagacaagcgccctaactctgcgcagtagctttctgctgctgctgttagtctcggccagctggctgttcggactgctggcagttaaccattccatcctggcgtttcactatctccatgccggtctctgcggcctccaggggctggctgtcctgctgttattctgcgtactaaatgccgacgcccgggcggcttggatgccggcgtgcctaggcagaaaggcagctccggaagaagcccgtccagctcccggtctagggccaggcgcgtacaataatacagcgctttttgaagaatccggattgatccggatcacactcggtgccagcactgtatctagcgtgagctccgcaaggagcggcagaacacaggaccaggactctcagcgtggaaggtcttatttaagagataatgtactagtccggcacggctccgccgctgaccacaccgaccacagcctgcaagctcacgccgggccaacagacctcgacgtggccatgtttcacagggacgctggagccgatagcgatagcgactcagacctcagcctggaagaggaacggagcctgtcaatcccatcatctgaatccgaagacaacggccgtacgagaggcaggttccagcgaccactatgtagggctgcgcagtcagagaggcttctgacccacccgaaggacgtagacgggaatgatctcctgtcatattggcctgcattaggtgagtgcgaggctgccccttgcgcactccagacatggggctccgaacggcgcctgggcctggacacctctaaagacgcagccaacaataatcaacccgatcccgccctgacaagtggggatgagaccagcctcggccgtgcccagcgtcagcgcaagggcatccttaagaatcggctgcaatatccactcgtgcctcagaccagaggcgctcctgagctctcctggtgtcgcgcagcgactctggggcatcgggccgtccctgccgcttcttacggaagaatctatgccgggggcggtaccggatctttgagccagccggcctctcggtacagctctcgtgagcagttagaccttctactgaggcgacaattgagtagagaacgcctggaagaggcccctgctcctgtactgcggcccctgagcaggcctgggagtcaggaatgtatggacgcagcccctgggaggttggagcccaaagatcgtggatccacactgcctaggcggcagccaccccgtgactatccgggtgcaatggctggtaggtttggctctcgagacgctctcgacctaggcgctccccgagaatggctctcaactctgccgccgcccagaagaacaagggacctcgatccacagcccccacctctgcctctcagcccccagcgtcagctgagcagggatccgctgctacccagcaggcccctcgattctctgtcaaggtctagtaatagtagggagcagcttgaccaggtgccttcacgccatccgtctagagaagcccttggaccgttacctcagttactgagggcgagggaagactcagtgtcagggccatctcacggaccgtccacagaacaactggatatccttagctctattcttgcttcctttaattcctcagcactgtcttcggtgcagagttccagcaccccattaggacctcacactactgctactccatctgccaccgctagtgtgctcggccctagtaccccccggagcgccacatcacattccatcagcgagctcagtccagattccgaggtacctagatctgagggacatagctag

SEQ ID NO: 248064 - RNA, 384 nt, synthetic construct
  misc_feature 1..384: note = Description of Artificial Sequence: Synthetic coding sequence
  source 1..384: mol_type = other RNA
atgggctttcgtaaattttcaccttttttggccttaagcatcctagttctgtatcaggcgggctctctgcaagcagctcctttccggtctgctctggaatcttcccccgacccagcgacattatctaaagaagacgctaggcttctactggcggcactggtccaggattatgtgcaaatgaaagcttcagagttgaaacaggaacaggagacacaggggtctagtagcgctgcgcaaaagagagcctgtaatacagccacatgcgtgacccatcggctcgctggcctcctctcacgaagcggcggaatggtcaagtcaaattttgtgcccacaaacgtggggagcaaagccttcggaaggcgtcgccgtgacctgcaggcatag

SEQ ID NO: 248065 - RNA, 417 nt, synthetic construct
  misc_feature 1..417: note = Description of Artificial Sequence: Synthetic coding sequence
  source 1..417: mol_type = other RNA
atgaaaaaagaagctaaccttcagagaggcgggatggggttccgtaaattttccccctttttagctctttctattctggtgctctatcaggcaggcagcctccaggccgcccctttcagatctgccttggagtcgtcgccagacccggccactttgagcaaagaagacgctcgattactgctcgcagctctcgtccaagactacgtacaaatgaaggcctcggaacttaagcaagagcaggagacccaggggtcaagttccgccgcacagaaacgtgcatgtaacaccgctacttgcgtcacacacagacttgccggactgctatcccggagtggcggtatggtaaagtcaaacttcgttccgacaaacgttggaagtaaagcattcggcagacgacggagagatttacaggcgtag

SEQ ID NO: 248066 - RNA, 384 nt, synthetic construct
  misc_feature 1..384: note = Description of Artificial Sequence: Synthetic coding sequence
  source 1..384: mol_type = other RNA
atgggatttagaaaattctcgcccttcctagctctgtccatcctggtcttatatcaggccggctcactgcaggcagcgccgttccgttcagcactggaatcttctcccgaccccgccaccctaagcaaagaagatgcaagacttctgctggccgcccttgtacaggattacgtgcagatgaaagcgtccgagctgaaacaagaacaagagacccaaggctcaagctccgcggcacaaaagagggcgtgcaataccgctacctgtgtcacacatagacttgcaggtctactctctcggagcggtgggatggtgaaatcaaacttcgttccaacaaatgtgggcagtaaagctttcggccgccgccggagggatctccaggcttag

SEQ ID NO: 248067 - RNA, 948 nt, synthetic construct
  misc_feature 1..948: note = Description of Artificial Sequence: Synthetic coding sequence
  source 1..948: mol_type = other RNA
atgcgaatgtgtgacagaggaattcagatgttgatcaccactgtgggcgccttcgcggccttttccctgatgaccatcgctgttggaactgactactggctgtactctagaggcgtttgcaggactaagagcacttcggacaacgaaacctctaggaaaaacgaagaagtgatgactcactctggcttgtggagaacctgttgtcttgaaggagccttccggggcgtctgtaaaaagatagatcatttcccagaggatgcggattacgagcaggacactgctgaatacctgctgcgagccgtcagggccagctctgtgtttcctatcctgtcagtgactttactttttttcggcgggctctgtgtcgctgcctcagaatttcacagatctcggcacaacgtgattctgagcgctggaatcttcttcgtctcagcgggcttaagtaacatcatcgggattatagtatacattagcgctaacgcaggcgaccccggccaacgcgactctaagaaaagctactcttacggttggagcttttattttggcgcgttttctttcatcatcgcagaaatcgtcggggtagttgccgttcatatctacatcgagaaacatcagcagctacgagccaagtcacattcagaatttctgaagaagtccacgttcgccagactacctccctatcggtatcggttcagaagaagatcatcctcccgttcaaccgagccccggtcgcgcgatctgtcacctataagtaaagggttccacacaatcccctccacggatatatcaatgtttaccctgtcccgggatccctcaaaaatcaccatgggaacactgctgaattctgacagagaccatgcttttctacagtttcacaatagtacaccaaaggagttcaaagaaagcctgcataacaacccagcaaatagacgtaccactccggtctag

SEQ ID NO: 248068 - RNA, 891 nt, synthetic construct
  misc_feature 1..891: note = Description of Artificial Sequence: Synthetic coding sequence
  source 1..891: mol_type = other RNA
atgtcagcctgtggtagaaaagctctgacactgcttagttcggttttcgccgtttgcgggcttgggctcctgggcatcgcagtgtcaactgactattggctatacctcgaggagggagttatcgtgccgcaaaaccagtctaccgaaatcaagatgtcactgcattcggggttgtggagggtatgcttcttggcaggagaggagagaggacggtgtttcacaattgagtatgtgatgccaatgaacacccagctgacatctgaatctacagtcaacgtcctaaaaatgattagatccgctacgccgttcccactggtgagtctcttcttcatgttcatcggcttcattctaaataacattggacacataaggccccatcgtacaatcctagccttcgtctctggcatattttttattttaagcggtctcagcctggttgtgggattagttttgtacatttcctctattaatgatgagatgcttaatagaaccaaggatgctgaaacctatttcaattacaagtatgggtggtctttcgcttttgccgccattagttttctcctgacagaagtgaaacctgtaactctgtccatggacaggctcggtctcgggactgctcctttaagccggggtgagtggggatggggaagacgggatatcccacaaccattctggacccctgatcaccccttatacttcccgtcatcaagccagaatgtcagcttatcttatctgtccggttcgccaccagcccgaatgtctcctggtccatgtagttgcccccacgttcactttcccccgcattcgtcatgtgtcttatgccgcccccaaccgcgggaaatgaggcaggctccagccgcctcaccttcctccgccgtgttttccttgtag

SEQ ID NO: 248069 - RNA, 948 nt, synthetic construct
  misc_feature 1..948: note = Description of Artificial Sequence: Synthetic coding sequence
  source 1..948: mol_type = other RNA
atggatctacgccagtttctgatgtgtctctctctgtgcacagccttcgcactgagtaagcctacggagaaaaaagacagggtccaccacgagccacaactgtctgacaaagtgcataacgacgcccagtcctttgactatgaccatgatgcattcctgggcgccgaagaagctaagacttttgaccaattgacacccgaagaaagcaaagaacgcctgggtaagatcgtatcaaaaatcgacggtgacaaggatgggttcgttactgttgacgagcttaaagattggattaaattcgcccagaagcgctggatatacgaagacgtggaacgccagtggaaaggccacgacctaaatgaagacgggctagtgtcctgggaagaatacaaaaacgcgacatacggctacgtcctcgacgacccagatccagatgacggttttaactacaagcagatgatggttagagacgagagaagattcaagatggcagataaagacggagacctgatcgcgaccaaggaggaatttacagctttcctgcatcctgaggagtatgattacatgaaggacattgtagtacaggagacaatggaggacattgataagaatgcggatggattcatcgaccttgaggagtatatcggtgacatgtattcgcatgacggcaataccgacgaacctgaatgggtcaagacggaacgagaacaattcgtggaattcagagacaaaaatagggacggaaaaatggacaaggaagaaacaaaggattggatcttgccctctgactatgaccacgccgaggcagaggccaggcacctggtatatgaaagcgatcagaataaggatggcaaactcacaaaagaagaaattgttgacaagtacgatctgtttgtgggctcgcaggcgactgattttggggaggccctagttagacatgatgagttctag

SEQ ID NO: 248070 - RNA, 465 nt, synthetic construct
  misc_feature 1..465: note = Description of Artificial Sequence: Synthetic coding sequence
  source 1..465: mol_type = other RNA
atggacctcagacagtttctgatgtgcctctctctttgcactgcctttgccctgagcaagcccactgagaaaaaagatagagtgcaccatgaaccacaattgtccgacaaagtgcataacgacgcacagtccttcgattacgatcacgacgcctttctcggggccgaggaagctaaaacatttgatcagctcacccccgaggaaagtaaggaaaggctgggtaagatagtgtcaaaaattgatggcgataaagatggattcgtgactgttgatgaactgaaggattggatcctcccatcagattatgaccacgccgaggcagaagcaagacacctcgtatacgagagcgaccagaacaaggacggaaagctgaccaaggaagaaatcgttgacaaatatgatctgtttgtgggttcacaggcgaccgattttggcgaagcactggtgagacacgatgagttctag

SEQ ID NO: 248071 - RNA, 948 nt, synthetic construct
  misc_feature 1..948: note = Description of Artificial Sequence: Synthetic coding sequence
  source 1..948: mol_type = other RNA
atggacttaagacagtttctgatgtgcctcagcctgtgcaccgcgttcgctctgtcgaaacccactgaaaaaaaggatagagtccatcacgaacctcagctttctgataaagtgcacaacgatgcccaaagttttgactacgatcacgatgcattcctaggggcagaggaagctaagaccttcgaccaattgacccccgaagaatcaaaggaaaggctgggcatgatcgtagataagattgacgctgataaggacggatttgttaccgagggggaactgaagagttggataaaacacgcgcagaagaagtacatctacgacaacgtggagaaccagtggcaggaattcgacatgaatcaggacggacttatctcatgggacgagtatcggaacgtaacctatggaacctatctggatgatccagaccctgacgacgggtttaattacaagcagatgatggtaagagacgagcgacggtttaagatggcagataaggacggagatctgatcgccacgaaagaggaattcactgcttttctacacccggaagagtatgattacatgaaggacatcgtggtccaagagaccatggaagatattgataaaaatgcggacgggtttattgacctcgaggaatatataggtgatatgtactcacacgacggtaatactgacgaacctgagtgggtgaagaccgagcgagagcagtttgtggagtttcgggataagaacagagacgggaagatggacaaagaagaaaccaaagactggattttacctagtgactacgatcatgccgaggccgaggctcgacacctcgtttacgagtcagatcagaacaaagacggaaaactgacaaaggaagagatcgtagataagtatgacttattcgtgggatcccaggcgacagacttcggtgaagcattagtcaggcacgatgaattttag

SEQ ID NO: 248072 - RNA, 972 nt, synthetic construct
  misc_feature 1..972: note = Description of Artificial Sequence: Synthetic coding sequence
  source 1..972: mol_type = other RNA
atgaaggagacagatctaattataatggacctgaggcaatttctgatgtgcttatctctatgcactgctttcgctttgtcaaaaccaactgaaaagaaagaccgagtccatcacgagccccagctctcagacaaagtgcataacgatgcccagtccttcgactatgaccatgacgcctttctgggcgccgaggaggccaaaacattcgaccaacttacccccgaggaaagtaaagaacgcttaggaaaaatcgtatccaaaatcgatggagataaagatggcttcgtcacagttgatgaactcaaggactggatcaaatttgcacagaaaagatggatttacgaggacgtggagaggcagtggaaaggtcacgacctgaacgaggacggccttgtctcatgggaggaatacaagaatgctacctatggatacgtgttggatgacccagacccagacgatggctttaattacaaacagatgatggtgcgcgacgaaaggaggtttaaaatggctgataaagatggcgacctgatagccaccaaggaggagtttactgccttcctccatcccgaagagtacgactacatgaaggatatcgtcgttcaagagactatggaagacatcgacaagaacgccgacggatttatcgacctggaggagtatatcggagatatgtattcacatgatggcaacacagacgaacccgagtgggtgaaaactgagcgagaacagtttgtagaattcagagacaagaaccgtgatggaaaaatggacaaagaagaaactaaagactggatactgccctctgattatgaccacgctgaggctgaggctaggcacttagtgtacgagtccgaccaaaataaagacggcaagttaaccaaagaagaaatcgtggacaagtacgatctgttcgtaggatctcaggctaccgactttggagaagcactggtgcgacacgacgagttctag

SEQ ID NO: 248073 - RNA, 444 nt, synthetic construct
  misc_feature 1..444: note = Description of Artificial Sequence: Synthetic coding sequence
  source 1..444: mol_type = other RNA
tgaatcgccacgaaggaagaattcactgcttttttgcacccagaagaatacgactatatgaaggacatcgttgttcaggagacaatggaggatatcgataagaacgcagatgggtttatagacctcgaagagtacattggagacatgtattcacacgatggaaacaccgatgaaccagagtgggttaaaacagaaagagaacagtttgttgaatttcgtgataagaatcgtgacgggaagatggataaggaggaaactaaggactggatcctaccaagcgattatgaccatgccgaggccgaagctcgtcacctcgtttacgaatccgatcaaaataaagacgggaaactcacgaaggaagaaatcgtagataagtacgacctttttgtcggatcgcaagccacggactttggggaagccctcgttcgccacgacgaattttag

SEQ ID NO: 248074 - RNA, 675 nt, synthetic construct
  misc_feature 1..675: note = Description of Artificial Sequence: Synthetic coding sequence
  source 1..675: mol_type = other RNA
atggatctgagacagttcctcatgtgcctgtctttatgcaccgctttcgcattatccaaacctacagagaaaaaggacagagttcatcacgagccccagttatcagataaagtacataacgacgcacaatcattcgattacgatcacgacgctttccttggggcagaggaggcaaagacattcgatcaacttacccctgaagagtctaaagagcgactcggcaagatcgtctctaagattgacggcgacaaggacggctttgtcactgtcgacgaactgaaagattggatcaagttcgcgcagaagcggtggatatacgaagacgtcgaaaggcaatggaaaggccacgatttgaacgaagatgggcttgtgtcctgggaagaatacaagaatgccacatatggctacgtgctcgatgaccccgatcccgatgacgggttcaattacaagcaaatgatggttagagatgagagaagatttaaaatggcagataaagacggagatcttatcgccacaaaggaagagttcactgctttcctgcaccctgaggagtacgactacatgaaggacatagttgtacaggagaccatggaagacatagacaagaatgcagacggatttatagacctggaggagtacatcggatggcaggcgtatcagggaggagatcgatag

SEQ ID NO: 248075 - RNA, 444 nt, synthetic construct
  misc_feature 1..444: note = Description of Artificial Sequence: Synthetic coding sequence
  source 1..444: mol_type = other RNA
atgaaagaaacagatctgattattatggacctacgtcagttcctgatgtgtctatccctatgtacggcattcgctctctctaaacctaccgaaaaaaaagacagagtgcaccatgagccccagctctctgacaaggttcataacgacgcacaatctttcgactacgaccatgatgcctttctgggggccgaagaggcaaagacatttgatcaactgacacctgaagaaagtaaggagaggctgggtaagattgtgagtaaaattgatggcgacaaagacggctttgtcactgtggatgaattaaaagactggatcaaattcgcacaaaagagatggatttatgaggatgtggagagacaatggaaagggcatgatctgaatgaagatggtctggtgtcatgggaagaatataagaatgcgacctatggctacgtactggaatag

SEQ ID NO: 248076 - RNA, 513 nt, synthetic construct
  misc_feature 1..513: note = Description of Artificial Sequence: Synthetic coding sequence
  source 1..513: mol_type = other RNA
atggacttaagacaattccttatgtgccttagcctgtgtaccgcttttgccctaagcaagcctacagagaaaaaggatagagtgcatcatgaacctcaacttagtgacaaagtgcacaatgatgctcagagctttgactacgaccatgatgcttttctgggcgcagaggaagccaagacattcgaccaactgacccctgaggaaagtaaggagaggttgggaatgatcgtagataaaatcgacgcagataaggatggatttgtgaccgaaggagaactgaagagctggatcaagcacgcgcagaaaaagtatatctacgataatgtggaaaaccagtggcaggaatttgacatgaaccaggacgggttgatttcttgggatgaataccgcaacgtaacttatgggacataccttgacgaccccgacccagatgacgggtttaactacaagcagatgatggttcgcgacgaacgccgctttaagatggccgaccgagctagggctgtgtgctag

SEQ ID NO: 248077 - RNA, 606 nt, synthetic construct
  misc_feature 1..606: note = Description of Artificial Sequence: Synthetic coding sequence
  source 1..606: mol_type = other RNA
atggatctgcgccaatttttaatgtgtctgagtctttgcaccgcattcgctttatctaaacctacagaaaagaaggaccgcgtacaccatgagcctcagttaagtgacaaagtccataatgatgcccagtcttttgactatgaccatgacgcattcttgggcgctgaagaggctaagacatttgaccagttgacccccgaggagagcaaagagcgcctggggatgatagtggacaagatcgacgccgacaaggatggcttcgtgaccgagggcgagttgaagagctggattaaacatgctcagaagaagtatatatatgacaatgttgagaaccagtggcaagagtttgatatgaatcaggacggcctgattagttgggacgagtataggaatgtgacgtacgggacatacctcgacgatccagacccggacgacggatttaattacaaacaaatgatggttagggacgaacgacgattcaaaatggctgacaaggatggtgatctcatagcaactaaagaggagatagtggataaatatgatctgtttgtcgggtcacaggcaacggactttggagaggccctggtgcgtcatgatgaattttag

SEQ ID NO: 248078 - RNA, 798 nt, synthetic construct
  misc_feature 1..798: note = Description of Artificial Sequence: Synthetic coding sequence
  source 1..798: mol_type = other RNA
atggacctgaggcagttcctcatgtgcctttcactgtgcacagcctttgctttatccaaacctaccgaaaaaaaggaccgggttcaccatgagccccagctgtcggacaaggtgcataacgatgcacagtccttcgattatgaccatgatgcctttctgggtgctgaagaagctaaaacctttgaccagttgacacctgaggagtccaaggaaaggctgggaaagatagtctcaaagatcgacggcgacaaggatggctttgttaccgtggacgaactgaaagattggattaaatttgcccagaaaagatggatttatgaagacgtggagagacagtggaaggggcatgaccttaatgaggacggcttggtgtcatgggaagaatataagaatgccacctacggttacgtgctggacgatccagacccagacgatggatttaactacaaacaaatgatggtgcgagacgaacggagatttaagatggctgacaaggatggagatctcattgccacaaaagaagagttcacagcttttttgcatccggaagaatacgattacatgaaagacatagttgtgcaagagaccatggaagacattgataagaacgcagatggattcattgacttagaggagtatatcggcgacatgtattctcatgacggcaatacggatgagtctgaccagaacaaagatgggaagctgaccaaggaggagattgtagataaatacgatctgtttgtcgggtcgcaggctactgattttggagaagccctagtgaggcacgacgaattttag

SEQ ID NO: 248079 - RNA, 495 nt, synthetic construct
  misc_feature 1..495: note = Description of Artificial Sequence: Synthetic coding sequence
  source 1..495: mol_type = other RNA
atgatggtgcgtgatgagaggaggttcaaaatggctgacaaggacggcgacctaattgccactaaagaggagtttaccgctttcctgcaccctgaagaatatgattacatgaaagacatcgttgtccaggaaactatggaggacatcgacaagaacgctgacggatttatcgaccttgaggaatatattggcgatatgtactcgcatgatggtaacaccgacgagcccgagtgggtcaaaacggaaagggagcaattcgttgagtttagggacaaaaatagagatggcaaaatggataaggaggaaacaaaagattggatactgccatcggactacgaccacgccgaagccgaggctaggcatctggtgtacgaatctgaccagaacaaagatggaaagctcacaaaagaagaaattgtagacaaatacgatctgttcgtaggtagccaggcgacagatttcggtgaggcacttgtgcggcacgacgaattttag

SEQ ID NO: 248080 - RNA, 972 nt, synthetic construct
  misc_feature 1..972: note = Description of Artificial Sequence: Synthetic coding sequence
  source 1..972: mol_type = other RNA
atgaaagagaccgacctcataattatggatctgcgtcagttcctgatgtgtctatcactatgcactgcatttgccctttcaaaacccacagagaagaaggacagggtgcatcatgaaccacaactctccgataaagttcataatgacgcacaaagctttgattacgatcacgatgccttccttggtgccgaggaggctaaaacgttcgatcaattgactcccgaagagagtaaagaaagactcgggatgattgtagacaaaatcgatgctgacaaggacgggttcgttaccgagggtgagctgaaaagctggattaaacatgctcagaagaagtatatctatgataacgtggagaaccagtggcaggagtttgacatgaaccaggacggtctgatttcttgggacgagtatcgcaacgttacatacggaacctacttggacgaccccgatcctgacgatggcttcaactacaagcaaatgatggtcagagacgagcgacgatttaaaatggcagacaaggacggtgacttgatagccaccaaagaggagtttaccgcctttctccatcctgaagaatatgactacatgaaagatatcgtagtgcaggagactatggaagatattgacaagaacgcggatggcttcatcgatcttgaggaatacatcggagatatgtactctcatgatggcaacaccgacgagccagagtgggtgaagacagaacgcgagcaattcgttgaatttcgagataagaatagagacggcaaaatggacaaagaggaaacgaaggattggatcttgcctagtgactacgaccacgctgaagccgaggcccgacacttggtctatgaaagcgaccagaacaaagacggcaagttgacgaaagaggaaatcgtggataagtacgacctcttcgtgggtagccaagcaaccgattttggcgaggctctggtgcgacatgacgagttttag

SEQ ID NO: 248081 - RNA, 1386 nt, synthetic construct
  misc_feature 1..1386: note = Description of Artificial Sequence: Synthetic coding sequence
  source 1..1386: mol_type = other RNA
atgaacacggatctcgccgccggaaagatggcttcagcagcatgctcaatggaccctatcgatagcttcgagcttctggacctgttatttgataggcaggatgggatactcagacacgtggaattgggagagggatggggccacgttaaagaccagcaggttctgcctaacccagatagtgatgattttctgtcttctatcttaggtagtggagattccctcccgtccagccccctgtggtcccccgaggggtctgactcaggtattagcgaggatcttccatcagaccctcaagataccccaccacggtcaggacctgccacttcacctgccggttgccaccccgcccaacccgggaagggtccctgtctatcttatcacccgggcaactcatgctccacaacaactcccggccctgtcatacaggtgcctgaggcatctgttacaatcgacctagagatgtggagccccggagggcggatctgcgccgaaaagcctgccgaccccgtagatctatcacctcgttgcaatctcacggtgaaagatctgctgctgtccggctcatcaggcgacctgcagcagcaccacctcggggcctcctatttactgcggcctggtgctggccattgtcaggagttagtactgaccgaggacgaaaaaaagctcttagccaaggaggggatcactctgccaacccagttaccactcacaaagtacgaggagcgggttcttaagaaaataagacgaaaaattcggaacaaacagtcagcccaggaaagcagaaaaaagaagaaggaatatattgatggtctcgaaacacgcatgtcggcttgtacagcccaaaatcaggaactgcaacggaaggtgctccatctcgaaaagcaaaacctgagcctcctggaacaattgaaaaaattacaagctatagtggttcaatcaaccagcaagtccgcccaaactggaacctgcgtcgccgtactgcttctgagcttcgccctcatcatcctgccatccattagtccatttggacctaacaagacagaatccccaggtgatttcgctcctgttagagtgttttctaggacgttacataatgatgccgcgtctagagtcgccgccgacgcggtccccggttccgaggccccgggacctagaccagaagccgataccacacgcgaggagtctcctgggtcaccaggtgctgattggggctttcaggatactgcaaaccttaccaatagtacagaggaacttgataatgcaactctcgttttgaggaatgccaccgagggacttggtcaagtggccctgctcgactgggttgctcccggtccgagcacaggaagtgggagagccgggctggaggcggccggcgacgaattgtag

SEQ ID NO: 248082 - RNA, 4827 nt, synthetic construct
  misc_feature 1..4827: note = Description of Artificial Sequence: Synthetic coding sequence
  source 1..4827: mol_type = other RNA
atgtactctgcacaccgcccactcatgccagcctcatccgccgctagcagaggcctcgggatgtttgtgtggaccaacgttgaaccacggtcagtggctgtgtttccctggcatagcctggtacccttcctggccccgagccagcctgacccttccgtccagccaagtgaagctcagcagccagcttcccacccagttgctagcaatcaatccaaggaacctgcagagtctgctgcggttgcccacgagcgcccccccgggggcacaggatctgcggacccagagcggcctccgggagcgacttgtccggagtcacctggcccaggcccccctcatcctttgggcgtcgtcgagtccgggaagggaccgcctccaacaactgaggaagaggctagcgggcccccaggtgagccgaggctggactcagaaacggaatcggatcatgatgatgctttcttgtctattatgtccccagaaatccaactgcccttaccccccggcaaacgaagaactcaaagcctatccgctctgccaaaagaacgcgattcttcatccgagaaggacggacggagtccgaacaaacgcgaaaaggatcatatccggcgcccaatgaacgcgttcatgatcttctctaagaggcaccgagccctggtgcaccagcggcacccaaaccaggataatagaacggtcagtaagatattgggtgaatggtggtacgccctgggcccaaaagagaagcaaaagtaccatgaccttgcttttcaggtcaaagaagcacacttcaaagcacaccccgattggaaatggtgtaataaggataggaaaaagtcttcctcagaggccaaacctacatctctgggccttgccggtgggcacaaagaaacccgagagcgttccatgtccgaaaccggtaccgcagccgcaccaggggtttcctccgagctgctgtcagtagctgctcagaccctcctttccagcgacactaaagcccccgggagctcatcgtgcggggccgagagactgcacacagtcggtggtccaggtagtgctaggcctcgcgccttctcccattcaggtgtgcactctttagatggaggcgaagtggattcccaagctctccaggagctgacccaaatggtatcaggcccagcttcatactcagggcccaaaccttcgacacagtacggcgcccctggtcccttcgcagcccccggagagggcggtgccctcgcggccactggtcgtccccctctcctccctaccagagccagcaggtctcagcgcgccgcctccgaggacatgacaagcgacgaggagagaatggtcatttgtgaggaggagggagatgacgatgtgattgctgatgacggcttcggcaccactgatatcgatctcaagtgtaaggaaagagtaacggattcagagtcaggtgactcctccggagaggacccagagggtaacaaaggcttcggcaggaaggttttcagccctgtgattcgcagctccttcacacactgtcgcccacccctcgatcccgagccgcccggccctccagatccccctgtcgcatttggaaaggggtacggatccgccccctcatcctcggctagctctcctgcttcaagctccgcctcagctgcaactagtttctctttgggatccggcacttttaaagctcaggaaagtggccagggaagcacggccggacctctgcggccgcctcctcccggcgccggtggccctgccacaccctctaaagctacccgttttctgcctatggatccagcaaccttcagacgcaagcgaccggagtcagtaggaggcctggagccacccggaccatccgtgatcgccgctccccccagcggtggggggaatatcctgcagaccttggtgctgccacctaataaagaagagcaggagggaggaggtgcaagggtaccaagtgcaccagctccaagcttagcctacggagctcctgctgctccgctgagtagacccgccgccacaatggttaccaacgtagtcaggccagtaagctctacacctgttccaattgcctccaagccatttcccacaagtggacgagccgaagcaagcccaaatgacacggccggagcacggacagaaatgggcacaggaagcagagttcccggtggcagtcctctgggggtaagcctggtatactcagataagaaatctgcggcagccacgtcccctgctccgcatcttgtcgccggaccgcttctcgggactgtcggtaaggctcccgcgactgtgactaatctcctggtaggcaccccgggctacggcgcacccgctcctcctgccgtccagttcatcgcgcagggggccccgggaggcgggaccacggcgggctctggtgctggagcgggttctggacccaatggtcctgtgcctctcggcatcttgcagccaggggccctgggaaaggcagggggaatcactcaggtgcagtacatcttacccaccctacctcagcaacttcaagttgcacccgcaccggctcccgcacctgggactaaagccgcggcaccgtccggacctgcacctacaacctctatcaggtttaccctcccacctggtacttcaactaacggcaaggttcttgctgctacagctcctacaccgggcattcctattctgcaatctgtcccgagcgccccacctccaaaagcccagagtgtgagcccagtgcaggctccacctccaggcggcagcgcccaactacttcctggcaaagtactggtgcctctagcagctccttccatgtctgtacgcggcgggggggccgggcaacctttacctctggtgagtccaccattctcagtacctgtgcaaaacggggcgcagcctccaagtaagatcatccagctgacacctgttcccgtttccacaccgtctggcctcgtccctcctctgtccccagcaacacttccaggccctacaagccagccccagaaagtgcttctcccatcttccacacggatcacctacgtccaatccgcgggaggccacgcactccctctgggcacgagtcccgcaagctctcaggcaggcaccgttacctcttacggaccaacatcatccgtggcactaggcttcactagcttgggtccctcaggtcctgccttcgttcaacccttattgtcagctggacaggcacccctcttggcgcccgggcaggttggcgtgagccccgttccatcacctcagcttccgccagcatgtgctgcccccggcggcccagtgattaccgctttctactctggctcccccgcaccaacctcttccgcccctctggcccagccctcacaggccccaccaagccttgtctatactgtggctacctcaacaactccacccgctgccaccatcctgccaaaaggcccacccgctcccgctacagctacacccgcacccacatctccatttccaagcgccacggcaggatccatgacctacagtctggtagccccaaaggcccagaggccctcccctaaagcaccacagaaggtgaaggcggccattgcctctattcctgtcgggtcttttgaggccggagcatctgggcgcccggggcctgccccacgccagccccttgagcctgggcctgtgcgcgagcctaccgctcctgagtccgagctggagggccagccgactccacctgcaccacctccattaccagagacgtggacgcccaccgctagaagcagccctcccctcccacctcctgccgaagaaagaacctcagctaagggacctgagacaatggctagtaagttcccatcctcatccagcgattggagggtccccggacaggggttggagaataggggcgaacctcctacgccaccctctccagctccggcccccgcggttgccccaggtggatcctctgaatctagcagcggaagggccgcgggcgatactcctgagcgtaaagaagccgctggtacgggcaaaaaggtcaaggtcaggcccccacctctgaagaagacgtttgattccgttgacaaccgcgtcttatccgaagtcgatttcgaagagcgtttcgcggaacttcctgaattcaggcccgaggaggtgctcccctcaccaacactccagtcactggctacttcaccaagggctatcctgggatcctaccggaaaaaaagaaagaacagcaccgacctggactccgcgcccgaggaccccacttcaccaaagaggaaaatgcggcggcgcagctcatgtagctctgagcccaatacacccaaaagcgcgaagtgcgaaggggatatttttacatttgatcggactgggacagaggccgaagatgtgctgggagagcttgagtacgacaaagtgccctattcctccctccggaggaccctcgaccagagaagagcactggtgatgcaactgttccaggaccatgggttcttcccttccgcccaagccactgccgcttttcaggccaggtatgctgatatatttccatcgaaggtatgtctgcagctgaaaattagagaagttcggcaaaagattatgcaagctgccacgcccactgaacagccaccgggcgccgaagcgccactgcctgtgccacccccaaccggcacagcggcagcccctgcacccaccccctcaccggccggtggacccgatcccaccagtcctagtagcgactctggtactgcccaggccgctccaccgctgcctccgccaccggagagtggacccgggcagccaggatgggagggcgccccccagccctccccaccacctcctgggccctcaaccgccgcaactgggagatag

SEQ ID NO: 248083 - RNA, 540 nt, synthetic construct
  misc_feature 1..540: note = Description of Artificial Sequence: Synthetic coding sequence
  source 1..540: mol_type = other RNA
atgagggccctggtgttgcttctatccctcttcctgttaggtggacaggcacagcatgtcagcgactggacttatagcgagggagctcttgacgaggctcattggcctcaacattacccagcatgtggtggccagaggcaatctcccatcaatcttcaacgcacaaaggtgaggtataacccttcattgaagggactcaatatgaccggatacgagactcaagctggcgaattcccaatggtaaataatggacacaccgactggcaggccgaactgttcctgccttcccttagctccccttgcggagaaggcgccaaacataaaggacaaaggcagtggttatgtagtcccagcctggactcctggtgggaagctatcatcgatggcgggagcctgtgggccacgctagcggagtgtgggctacgtgccgaagggccagaggaaggcagacacatggaggagaaatcccccgcaagccagggagcatgttccggtagcaggctccctattagtagagggccttgtaccttctttctctag

SEQ ID NO: 248084 - RNA, 942 nt, synthetic construct
  misc_feature 1..942: note = Description of Artificial Sequence: Synthetic coding sequence
  source 1..942: mol_type = other RNA
atgagagcactggtgctgctgctatctttgtttctgctgggcggtcaagctcagcatgtttccgattggacgtacagtgaaggggcactggacgaagctcactggcctcagcactacccggcctgcggcggacagcgccagagtcccatcaatttgcagagaaccaaggtacgttacaacccctcgctcaagggactgaacatgaccggttatgagacccaagccggagagtttccgatggtgaacaacgggcacactgtacaaattagtttacccagtacaatgagaatgacggtcgccgacggcaccgtgtatatcgcacaacagatgcatttccactgggggggtgccagttctgagatttccggatccgaacacactgtggacggaattcgacacgtgattgaaattcacatcgtacactacaactccaaatataagtcatacgacattgcacaggacgccccagatggcctggccgtgctcgccgcttttgtggaagttaagaattaccctgaaaacacctactactctaattttatctctcatttagctaacataaagtatcctggccagcgaactacactgactggactggatgtgcaagacatgctacctcgtaatctccagcattactatacttaccacgggtccttaacgacccccccttgtaccgaaaacgtacactggtttgtcttagcggatttcgtgaaacttagtcggacccaggtgtggaagcttgagaatagcttgttggaccaccgcaataaaaccatccataatgactatcgcaggacccagcctctgaaccacagagtagtggaatccaacttccctaatcaaggaaaaggccatggtggtcatcgcggtcggtctcagaatccgagggttcaacccacgagcacccgacacccacttgctctcggtagtctcgaagcttag

SEQ ID NO: 248085 - RNA, 927 nt, synthetic construct
  misc_feature 1..927: note = Description of Artificial Sequence: Synthetic coding sequence
  source 1..927: mol_type = other RNA
atgcgggccctggttctccttctttcactcttcttgcttgggggacaggctcagcatgtctcagactggacctattctgaaggcgccttagatgaggcccactggccacagcactatccggcttgcggaggtcaacgacagagcccaatcaacttgcaacgtaccaaggtgcgctacaatcctagcttgaagggactcaacatgacaggctacgaaacacaggccggggagtttcctatggtgaacaatgggcacaccgtccagatttctctccccagcaccatgaggatgacagtcgcggatgggacagtatacatcgcccagcaaatgcactttcattggggaggtgcctcttctgagatttcaggcagtgagcatacagtcgacggcatccggcacgtgattgaaatccatatagtgcactataactccaagtacaagagctacgatattgcacaggacgcccccgacggtctcgccgtcctcgccgctttcgttgaggtgaagaattacccagagaacacctactatagcaattttatatcacaccttgccaacatcaaatacccggggcaaaggacaacgcttacgggtttggacgtgcaggacatgctcccccggaatctccagcattactacacataccacggatctcttactacacctccttgcaccgaaaatgtccactggttcgtgttagcagactttgtgaaacttagtagaactcaggtctggaagctagaaaattccctgctggaccatagaaacaagaccatccataacgactacagacgcacgcaacctctcaaccaccgggtggtggaatccaacttcccaaatcaggaatacactctaggaagtgaattccaattctacctccacaaaatcgaggaaatacttgactatttaaggcgcgctctcaactag

SEQ ID NO: 248086 - RNA, 987 nt, synthetic construct
  misc_feature 1..987: note = Description of Artificial Sequence: Synthetic coding sequence
  source 1..987: mol_type = other RNA
atgggcgcagctgcacggctttctgcaccaagagccctcgtgctgtgggctgccttaggcgccgccgcccacattggcccagcccccgacccagaggactggtggagttacaaggacaatctgcaggggaatttcgtgcccggccctccattctggggcttagtcaatgctgcttggtctctttgcgcggtcggaaaacgccagagtcccgttgatgtcgagttgaagagagtgctgtatgatccttttctgccaccgctccggctctccacgggcggcgagaaacttagaggaactttgtacaacactggccgacacgtgagcttcctgcctgctccccgccccgtggtgaacgttagtggcggacctctgctgtacagccaccgcttgtcagaactccgactgctattcggtgctcgcgacggcgccggctcggagcatcagatcaatcaccaaggtttttctgctgaagtgcagctaatacacttcaaccaggagctgtatggtaacttttccgctgcctcaagagggcccaatggactcgctatattgtcactctttgttaacgtggccagtactagtaatcccttcctgtcccgactgcttaaccgcgacacaatcacacgaatttcctacaaaaatgacgcctactttttgcaggatctgtccttggaactgttgtttcctgagtctttcggcttcatcacttatcaagggtcactttctactcccccttgctcagagacagttacgtggattctaattgaccgcgcactgaacattacatctttacagatgcacagtctccgcttacttagtcagaaccctccctctcagatttttcaatcactaagcggtaacagccgcccactccagccacttgcccatcgggcattacgcgggaaccgggaccctagacatcccgaaagacgctgtcggggaccaaactatcgtctccacgtggacggcgtgcctcatggccgctag

SEQ ID NO: 248087 - RNA, 1260 nt, synthetic construct
  misc_feature 1..1260: note = Description of Artificial Sequence: Synthetic coding sequence
  source 1..1260: mol_type = other RNA
atgcggggcctgcttgtcctgagcgtgctgctgggcgccgtttttggtaaagaggacttcgttgggcatcaggtgctgagaatctccgtggccgacgaagctcaggtgcaaaaggttaaagaactggaagatctggaacacttgcaactcgatttctggagaggaccggcccatccaggtagccctatcgacgtccgcgtgccttttccatctattcaggctgttaagattttccttgagtcacacggtatctcctacgagacgatgattgaggatgtgcaaagtctgctggacgaagaacaagagcagatgttcgcatttcgaagccgagccaggtcgacagatacgtttaactacgccacttatcacacactcgaagagatatacgattttctggacttattggtcgcggaaaatccgcacctggtgtccaagattcagataggtaatacctatgagggccgcccaatttatgtgctcaaattttcaacaggcgggtccaagcgcccagccatatggattgataccggaatccactctagagaatgggtgactcaagcttctggggtatggtttgcaaagaagattacccaggactatggccaggacgcggctttcacagctatcctcgacactctggatatattcttagaaatcgtgactaatcctgacggcttcgctttcacacacagcactaatcgaatgtggagaaaaacacgatcacacactgcaggctctctctgcattggcgtggaccctaaccgtaactgggacgctgggtttgggctctccggcgcatcgtcgaatccctgcagtgaaacttatcatgggaaattcgcaaattctgaagtggaagtgaagagtatcgttgacttcgtgaaagaccatgggaatatcaaagcctttatctccatccacagttatagccaactgctgatgtatccttacggctacaaaaccgaacctgtccccgaccaagatgaattggaccaactctctaaggccgcagtcaccgcacttgcatccctatacggcactaagttcaactacggctccattattaaggccatttatcaggcatcaggatcaactatcgattggacatactcccaaggtataaagtactccttcacctttgagttaagagacacaggaaggtacggctttctgctccccgcttcccaaataattcctacagcgaaggagacttggcttgcactgctgaccatcatggaacacacccttaatcacccctattag

SEQ ID NO: 248088 - RNA, 1098 nt, synthetic construct
  misc_feature 1..1098: note = Description of Artificial Sequence: Synthetic coding sequence
  source 1..1098: mol_type = other RNA
atggatagggccgccctgttaggtctggcccggctttgtgcactgtgggctgctttattagttctgttcccatacggggctcaggggaattggatgtggctgggcatcgcatcgtttggcgtgcccgaaaagctgggttgtgccaatctgcctctgaattcacgacagaaagaactctgtaaacggaaaccatacctactcccatctatcagagaaggggccagactgggtattcaagaatgcgggagccagtttcgccacgagcggtggaactgcatgattaccgccgcagcgacaaccgcccccatgggagccagccccttgtttgggtacgagttatcttccggaacgaaagaaaccgcttttatatacgccgtcatggcagccggattggtacattctgtcactagatcttgcagcgcaggaaacatgactgaatgcagctgcgacaccacccttcaaaatgggggctccgcatcagaggggtggcattggggaggatgctcagatgatgtgcagtacggtatgtggttctctcgaaaattcctggatttcccaatcggtaacactaccggcaaggaaaataaggtgctcctcgccatgaacctgcacaataacgaagccggacgtcaagctgtggccaagctgatgagtgtcgactgcagatgtcacggagtgagcggaagctgtgctgtaaagacatgttggaaaactatgtcttctttcgaaaagatcggccatctgcttaaagacaaatatgaaaattctatccagatatcggacaagacgaaaagaaagatgagaagaagagagaaagaccaacgaaagataccaatccacaaagacgacctcctgtatgtcaacaagagtccgaattattgtgtcgaggataaaaaattgggtataccgggcacccaaggacgggaatgcaaccgaacctccgagggcgctgatggctgcaatcttctgtgttgtggccgaggctacaatactcatgtcgtgcggcatgttgagagatgtgagtgcaaattcatctggtgttgttatgtcagatgcagacgctgcgaatcgatgacagatgttcacacctgtaaatag

SEQ ID NO: 248089 - RNA, 1581 nt, synthetic construct
  misc_feature 1..1581: note = Description of Artificial Sequence: Synthetic coding sequence
  source 1..1581: mol_type = other RNA
atgggacacctttccgcgcctctccatcgagttcgggtgccttggcagggactactgcttacagcttcactcctaacattctggaacccacccacaaccgctcaactcactacagaatcaatgccatttaacgtcgcggaaggcaaggaagttctgctgctggtacataatctgccccaacagttattcggctacagctggtacaagggcgaaagagttgatgggaaccggcaaattgtaggctacgcaatcggaacacagcaagccacccctggtcctgcaaattccggtcgggaaacgatctatcccaacgcgagtttgctgatccaaaacgtcactcagaatgataccggattctacactctgcaagtcatcaaatccgacctggtcaacgaggaagctactgggcaatttcatgtgtatcccgaactccctaagccctcaatctcaagcaacaacagcaatcccgtggaagacaaggacgctgtagccttcacatgtgaacctgaaacccaggacacgacatatctatggtggattaataaccaatcactgcccgtgagtccacgcctgcaactaagcaatggcaatcgtactcttactctgctctcagtgacacggaatgacacgggaccctatgaatgcgaaattcagaacccagtctccgcaaatcgatctgacccggtaacactgaacgtcacatatggcccggatacccctaccatttccccttctgatacttattaccggccaggggctaacctctctctgtcttgttacgccgccagtaacccccccgcacagtacagttggcttattaacgggaccttccaacagagcacacaggagttattcatacccaatattactgtgaacaattcaggatcttacacctgccacgccaacaattctgttacaggttgcaataggaccacagtcaaaacgatcatcgtgacggaattgagtccagtagtggccaaacctcagatcaaagcgagcaaaacaacggtaaccggtgacaaggactccgtcaacctcacttgctccacaaatgatactgggattagcatcaggtggttttttaagaaccagtcgttaccaagttctgagaggatgaaattaagccagggcaacaccactctgagcatcaatcctgtcaagagggaggatgccggcacttattggtgcgaggtcttcaatcccatcagtaagaaccagtccgatccaatcatgttaaacgtgaactacaacgctcttccacaggaaaatgggctgtctcctggtgctattgctggcattgttattggggtggtcgcactggtggcactcattgctgtagctctggcttgcttcctgcacttcggtaagaccggcagggcatccgatcagagggatctgaccgaacataagccttctgtatctaatcacactcaggaccactcaaatgaccctcctaacaaaatgaacgaagttacatactctaccctgaattttgaagcccaacagcccacgcagcctacatctgcttctcccagcctaacggccaccgagatcatttatagcgaggtgaagaaacaatag

SEQ ID NO: 248090 - RNA, 2115 nt, synthetic construct
  misc_feature 1..2115: note = Description of Artificial Sequence: Synthetic coding sequence
  source 1..2115: mol_type = other RNA
atggtgccggacacagcctgcgtgttactccttactctagccgcccttggcgccagcggacagggacagtcgcccttaggatcagaccttggacctcagatgctgagggaactccaggaaaccaacgccgcgcttcaggatgtaagggagctcctgagacagcaagttagagaaatcacatttctcaagaatacagtcatggagtgtgatgcatgtggtatgcagcaaagcgtacgaaccgggttaccaagtgtgagacccctgctgcactgcgcccccggcttctgcttcccaggagtcgcatgcattcagactgaaagcggagctcggtgcgggccttgtcctgcaggattcaccggcaacgggtcacattgcaccgatgttaatgaatgcgagaccggtcagcataactgtgtccctaattcggtctgtattaacacacgaggaagcttccagtgcggtccttgccagcccggttttgtgggagatcaggcaagtggttgccaacgacgcgctcagagattttgtcctgacggctccccatccgagtgccacgaacatgccgattgcgttctcgaacgagatggatcccgaagctgcgtatgcgcggtcggatgggcaggcaacgggatcctgtgtggacgtgataccgatctggacggttttccagatgaaaagttgagatgccctgaaaggcagtgtaggaaggacaattgcgtcacagttccaaacagtggccaagaagacgtagaccgggatggtatcggcgatgcctgtgatcccgacgccgatggcgatggtgtccctaatgagaaggataactgtccactggtacggaaccccgaccagcggaacacagacgaagataaatggggggacgcttgtgacaactgtcgatcccagaaaaatgatgaccagaaggacactgaccaggatggccgcggtgatgcatgcgatgacgatatcgacggcgacaggatcaggaatcaagctgacaattgccccagggttcctaattcagatcaaaaggattccgatggcgatgggattggtgatgcctgcgataactgcccacagaaatccaaccctgaccaagcggacgtcgaccatgacttcgtgggtgacgcgtgtgattctgaccaggatcaggacggcgacgggcaccaagattcacgggataactgccccaccgttcccaactcagctcaggaggacagcgaccacgatgggcagggagatgcctgcgatgatgacgatgataatgatggagtacccgactcccgcgacaactgtcgtctggtcccgaatccaggccaggaggacgccgaccgggacggagtgggtgacgtgtgccaggacgacttcgacgcggacaaagtggtggataagattgacgtgtgtcctgagaacgcagaggtgaccctcaccgacttccgggcatttcagaccgtggtcctcgacccagaaggcgacgcccagatcgaccccaattgggtggtactgaaccagggcagagagatcgtgcaaaccatgaatagcgatccagggttggccgtcggctacacagccttcaacggtgttgactttgaggggaccttccatgtcaacacggtcacggacgacgactatgcgggtttcattttcggataccaggatagcagctctttttatgtcgtgatgtggaaacagatggaacagacttattggcaggcgaacccattccgtgccgtggcagaacccggaatccagctgaaggcagtgaagtccagtacggggcctggcgaacagctcaggaatgcactgtggcacaccggcgacactgaaagccaggtcagactgttgtggaaggatccccgaaatgtggggtggaaggataagaaatcttaccgatggtttctccagcacaggccacaggtgggctatatcagagttcgtttctacgaaggaccagagttggtagctgacagcaatgttgtcctggacaccaccatgcgcggcggaagattaggagtcttctgctttagccaggaaaacatcatttgggccaacctaagataccgatgcaatgacaccatccctgaagattatgagacacatcagctgaggcaggcctag

SEQ ID NO: 248091 - RNA, 2235 nt, synthetic construct
  misc_feature 1..2235: note = Description of Artificial Sequence: Synthetic coding sequence
  source 1..2235: mol_type = other RNA
atggtcccggacacagcctgcgtgctgttgctaaccctggcggccttgggcgcttcagggcagggacagtcacctctggggtcagatttagggcctcaaatgctccgtgagttacaggagacaaatgcggctttgcaggatgttcgagaacttctgcggcaacaggttcgtgagataactttcctgaagaacacagtgatggaatgtgatgcgtgtgggatgcagcaatctgtgcgcaccggccttcccagtgtcaggcctctcctacattgcgcccccgggttttgtttccctggcccttgccctgccggatttactggtaatggctctcactgtacagacgttaatgaatgtaacgcgcacccatgtttccctcgtgtgcggtgtattaatacttctcccgggtttagatgtgaagcgtgtcctcctggatattctgggccaactcaccaaggtgttggcctggcctttgccaaggcaaataagcaggtgtgcacagacattaatgagtgtgaaacagggcaacataactgcgtgccaaacagcgtctgtattaacactagaggatcctttcagtgtggtccatgccagcccgggttcgtgggggatcaggcatctggatgtcagcgaagagcccagaggttttgcccagacggaagcccctccgagtgccacgaacatgctgactgcgtgctggagagagacgggagtagaagctgcgtctgtgccgttgggtgggccgggaacggcattctgtgcgggcgcgacacagatctagatgggttcccagacgagaagttaagatgccccgaacggcagtgcagaaaagacaactgtgtgacggtgcctaacagcggacaggaggatgtagatcgggacggcattggggatgcatgcgatccggatgccgacggcgatggagtgccaaacgaaaaagacaactgtcccctggtgaggaacccagaccagcgaaataccgatgaagacaaatggggggacgcctgcgacaattgtagatctcagaagaatgacgaccagaaagacaccgaccaggacgggaggggcgacgcctgcgatgatgatattgacggcgatcgcatccggaaccaggccgataactgcccacgcgtccccaactcagatcagaaagattcagatggcgacggcattggggacgcctgcgataactgcccacagaagagcaaccccgatcaagccgacgtagaccacgacttcgtgggagatgcgtgtgactcagatcaggaccaagatggcgatggacaccaggatagccgcgataattgccccacagtcccgaatagcgctcaggaggacagcgaccacgatggtcagggcgatgcatgcgacgatgatgatgataacgatggtgtgccagatagtcgcgataattgtcgattagtccccaaccccggacaggaagacgctgatcgagacggtgtaggggacgtgtgccaggatgacttcgatgctgataaggtcgtggacaagattgacgtatgtcctgagaatgccgaagtaacacttaccgattttagagcctttcagactgtggtcttagacccagaaggcgatgcccagatagatccaaattgggtggtgcttaaccagggacgagagatcgtgcagactatgaacagcgacccaggtctcgccgtcggatatacagccttcaacggggttgatttcgaaggtaccttccacgtcaatacagtcacagacgatgattacgccggcttcatatttgggtaccaggacagcagctcgttttatgttgtgatgtggaagcagatggaacagacgtattggcaggctaatccctttagggccgtggcagagccaggcattcagcttaaagccgtcaaaagcagcacaggacctggggagcagctccggaacgctctgtggcacacgggcgacaccgaatcacaggttagactcctttggaaggatcctcgcaacgtgggttggaaagataagaaatcctatcgatggttcctccagcatcggcctcaggtagggtacatccgcgtgagattctacgagggccctgagttggtagccgattcgaacgttgtgctcgatacaaccatgcggggcggcaggcttggtgtgttctgtttctcccaggaaaacatcatttgggccaacttaaggtatcggtgtaacgacacgatcccggaagactacgaaactcaccaattgcggcaagcttag

SEQ ID NO: 248092 - RNA, 387 nt, synthetic construct
  misc_feature 1..387: note = Description of Artificial Sequence: Synthetic coding sequence
  source 1..387: mol_type = other RNA
atggggattcaaggaggaagcgttctttttgggctgctgctcgttctagcagttttctgccactccggccattctcttcaatgttacaattgtcccaaccctactgctgactgcaaaaccgccgtcaattgcagtagtgacttcgatgcttgcctgatcactaaagctggcctgcaagtgtacaacaaatgctggaaattcgaacattgtaatttcaacgacgtgacgactagattacgagaaaacgaactgacctactactgctgtaaaaaagatctgtgcaatttcaatgagcagctcgaaaatggaggcacatcactctctgagaaaactgtcctgctgctggtcacaccttttcttgcagccgcatggtctcttcatccatag

SEQ ID NO: 248093 - RNA, 387 nt, synthetic construct
  misc_feature 1..387: note = Description of Artificial Sequence: Synthetic coding sequence
  source 1..387: mol_type = other RNA
atgggtattcagggcggatccgtgttattcggcttgcttttagttttagccgtattttgccactccggccattcgcttcagtgttacaattgtcccaaccccaccgcagactgcaagaccgccgtcaactgctccagcgacttcgacgcttgtctgatcaccaaggccggactgcaagtatataataaatgctggaaattcgaacactgcaattttaacgacgtgactactaggctgcgggagaatgagctgacctactattgctgcaagaaagatctgtgtaacttcaacgagcagctggagaatggaggcaccagcttatctgagaagaccgttctacttttggtgacgccttttctagccgctgcctggtccctccatccctag

SEQ ID NO: 248094 - RNA, 387 nt, synthetic construct
  misc_feature 1..387: note = Description of Artificial Sequence: Synthetic coding sequence
  source 1..387: mol_type = other RNA
atgggaattcaaggggggagtgtgctgtttggacttctcctcgtgctggccgtattctgccactcgggccacagccttcaatgctataattgcccaaatcccactgctgactgtaagacagccgtgaactgttcgagcgactttgatgcatgcctgattacaaaagcaggattgcaggtgtacaacaaatgttggaaatttgagcactgcaattttaatgacgtcaccacccgcctgcgtgaaaacgaactgacctattattgctgcaaaaaagacttgtgtaatttcaatgaacagttggaaaacggcgggacatctctgtccgagaaaaccgtgttactgcttgtgactccctttctggccgctgcctggagcctacatccctag

SEQ ID NO: 248095 - RNA, 387 nt, synthetic construct
  misc_feature 1..387: note = Description of Artificial Sequence: Synthetic coding sequence
  source 1..387: mol_type = other RNA
atggggatccagggcggcagtgtactgtttgggttgcttcttgtccttgcggtcttttgtcactccggtcactctctccagtgctacaactgtccaaaccccacagcagattgcaaaactgcagtgaactgctcaagtgatttcgacgcctgcctcatcacaaaggccggactccaggtttataacaagtgctggaaattcgaacactgtaatttcaacgacgtcacgacaaggctcagagaaaacgaactgacatactattgctgcaagaaggacctgtgtaactttaacgaacagctcgaaaatggcggcacttcactctccgaaaaaacagtccttctgcttgtaaccccctttctggcggctgcttggtcactccatccttag

SEQ ID NO: 248096 - RNA, 387 nt, synthetic construct
  misc_feature 1..387: note = Description of Artificial Sequence: Synthetic coding sequence
  source 1..387: mol_type = other RNA
atgggtattcaaggaggtagtgtgctcttcgggctgttgctagtattggccgttttctgtcactctggacactcattacagtgctataactgtccaaacccgactgctgactgtaaaaccgctgtgaattgcagttcggatttcgatgcttgtcttattacaaaagcaggactccaagtctacaataagtgctggaaatttgaacattgtaacttcaacgatgttacaactcgactgagagaaaatgaactgacctattactgctgcaagaaagatctatgtaatttcaatgaacagctcgaaaatggagggacaagtcttagcgagaaaaccgtccttctgcttgttacgcccttcttagctgccgcgtggtcgcttcatccctag

SEQ ID NO: 248097 - RNA, 387 nt, synthetic construct
  misc_feature 1..387: note = Description of Artificial Sequence: Synthetic coding sequence
  source 1..387: mol_type = other RNA
atgggaatccaaggggggtccgttctcttcggtcttctccttgtcctagctgtgttctgccattccggccactcactgcaatgttataactgtcctaatcctactgccgactgtaagacggcggtaaactgctcttctgattttgatgcttgcctgattaccaaagcgggacttcaagtttataataaatgctggaagttcgaacattgtaacttcaacgacgtgaccaccagactgcgcgaaaacgagctaacatactattgctgcaaaaaagacctttgtaacttcaacgaacaactcgaaaatggcgggacctctttgtcagaaaaaactgtgctgctcctcgtaacaccgtttttggccgcagcatggtccttgcacccttag

SEQ ID NO: 248098 - RNA, 387 nt, synthetic construct
  misc_feature 1..387: note = Description of Artificial Sequence: Synthetic coding sequence
  source 1..387: mol_type = other RNA
atgggaatccaggggggttctgtactcttcggcctgcttctcgtcctcgcagtgttctgtcattctggacattctctacagtgctacaactgccccaaccctactgccgattgcaagaccgctgtgaactgtagtagcgactttgacgcttgcctgattactaaagccggcctgcaggtctataataaatgctggaaatttgagcattgcaactttaatgatgtcaccaccagattgcgtgagaacgagctgacttactattgctgtaaaaaggatctttgcaatttcaacgaacaattagaaaatggcgggactagcttgtctgagaagactgttttactgttggtgacccccttcctcgccgccgcttggtcacttcatccatag

SEQ ID NO: 248099 - RNA, 387 nt, synthetic construct
  misc_feature 1..387: note = Description of Artificial Sequence: Synthetic coding sequence
  source 1..387: mol_type = other RNA
atggggatccaaggtgggtcagtgttgttcgggttgctcctggttttagccgtattttgtcatagtggccacagtctgcagtgctacaactgtccgaatcctaccgccgactgtaagacagcagtgaattgctcttccgatttcgacgcctgccttattacaaaagcgggactgcaggtgtacaataaatgctggaaatttgaacactgtaacttcaacgatgtaacgacccgactgagagagaacgaactgacttactattgctgcaaaaaggatctttgcaacttcaatgagcaactcgaaaacggcggaacctctttatcagaaaaaaccgtgcttcttttagtgacacctttcctggctgccgcttggtctctgcacccatag

SEQ ID NO: 248100 - RNA, 387 nt, synthetic construct
  misc_feature 1..387: note = Description of Artificial Sequence: Synthetic coding sequence
  source 1..387: mol_type = other RNA
atgggcatccagggcggcagtgtactcttcgggctgctgcttgtgttggccgttttctgccattctggacattctctgcaatgctataattgtcccaatccaaccgccgactgtaagaccgccgtaaactgctcttcggacttcgacgcatgtctcatcacaaaggcaggactgcaggtgtataataaatgctggaaattcgaacactgtaacttcaacgacgtgacaacacgactgcgcgaaaatgaactcacatactactgctgtaagaaggatctatgtaacttcaacgagcaattggaaaacggcggcaccagtctctcagagaagacggtcctcctcctagtaactcctttcctcgccgcagcatggtcgctccatccctag

SEQ ID NO: 248101 - RNA, 891 nt, synthetic construct
  misc_feature 1..891: note = Description of Artificial Sequence: Synthetic coding sequence
  source 1..891: mol_type = other RNA
atgcatagacgaagaagcagaagctgccgcgaagaccaaaaacccgtgatggacgatcagcgtgacttaatcagcaataacgagcagctgcctatgctcggccgcaggcccggcgccccagagtccaaatgcagtagaggagccttgtataccggcttcagcatattggtcaccttacttctggccgggcaagcaacgaccgcttactttctgtatcagcaacaaggaagactggataagctgactgtcaccagtcagaatctccagctggagaatctaagaatgaaactcccgaagccccccaagccagtgtctaaaatgaggatggcaaccccgcttctcatgcaggcccttcctatgggcgctctcccacagggtcctatgcagaatgctacaaaatacggaaacatgactgaggatcacgtaatgcatttgttacaaaatgctgacccactaaaggtctacccacccctcaaaggatctttcccagagaatcttcgccatttgaagaatactatggagaccattgactggaaggtgttcgagtcctggatgcaccactggctcctatttgagatgagtaggcactcgctcgagcagaagccaacagatgcaccacccaaggtgctcactaagtgccaggaggaagtctctcacattccagccgtacatccaggttcctttcgcccaaaatgtgatgaaaacggaaattacctccctctccagtgttatggttccattggatactgttggtgtgtttttcctaacggcacagaagttccgaatacccgcagccgggggcaccataactgttctgagagccttgagcttgaagatccaagtagtggcctcggtgtcactaaacaggacctgggaccggtccccatgtag

SEQ ID NO: 248102 - RNA, 690 nt, synthetic construct
  misc_feature 1..690: note = Description of Artificial Sequence: Synthetic coding sequence
  source 1..690: mol_type = other RNA
atggcccgcttggccttgtctccagttccttctcattggatggtggccctgttacttctgttatctgcggaaccagtcccagccgctaggagcgaggaccgataccggaaccccaaaggctccgcctgcagtaggatttggcagtcccctcgcttcatagctcgtaaacgaggttttaccgtcaagatgcactgttacatgaacagcgcaagcggaaatgtgagctggctttggaagcaggagatggatgaaaatccgcagcagttaaagctagagaagggacggatggaggagtctcagaacgagtccctcgcaactcttaccatccaaggtattcggttcgaggacaatggcatttatttttgccaacagaagtgcaataatactagtgaagtgtatcaaggatgtgggaccgaactgagggtaatgggcttttcaacgctggcacagcttaaacagcggaatacacttaaagacggcattatcatgattcagacactgttaatcatcttgttcatcatcgtgcctatcttcttacttcttgacaaggacgactctaaggctgggatggaagaagatcatacatacgagggcctggatattgatcaaacagcaacctatgaagacatagtaacgcttagaacaggagaggtaaaatggagtgtgggggaacatccaggacaggaatag

SEQ ID NO: 248103 - RNA, 687 nt, synthetic construct
  misc_feature 1..687: note = Description of Artificial Sequence: Synthetic coding sequence
  source 1..687: mol_type = other RNA
atgcctgttaaaggaggtaccaaatgcattaaatatctactgttcggcttcaattttattttctggttagcaggaatagccgtcctcgcaatcgggctctggctcagatttgacagccaaactaaatccatttttgagcaggaaaccaacaacaacaattcgagtttttacaccggagtgtatattctgatcggagcaggagcattaatgatgttagtgggctttttggggtgttgtggagcagtccaggagtcgcagtgcatgctgggattattctttgggtttctcctggtaatatttgctatcgagattgctgccgcaatttggggatactcccacaaggatgaagtgataaaggaagtccaggaattctataaagatacctacaacaagctaaagaccaaagacgaacctcagagagagaccttaaaggcaattcattatgctctcaattgttgcggacttgccggaggagtggagcagtttatatcagatatctgcccaaagaaggacgtgttagaaactttcacagtgaaaagttgtcctgacgcaataaaggaagtcttcgacaataagtttcacatcattggtgcagttggaatcgggatagcggtggtgatgatattcggcatgatcttctcaatgattctatgctgcgcgatccgccgtaacagagagatggtttag

SEQ ID NO: 248104 - RNA, 2475 nt, synthetic construct
  misc_feature 1..2475: note = Description of Artificial Sequence: Synthetic coding sequence
  source 1..2475: mol_type = other RNA
atgactgtgctgcaggagcccgttcaagcagcgatttggcaggcactgaaccactatgcgtaccgcgatgctgtgtttttggctgagcggctctacgccgaagtccattccgaagaggccctcttcttgctggcgacttgttattaccgctcagggaaagcctacaaagcctaccgcctcctgaaagggcactcctgtacaactccgcagtgtaagtatctgctcgcaaagtgttgcgtggatctgtcaaagcttgccgaaggggaacagatcctctctggcggagtttttaacaaacagaaaagccacgacgacatcgtgacggagttcggagattccgcttgcttcacactgagcttgttaggtcatgtatattgtaagaccgaccgcctggcaaagggctctgaatgttaccagaaaagtctctccctgaaccccttcctctggtccccatttgaatcactgtgtgaaataggcgagaaacccgatcctgaccagacatttaaatttacatcgttacagaacttcagtaattgcttgcccaactcttgcacgacacaggttcccaatcacagcttgtctcacaggcagccagagacagtacttaccgagacccctcaggataccattgagcttaacagactaaacctggagtcctctaattctaaatactcactgaataccgattcctccgtctcttacatcgattcagctgtcattagtcccgatacggttccgcttggaaccggcacatccattctgtccaaacaggttcagaacaagcccaagacggggagaagcctgctgggcggcccagcagcgctttcccccttaactccctccttcggaatcttgccactagaaaccccctcccctggcgacggctcctacttacagaattacactaacacaccgccggtcattgacgtaccttcaacaggagcaccatcaaagaaaagtgtggcgagaattggccagactggaaccaagagcgttttttcccagagcgggaacagccgcgaggtcacaccaattctggctcaaacacaatcctctgggccccagactagcaccacgccccaggtactctccccaaccataacaagccctcctaatgcactgcctcgcaggtctagtcgactgtttacatccgacagttcaactactaaggagaattcaaagaaacttaaaatgaagttccctcccaagatacccaatagaaagacgaagtcaaagacaaacaaaggaggtattactcaacccaacatcaacgattccctggaaatcaccaagcttgacagcagtataatatccgaaggtaaaatatcaactattacgcctcagattcaggcttttaaccttcagaaagcagccgctgagggactgatgtcccttctgcgagagatgggaaaaggttaccttgccctctgtagctacaattgtaaagaagccataaacatcttgtcccacctaccatcacatcattataatacaggatgggtgctgtgtcagatcggccgcgcatacttcgagctgtctgagtatatgcaagcggaacgaatcttcagcgaggtacgtcgaattgaaaactatagagtggaggggatggaaatctactcaactactctgtggcacctgcagaaagatgtggccctctccgttcttagcaaggatcttaccgatatggacaagaactcccctgaagcatggtgcgccgctggaaactgtttctcccttcaacgtgaacatgacatcgccatcaaattctttcagagggctattcaggtggatcctaactacgcttacgcatacacccttcttggacacgaattcgtacttacggaggaactggacaaggcactcgcctgcttccggaacgctatcagggtcaatccgagacactacaacgcctggtacggactcggcatgatctactataagcaggaaaaattttctttggccgagatgcactttcagaaggccctggacatcaacccacagagttccgtgctgctgtgtcacatcggagtcgtgcaacacgcccttaaaaagagcgaaaaagccctggacacgctcaacaaagctatagtgattgatcccaaaaatcctctctgtaagttccaccgcgcatcagttctctttgctaatgagaaatacaaaagtgcccttcaggagttggaagaattgaagcaaatcgtgccaaaagagtcccttgtctacttcctgattggcaaggtgtataaaaaattagggcagacccaccttgctcttatgaatttctcatgggcaatggatcttgatccaaaaggagcaaataatcagattaaagaagctattgacaaacgctaccttcctgatgacgaggaacctatcacccaggaggagcagataatggggaccgacgagagccaagaaagctcaatgacagacgccgatgacacccagctacacgcggctgaatcagacgaattttag

SEQ ID NO: 248105 - RNA, 342 nt, synthetic construct
  misc_feature 1..342: note = Description of Artificial Sequence: Synthetic coding sequence
  source 1..342: mol_type = other RNA
atgaaagtttccgtcgctgccctttcttgtctcatgctggtcgccgttctgggctcccaggcacagtttatcaacgacgctgagaccgagctgatgatgagcaaactgcctctggaaaaccccgtggtgctaaactccttccattttgctgccgactgctgcacctcctatatttcccaatcaattccttgttctctgatgaaaagttacttcgaaacgagttccgagtgctccaagccaggagttatcttcctcacaaaaaaaggtagacaggtctgtgcaaaacccagcggccccggggtgcaggactgcatgaagaaactgaaaccttatagtatctag

SEQ ID NO: 248106 - RNA, 186 nt, synthetic construct
  misc_feature 1..186: note = Description of Artificial Sequence: Synthetic coding sequence
  source 1..186: mol_type = other RNA
tgatgcactagctacatcagccagtccattccctgttcgttgatgaaatcatacttcgagactagttccgagtgctcaaaacccggcgttattttcctgactaaaaagggacgacaagtgtgtgcgaaaccaagcggcccaggcgtgcaagattgcatgaagaagcttaaaccatactccatatag

SEQ ID NO: 248107 - RNA, 342 nt, synthetic construct
  misc_feature 1..342: note = Description of Artificial Sequence: Synthetic coding sequence
  source 1..342: mol_type = other RNA
atgaaggtatctgtggctgctctctcctgccttatgctcgtcgcggtgctaggctcccaggctcagttcatcaatgatgccgaaaccgaactaatgatgtccaaattaccactcgaaaacccagtcgtgttaaattcttttcatttcgctgccgactgttgcacatcttatatctcacagtctatcccctgctcactcatgaagtcctacttcgagacctcgtctgagtgtagtaagccaggggttattttcctgacgaagaagggacgtcaagtgtgtgctaaaccatcagggcccggcgtccaggattgcatgaagaaactgaaaccctatagtatctag

SEQ ID NO: 248108 - RNA, 342 nt, synthetic construct
  misc_feature 1..342: note = Description of Artificial Sequence: Synthetic coding sequence
  source 1..342: mol_type = other RNA
atgaaagtatcagtggcagccctgtcctgtcttatgctggttgcagtgctgggtagccaagctcagtttattaacgacgccgagaccgagctcatgatgagtaaactcccgctagaaaaccccgtggtcctcaactctttccattttgcggcagattgctgcacctcatatatttctcaatcaattccttgctcactgatgaagagctactttgaaaccagctcagagtgctcaaaaccaggtgtgattttcttgacaaaaaaaggaaggcaggtatgcgcaaaaccctctggcccgggtgttcaagactgtatgaaaaagcttaaaccctattccatctag

SEQ ID NO: 248109 - RNA, 270 nt, synthetic construct
  misc_feature 1..270: note = Description of Artificial Sequence: Synthetic coding sequence
  source 1..270: mol_type = other RNA
atgaagggtcttgccgctgccttactggtcttggtatgcaccatggctctctgctcttgcgctcaggtggggaccaataaggaattgtgctgcctcgtgtatacgtcttggcaaattccacagaagtttatagtagactactccgaaactagcccacagtgtcctaagcccggcgttatcttacttacaaaacggggcaggcagatctgcgctgatccgaataagaagtgggtacaaaagtatatatccgatttaaaactgaacgcttag

SEQ ID NO: 248110 - RNA, 285 nt, synthetic construct
  misc_feature 1..285: note = Description of Artificial Sequence: Synthetic coding sequence
  source 1..285: mol_type = other RNA
atgatgggcctttcccttgcatcagccgtgctgctcgcctcactgttgtctcttcatctgggcacagcaaccaggggcagcgacattagtaagacttgttgtttccagtatagccacaaaccattaccatggacctgggtacgatcatacgagttcacaagcaatagctgcagtcagagggctgtgatcttcacgacaaaacgcggaaaaaaagtctgcactcaccctagaaaaaagtgggtccagaaatacatatctcttctaaagacccctaaacaactttag

SEQ ID NO: 248111 - RNA, 384 nt, synthetic construct
  misc_feature 1..384: note = Description of Artificial Sequence: Synthetic coding sequence
  source 1..384: mol_type = other RNA
atgcagcaaagaggcttagccattgtggccctcgcagtttgtgctgcactccatgcatccgaagccattctgcccattgccagcagttgctgcacagaggtttcccatcatattagcagacgcctgctcgagcgtgttaacatgtgccgaatccagagagctgacggggattgtgaccttgccgctgtcatactccacgtaaaacgccgccgcatctgtgtttccccacataatcataccgtgaaacagtggatgaaggtgcaggctgctaagaagaacggaaagggcaacgtttgtcacagaaagaagcaccacggaaagaggaatagtaatcgagctcaccagggaaaacatgagacgtacggacacaaaacaccatactag

SEQ ID NO: 248112 - RNA, 384 nt, synthetic construct
  misc_feature 1..384: note = Description of Artificial Sequence: Synthetic coding sequence
  source 1..384: mol_type = other RNA
atgcagcagcggggactagctatagtcgcacttgccgtgtgtgcagccctccatgcttccgaagctatacttcccatagccagtagctgttgcactgaggtctcccaccatatctcaagaaggctgttagagagggtcaatatgtgtcgaattcagagagcagacggggattgtgatctcgccgccgtaattttacacgtaaaacgtcgaagaatctgcgtatcacctcataatcatacagttaagcagtggatgaaagtacaagccgcaaagaagaacggtaaaggcaacgtctgtcatcggaagaaacatcacggcaagaggaattccaaccgggcccatcaggggaaacacgaaacttacggacataagactccttactag

SEQ ID NO: 248113 - RNA, 243 nt, synthetic construct
  misc_feature 1..243: note = Description of Artificial Sequence: Synthetic coding sequence
  source 1..243: mol_type = other RNA
atgtgtagaatacagcgcgccgacggagattgtgacctggccgccgtcatcctgcacgtcaagcgaagacggatttgcgtgagtccacataatcacacagttaaacaatggatgaaagtgcaggcagcgaaaaaaaatggaaaggggaacgtgtgccataggaaaaaacaccacggcaaacgcaattctaaccgtgcacaccaaggaaaacatgaaacatacggccacaagacaccatactag

SEQ ID NO: 248114 - RNA, 354 nt, synthetic construct
  misc_feature 1..354: note = Description of Artificial Sequence: Synthetic coding sequence
  source 1..354: mol_type = other RNA
atgcaacagagagggctagcaattgtggctctcgccgtttgcgccgcactacacgcgtccgaagccatcctgccaatcgcctcctcctgttgtacagaagtatctcatcatatctcccgaaggctgcttgagagagtgaatatgtgcagaatccaacgcgccgatggtgactgtgatctcgcggccgtgatgctggaatgtagcgatatgatctccgcccattataatcttcacctcccaggttccaatgactctccgacctccgccttccaggtggccggaattaccgctttcatgagctctgcagaggaatcagtgagcgctcggactaccatcctgcttagtagtggctag

SEQ ID NO: 248115 - RNA, 1194 nt, synthetic construct
  misc_feature 1..1194: note = Description of Artificial Sequence: Synthetic coding sequence
  source 1..1194: mol_type = other RNA
atggctccaatttcccttagctggttgctccgacttgctactttttgccatctgactgtgctgctggctggccaacaccatggagtcaccaagtgtaacatcacctgtagcaaaatgacgagtaagattccagtggcccttctaatacattatcagcagaatcaggccagttgtggtaagcgagcgattatcttggagacccgacaacacagactcttctgcgctgaccccaaggaacagtgggtgaaagacgctatgcagcacctagacaggcaagcagccgccctgacgcggaatggagggacatttgagaagcagattggagaagtcaagccacgcacaacgcctgccgcaggcggaatggatgaaagcgtagtgctcgagcccgaggcaaccggagagagttccagcctggagcccactccgtcaagccaggaagcacaaagggctttaggaacctccccagagctccctacaggagttacagggagttctggtactcgattgcctccaacccccaaagcccaggatggaggaccagtcgggaccgagcttttccgggtaccaccagttagcacagccgctacttggcagtcttcagccccgcatcaacccggcccctcgctttgggccgaagccaagacttccgaggctccttccactcaagatccatccacacaggcctcaacagcttcttcccctgcccccgaggagaatgcccccagcgaaggacagagggtctggggtcaaggccagagtcctaggcctgagaactcactggaaagagaagagatggggccagtgcccgcccataccgatgcattccaggactggggaccaggtagcatggcccacgtgtctgtggtccctgtttcgtcagaaggaaccccatctagggagccagtcgcatccggctcatggacacccaaggccgaagaaccaattcatgcgacaatggatccacaacgtctgggagtgctcatcactccagtgcccgacgctcaggcagccacaaggcgccaggcagtgggattgttggcattcctgggcctactcttttgcctgggagtggctatgtttacttaccagagcctgcaggggtgtccccgcaagatggctggggaaatggctgaaggtctaagatacattccccggtcctgtgggtctaattcttatgttttggtgcccgtttag

SEQ ID NO: 248116 - RNA, 285 nt, synthetic construct
  misc_feature 1..285: note = Description of Artificial Sequence: Synthetic coding sequence
  source 1..285: mol_type = other RNA
atgtctgtaaagggcatggcgatcgcattggcggtaatcttgtgcgctactgtcgttcaagggttccctatgttcaaacggggaaggtgcctctgtatcggaccaggcgtaaaggctgtgaaggtggcagatatcgagaaggctagcatcatgtacccgtccaataactgcgataaaattgaggtgataatcacattgaaggaaaataaaggacaaagatgcttaaatcctaaatccaaacaggcccggcttataattaagaaggttgagcgcaagaatttttag

SEQ ID NO: 248117 - RNA, 285 nt, synthetic construct
  misc_feature 1..285: note = Description of Artificial Sequence: Synthetic coding sequence
  source 1..285: mol_type = other RNA
atgagcgtgaagggaatggccatcgccctcgccgtcatcctgtgtgctaccgtggtccaaggatttcccatgtttaaaagaggacgctgcctgtgcatcggtccaggagtaaaagctgtgaaagtggcagacatcgaaaaggcttccataatgtacccatcaaataattgtgacaaaatcgaggtcatcatcacacttaaggaaaataaggggcaaagatgcctgaaccccaagagcaagcaagccagactcattattaagaaggtggagagaaaaaacttctag

SEQ ID NO: 248118 - RNA, 1431 nt, synthetic construct
  misc_feature 1..1431: note = Description of Artificial Sequence: Synthetic coding sequence
  source 1..1431: mol_type = other RNA
atgaccaaacttatcctgcttactggcctcgtcctgatactcaatttgcaattgggttctgcctaccagctgacctgttacttcactaactgggcccagtataggccgggtctgggcagattcatgcctgacaatattgacccctgtctgtgcactcacctcatctatgcattcgccggcagacagaataacgaaattacgacgatcgaatggaacgacgtcactctttaccaggcgttcaatggcctgaaaaacaaaaatagccaactcaaaaccctactcgccatcggcggttggaacttcggaaccgctccgttcaccgcaatggtgtccacacctgagaaccgtcagacgtttattacaagtgttatcaaattcctgcggcaatacgaattcgacggcctcgatttcgattgggagtaccccggctccagaggctcacccccacaagataaacacctcttcacggtactggtgcaggagatgcgtgaagcctttgagcaggaggcgaaacagatcaacaagccaagactgatggtcacggccgccgtggctgccggaatctctaatatccagtcgggctatgaaataccacaactttctcagtacctggactatattcatgtgatgacttacgacctgcatggaagttgggaaggatatacaggtgagaacagtcccctctataagtaccctacagataccggctcgaacgcttatctcaatgtggattatgtaatgaattattggaaggataacggagctccagccgagaaactgattgtgggctttcccacatacggacacaactttatcttgtcaaatccatcgaacacagggatcggagcccctaccagtggcgctgggcctgcgggcccttacgccaaggaatccggaatttgggcttactacgagatctgcacctttctaaaaaacggcgcaacacagggatgggatgctccacaagaagtgccatatgcctaccagggcaatgtgtgggtcggctacgataatattaaaagttttgatatcaaggctcaatggctaaagcacaataagtttggcggagccatggtgtgggcaattgacctcgatgatttcaccggaaccttctgcaaccagggcaaatttcctttaatttctacgttgaaaaaagcactgggcttacagagtgctagctgtaccgctcccgcacagccaattgagccaattacagccgcaccatctggaagcgggaatgggtctggcagctccagttccggcgggtcgtccggagggtcagggttctgtgcagtccgtgcaaatggtctgtatcccgtcgcaaataaccgcaacgccttctggcactgcgtcaacggtgtgacctaccagcaaaactgccaagctggcctagtgtttgacacgagttgcgactgttgtaattgggcatag

SEQ ID NO: 248119 - RNA, 948 nt, synthetic construct
  misc_feature 1..948: note = Description of Artificial Sequence: Synthetic coding sequence
  source 1..948: mol_type = other RNA
atgagagaagccttcgagcaagaggcaaagcagataaataaaccacgactgatggtcacagcggctgttgctgccggcatttccaacattcagagcggctacgagattccacagctaagtcaatatctggattacattcacgtgatgacatacgatctccacgggtcctgggagggctatacaggagagaacagcccgctgtacaagtaccccactgacaccgggtctaatgcatacctgaacgttgattacgtcatgaattactggaaagacaatggtgctcctgccgagaagctgatagtgggatttccaacctacggtcataattttatcctgagcaatccatcaaacactggcatcggagccccaactagcggggccggtccggcaggcccttacgccaaggaatcaggaatctgggcctattacgaaatctgcacttttttgaaaaatggcgccacacaggggtgggatgcaccgcaggaagtgccttatgcatatcaaggaaacgtttgggtgggttacgacaacattaagtctttcgatattaaagcacaatggttaaaacacaacaaattcgggggagctatggtctgggctatagacctggacgacttcacaggaactttctgcaatcaaggtaagttccccctgatcagcactctcaaaaaagcactcggcttgcaatcagcatcttgcaccgctcccgcacaaccaatagaacctatcacggccgcgccctcagggagcggcaacgggtccggatctagctcatccggtggaagctcgggtggatccggattctgtgcagtgcgtgctaacggtttatacccggtggctaacaataggaatgcgttctggcactgtgtaaacggtgtgacgtaccaacagaactgtcaggccggcctcgtgtttgatacaagctgtgattgctgcaactgggcctag

SEQ ID NO: 248120 - RNA, 1431 nt, synthetic construct
  misc_feature 1..1431: note = Description of Artificial Sequence: Synthetic coding sequence
  source 1..1431: mol_type = other RNA
atgactaaactgatcctgctgacaggactcgtgctgatattgaacctgcagctgggctctgcctaccagttaacctgctacttcacgaactgggcacaatacagaccgggactaggtagatttatgcccgataacatcgatccctgcctctgtacacatctcatctatgccttcgctggacgacagaacaacgagataaccacaattgaatggaacgatgtcactctttatcaagcctttaatggcctcaagaataagaatagtcagttaaaaacgttgctggccattggcggatggaacttcgggactgccccttttactgcaatggtgtctacccccgaaaacagacagacattcatcacatcggtgattaaatttctccgccagtacgagttcgacggcttggatttcgattgggaataccctggcagtagaggctccccacctcaggacaagcacctgttcaccgttctggtccaggaaatgcgagaagcattcgaacaagaggcaaagcagatcaataaaccccggttgatggtgaccgctgccgtcgccgcgggtattagcaacattcagtcaggatatgaaatccctcagctgagtcaatacctggattacatccatgtgatgacctacgacctgcatggttcttgggaggggtacactggagaaaacagcccgctgtacaagtaccctacggataccggtagcaacgcttacctgaacgtcgactatgtgatgaattattggaaagacaatggagccccggccgagaaactgatcgtaggttttcctacatacggccacaacttcatcttatctaacccaagtaacaccggtatcggagccccaacgtctggtgctgggccagccggaccttatgccaaagagagtggaatctgggcgtactacgaaatatgtacatttctgaagaatggggccactcagggctgggacgccccgcaggaggtgccgtacgcgtaccagggtaacgtctgggtcgggtacgacaacatcaaatcttttgatatcaaggctcagtggctgaagcacaacaaatttggtggagctatggtttgggcaatcgatctcgatgatttcactggcaccttctgtaatcagggaaaattccctttaatcagcaccctgaaaaaagctcttggcctccaatctgcttcttgcactgcgcccgcgcagccgatcgagccgatcacagccgccccaagtggttccggcaatggctccggatccagtagtagtggaggatcctcaggcgggagcggattttgtgccgtccgcgcgaatggactctaccctgtggccaacaatcggaacgctttttggcactgtgttaacggggttacttatcaacagaactgccaggccggattggttttcgacacatcctgtgactgctgtaattgggcctag

SEQ ID NO: 248121 - RNA, 1263 nt, synthetic construct
  misc_feature 1..1263: note = Description of Artificial Sequence: Synthetic coding sequence
  source 1..1263: mol_type = other RNA
gaaacttcttcaagcgtgcacgaacaggttgcagattcaggggcccaggcggtagctttccagagtggtggcgaatcctcaatcgtttggaactctcagctgaaaactctgcttgctattggcggatggaatttcggcacagctccattcaccgctatggtgtccacccccgaaaaccgacagacctttattaccagtgtgattaaattcctgcgacaatatgagttcgacggtttagattttgattgggagtatcccggaagtcgcggctcacctcctcaggacaagcacctcttcacagtcctcgtgcaggagatgagggaggcctttgagcaggaggccaaacaaatcaataaacctagattgatggtcacggctgctgttgccgctgggatttctaacattcaatccggttatgaaattccccaacttagccagtacctggattatatacacgtaatgacatatgatctacatggatcgtgggaggggtacacaggtgaaaatagtccgctgtataagtatcccaccgatactggctctaacgcttacttgaacgtagactatgttatgaattactggaaggacaatggcgctcccgccgagaagctcatcgtcggattcccaacctatggacacaactttatactgtcgaacccatccaataccgggatcggagcaccgacatcaggcgccggacccgcgggcccatatgccaaagagtccggcatatgggcttactacgaaatttgcacctttttgaaaaatggagccacacagggctgggatgccccacaggaggttccgtatgcctaccaaggaaacgtctgggttggatatgacaatatcaaatccttcgatataaaggcacagtggcttaagcataataagtttggaggggctatggtctgggcaatagacctggatgacttcacaggaacattctgcaaccagggtaagtttcctctcatctcaacgctgaagaaggccctgggactccagtctgcatcctgcactgcgccagcccagcctatagaacctattacggccgccccaagcggcagcggaaatggtagtggatcttcatcttccggtggctcctccggcgggtcggggttctgtgctgtgagagcaaatggattatatcccgtggccaacaaccgcaatgcattctggcactgtgtcaatggtgtgacctaccaacagaactgccaggctgggcttgtctttgacacctcctgcgactgttgcaattgggcgtag

SEQ ID NO: 248122 - RNA, 1107 nt, synthetic construct
  misc_feature 1..1107: note = Description of Artificial Sequence: Synthetic coding sequence
  source 1..1107: mol_type = other RNA
atggtgtcaacccctgagaaccgccagacattcattaccagtgtgattaagtttctgagacagtacgaatttgatggcctcgacttcgactgggagtacccgggatcgcgaggcagcccaccgcaggataaacatctttttacagtgctggtccaggaaatgcgcgaggcattcgaacaggaggcgaagcagatcaataagcctcgcctgatggtgaccgccgccgttgcagcaggtatcagcaatattcaaagcggttatgaaattcctcagctgtcgcagtatctcgactatatccatgtgatgacctatgacttgcacggaagttgggagggctacaccggggaaaactctccactgtataagtatccaaccgacacagggtctaatgcgtacctcaacgtcgattatgtcatgaattattggaaggacaatggagccccagctgagaagttgattgtcggttttcccacatatggacacaattttatcctcagtaacccaagcaatacgggtatcggcgcaccgacgtctggcgctggaccagccgggccctacgcaaaagaaagtggtatctgggcatattacgaaatctgcacattccttaaaaatggcgccacccagggttgggatgcacctcaggaggtcccttatgcttatcagggcaacgtctgggtgggttacgataatatcaagagctttgacattaaggcacagtggctcaagcataacaagtttggcggggcgatggtttgggcaatcgacttggatgattttactggtactttctgtaatcagggaaagttccccctcatttccacactcaagaaggctttaggcctgcagtcagcctcatgcaccgctcctgctcaacctatagaaccaattacagcggccccctccggatcaggtaatggaagcgggtcatcgtccagtggcgggtcatcaggcggtagtgggttttgtgccgtccgagctaacggcctttacccagtggctaacaaccgaaacgctttttggcactgtgtgaatggtgtcacttaccagcagaactgccaagcaggacttgtttttgatacatcatgtgactgctgtaattgggcctag

SEQ ID NO: 248123 - RNA, 948 nt, synthetic construct
  misc_feature 1..948: note = Description of Artificial Sequence: Synthetic coding sequence
  source 1..948: mol_type = other RNA
atgcgagaggcattcgaacaagaggcaaagcagattaacaaaccacggctgatggttacagcagcagtggcagcaggcatctctaacatccagtccggatatgagattccccaactgagccaatatcttgactacatacatgtgatgacttatgacctccacggatcctgggagggctacactggagaaaatagcccactgtacaagtatcctaccgacacaggctcaaacgcctatcttaatgtggattacgtcatgaattactggaaagacaacggagctccagcagagaaactaatagtcggattccctacgtacggacataacttcatactgtcaaacccatccaatacaggaattggcgcccccaccagcggggcaggcccagcaggaccttacgcgaaggaatccggaatctgggcatactacgagatctgcacatttctcaagaatggagccacacagggctgggacgccccacaagaggtcccttacgcctaccagggaaatgtttgggtcggctacgacaacattaagagctttgatattaaagcccaatggttgaaacataataagtttggcggcgccatggtctgggcgatcgatttagatgattttacaggcactttttgtaaccagggcaaattccccctcatctccactctcaagaaagcactgggactacaatcggcttcatgcactgctccagcccagcctattgaacccatcacggctgccccgtccggctccggaaacgggagtggctcctcttcatccggggggagtagcggaggaagcggattctgcgctgtaagggccaatggcttgtacccggttgcgaacaataggaatgccttttggcactgcgtgaacggcgtaacttatcagcaaaattgtcaggccggactggtcttcgacacttcttgcgactgttgtaactgggcatag

SEQ ID NO: 248124 - RNA, 948 nt, synthetic construct
  misc_feature 1..948: note = Description of Artificial Sequence: Synthetic coding sequence
  source 1..948: mol_type = other RNA
atgagagaggcattcgaacaagaagctaagcagatcaataaaccaaggctgatggtcactgcagccgtcgcagcgggcatctccaacattcagtctgggtatgaaatcccccaattgtctcagtaccttgactatatccacgtgatgacatatgacctgcatggttcttgggaaggatataccggtgagaacagccctctgtacaagtatccaacagacacagggtctaacgcatatttaaacgtggattatgtgatgaattattggaaggacaacggtgctcccgctgagaagcttatcgttggtttccctacatacggtcataacttcattctgtccaatccctctaatacgggaattggagcacccacatcaggcgcagggccagctggtccctacgctaaagaaagtggtatctgggcctattacgagatttgcactttcctaaaaaatggcgcaacacagggctgggacgctcctcaggaagtaccctatgcctaccaagggaatgtgtgggtcggttacgacaacataaagagttttgacatcaaggcgcaatggcttaaacacaacaaatttggtggggctatggtgtgggcaattgaccttgacgactttaccggcaccttttgcaatcagggaaagtttccgctaatatccaccctcaagaaagccctcggtctgcagtctgcctcatgcactgcacccgcccagcctattgagcctattacagcagcaccctccggatccgggaatggtagtggctcttcaagctctggagggtcatctggtgggtcgggtttttgcgctgtgagagcaaacggcctctaccctgtcgctaataatcggaacgccttttggcactgcgtgaatggcgtaacttatcagcagaactgtcaggcgggactcgtctttgacacctcttgtgactgctgcaactgggcttag

SEQ ID NO: 248125 - RNA, 864 nt, synthetic construct
  misc_feature 1..864: note = Description of Artificial Sequence: Synthetic coding sequence
  source 1..864: mol_type = other RNA
atgagagaggccttcgagcaagaggctaagcaaattaataaaccaagactgatggtaacggcagcagtggcagccggcattagcaacattcagagcgggtacgaaattccacagttatcccagtatttggactacattcacgtaatgacctatgacctccacggcagctgggagggctataccggggaaaattctcccctatacaagtatcccactgacacagggtccaatgcctacctgaatgtcgattatgtcatgaactactggaaggacaacggggccccggcggagaaactaattgtaggattccccacgtacggacacaacttcatcctctctaatccaagcaacaccggtattggcgcccccacctctggggccggaccagcaggcccctacgcaaaggaatccgggatttgggcatattacgagatctgtacttttttaaaaaacggggccacccagggatgggatgcccctcaggaggtcccctatgcttatcagggaaacgtttgggtaggttatgataatataaagtcgttcgacatcaaagcccaatggctaaagcacaataagtttgggggggcgatggtgtgggcgatcgaccttgacgattttacaggcaccttctgtaaccaaggaaaattccccctgatatcaactctgaaaaaggctctgggcttacagtcagctagctgcaccgcccccgcacaaccaatcgaacccatcactgccgctccaagtggttcgggtaatggaagtggcagttcatcttctggaggatcgtctggtggcagtggcttctgcgccgttagagccaatgggctctaccctgtcgcgaataaccgcaacgctttttggtag

SEQ ID NO: 248126 - RNA, 2319 nt, synthetic construct
  misc_feature 1..2319: note = Description of Artificial Sequence: Synthetic coding sequence
  source 1..2319: mol_type = other RNA
atgaggctgtcctcactgctggccctattacgccctgcactgccgctcattctcgggctttctttaggctgttcattatctcttctcagagtttcctggatacagggggagggcgaagacccgtgcgtggaagcagttggagagcgtggcgggccccaaaaccctgatagccgggctagacttgaccagtcagatgaggactttaaaccccggatcgtcccctactatcgggatccaaataagccctacaagaaggtgctgcggactagatacatacagactgagctcgggagccgtgagagacttcttgtggcagtcctgacaagtagggcaacgctctctaccctagcagtggcagtgaaccgaacagtcgctcaccacttccctcgcctgctttactttacgggacagcggggggccagagcaccagctggtatgcaggtcgtgtctcacggggacgaaaggcccgcatggctcatgtcagaaacactcagacatctacacacccactttggggctgactacgactggttttttattatgcaggacgacacctatgtgcaggcaccacgtcttgctgcattggctgggcacctgagcatcaatcaggatctgtacctgggccgcgcagaagagttcattggagcaggcgagcaggcccgctactgtcacggaggatttggttatcttctgagtcggtctcttcttttacgcctccgcccacatctcgatggctgccggggagatatcctgagtgccaggccggatgagtggctcggaagatgcttgatagattctctgggtgtgggttgcgtgtcacaacaccaagggcaacagtatagatcattcgaattggccaaaaatcgggaccccgaaaaagaaggttcctccgctttcctatctgccttcgccgtccatcccgtctcagaaggtacactgatgtaccgtctgcacaaacggttttctgcactggagctggaacgcgcctactctgagatagaacaactccaggcgcagattcgcaaccttaccgtgttaacgccagaaggcgaggccggactcagttggcccgtggggctgccggccccttttacgccccactcaagattcgaggttttaggctgggattactttacggagcagcatacattcagttgtgctgacggggctcccaaatgcccactccagggcgcctcccgagctgatgtgggcgatgccctagaaacagcactagaacagctcaatcggcgatatcaaccacgactgagatttcagaagcagcgactgctgaacggttacagacgtttcgaccctgctaggggcatggagtataccttggatttgttgctggaatgtgtgacgcagcgcgggcatcgcagggcccttgcaaggcgcgtcagtcttcttagacctttgagtagagtggagatcttaccaatgccttacgtaacagaggcaacaagggtgcagctcgtgctccctctcctggtggctgaggctgcagctgcacctgctttcctcgaggccttcgctgctaatgtcctagagcctagagagcacgcacttctcacactccttctggtgtatggccctagggaagggggacgtggcgcaccagaccctttcctgggcgtcaaggccgctgccgctgaacttgagcgcagataccctggtacccgacttgcgtggctagccgtacgagcagaagccccgagccaggtcaggcttatggacgtggtgtccaagaaacatcctgtcgacacactcttcttcctgacaaccgtctggacccggcctggccctgaagtgctgaacaggtgcaggatgaatgcaatcagtggctggcaggcattctttccagtacatttccaagaattcaaccctgcactttctcctcagaggtccccacctggcccacctggagctgggcccgacccaccaagtccccctggcgcagatccttctcgtggagcccccataggtggacgctttgacagacaggcatctgcggagggctgcttttacaatgccgattatctggctgctcgagcaaggttggccggagagctggctggacaagaggaggaggaagctctagaaggattagaggtgatggatgtctttttgcgcttctccggactccacctctttcgcgcagtcgagccggggctagtccaaaaattttcgctgcgtgactgctctccacgcctctctgaggaattgtatcacagatgccgcctgtccaatctggaggggctcgggggtcgcgctcagttagctatggcgttattcgaacaggagcaggccaacagcacatag

SEQ ID NO: 248127 - RNA, 654 nt, synthetic construct
  misc_feature 1..654: note = Description of Artificial Sequence: Synthetic coding sequence
  source 1..654: mol_type = other RNA
atggcaccaggctcaaggacctccctcttgctcgcattcgcactattatgtctgccatggctgcaggaggcaggagccgtgcaaaccgtcccattgtccagactattcgaccatgccatgctgcaggcccatcgagcccaccagttagccattgatacttaccaagagtttgaggagacttatatccccaaagaccagaaatactctttcttacacgactcccaaactagcttttgctttagcgactccattccaaccccatccaatatggaggagacacagcaaaagagtaatcttgaactcctgcgaatttccctgctgctgattgaaagctggctcgagccagtgcgctttttacgctctatgttcgccaacaacctcgtgtatgatactagcgactccgacgattaccatctcctcaaggatctagaagagggcattcagaccctgatgggacggctggaggatggaagcagacggacaggacagattcttaaacaaacctacagtaagtttgacacaaactcccacaaccacgatgccttacttaagaactatggtctcctttattgttttcgaaaagatatggacaaggtggaaacatttctgagaatggtgcaatgccgttctgttgaagggtcatgcgggttctag

SEQ ID NO: 248128 - RNA, 771 nt, synthetic construct
  misc_feature 1..771: note = Description of Artificial Sequence: Synthetic coding sequence
  source 1..771: mol_type = other RNA
atggctcctggcagtaggacctctcttcttctcgcatttgctctcttgtgtcttccttggcttcaagaagccggtgccgtgcagaccgtgcctctgagccgcctgttcgaccatgccatgctccaggcccaccgtgcccatcagctggctattgatacgtatcaggaatttgaagaaacctacatccctaaggaccagaagtactccttcctccatgactcccagacgtccttttgcttcagcgacagcatccctaccccttctaatatggaagagacccagcagaaaagtaacttagaacttctccggatctctctgctgctgatcgagtcctggctagagccagtgcggtttttacgcagtatgtttgccaacaacttggtctacgacacctctgactccgatgattatcacttactgaaagatctggaagagggcattcaaaccctcatgggggtccgagtcgcaccaggcgtcaccaatcctggcactccactggcttcaagggcgggcggagagaaatattgttgtcccctgtttagctcgaaagctttgacacaagagaactcaccctactctagttttagactcgttaatccccccgggctgtccctccaccctgaaggtgaggggggcaagtggatcaatgaaagaggccgggaacagtgcccaagtgcgtggcccctgctactgttccttcattttgccgaagcgggtcggaggcagccacctgattgggctgacccacaagcagatttgcagcaagtgtag

SEQ ID NO: 248129 - RNA, 369 nt, synthetic construct
  misc_feature 1..369: note = Description of Artificial Sequence: Synthetic coding sequence
  source 1..369: mol_type = other RNA
atggcacccggcagtagaactagcctcctgctcgcctttgccttgctgtgtctcccctggttgcaggaagctggcgccgtacagacagttccgttgtcacgtctattcgatcacgcaatgctccaagcacatcgggctcaccaactggcgattgacacctatcaggaattccgccttgaagacggcagcaggcgcactggacagatacttaaacagacttattcaaaattcgacaccaattctcataatcacgacgctctgctgaagaattatggactcctgtattgctttagaaaggatatggataaagtggagacatttctcagaatggttcagtgcagaagcgtggagggcagctgcggattctag

SEQ ID NO: 248130 - RNA, 552 nt, synthetic construct
  misc_feature 1..552: note = Description of Artificial Sequence: Synthetic coding sequence
  source 1..552: mol_type = other RNA
atggcccccggttcacgcacctcccttttgctggctttcgctctgctctgtctgccctggctgcaggaggccgagacctatatccccaaagaccagaagtattcattcttacacgactcacagacatctttctgtttctcagattctatccccaccccatctaacatggaagagactcagcagaaatccaacttagaactccttcgaatctctttactgctaatagaaagttggttggagcctgtgcggttcctgaggtccatgtttgccaacaacttagtgtacgacacttcagacagtgatgactatcaccttctcaaagatctggaggagggtatccagacgcttatgggccggcttgaggatggttcacggcgtacaggacagattctaaagcaaacatattccaaatttgatactaactcacacaaccatgatgccctgctgaaaaactacgggctgctttactgttttagaaaagatatggataaggtggagacatttttaaggatggtgcagtgtaggtccgtggagggctcttgcggattctag

SEQ ID NO: 248131 - RNA, 504 nt, synthetic construct
  misc_feature 1..504: note = Description of Artificial Sequence: Synthetic coding sequence
  source 1..504: mol_type = other RNA
atggcagctggaagtagaacatccttactcttggcttttgccctattatgtctcccttggctacaagaagcaggagccgtgcaaaccgtccctctgagtcgcctttttgatcatgccatgcttcaagcgcatcgcgctcaccagctcgccattgacacatatcaggaattcgaggaaacttatatccccaaagatcagaaatactcctttcttcacgactcccaaacgtccttttgctttagtgactccatccccaccccctccaatatggaagagacccagcagaagtcgaatctggaactccttcgcatcagtttacttttgatcgaaagctggctggagcccgtccgcttcttaagatcaatgtttgctaataacctggtatacgatactagcgattcagatgactatcatctcctgaaggacctggaggagggcatccagacactgatgggggttagagtggctcccggggtggcgaatcccggaactccactagcatag

SEQ ID NO: 248132 - RNA, 369 nt, synthetic construct
  misc_feature 1..369: note = Description of Artificial Sequence: Synthetic coding sequence
  source 1..369: mol_type = other RNA
atggctgcaggctcacgaacatcactcctgttagcctttgcgcttctatgcttaccatggttgcaagaagccggagctgtgcaaacagtccccctgtccagattgttcgaccacgctatgctgcaggcacacagggcacatcagctggctatcgacacctatcaagaattccggttagaggacgggtctagaagaacagggcaaatcctgaagcagacttactctaaatttgacacgaactcccataaccacgacgcactcctgaagaattatggtctcttgtattgctttagaaaagacatggacaaagtcgagacttttttgcgcatggtacagtgtcggtcagtagagggatcctgcggattctag

SEQ ID NO: 248133 - RNA, 654 nt, synthetic construct
  misc_feature 1..654: note = Description of Artificial Sequence: Synthetic coding sequence
  source 1..654: mol_type = other RNA
atggctgcgggctcaagaacatcactgctgttggcctttgcactgctatgtcttccatggcttcaggaggctggagctgtccagaccgtcccactttcccggctgtttgatcacgccatgttgcaggctcatcgcgcccatcagcttgccatcgacacctaccaggagtttgaagagacttacatcccaaaagatcagaaatacagcttccttcatgattctcagacctcattctgtttcagcgattctatccctacgcccagcaacatggaagagacccagcaaaagagtaacctggaactcctaaggatatcactcctgctcattgagtcatggctcgagccggtcaggtttctgaggagcatgtttgccaacaacctggtttatgatacttccgattcagacgactatcatctcttgaaggaccttgaagagggaatccaaacactgatgggacgccttgaggacgggagcaggcgcaccggccagattctcaaacagacgtactccaagttcgacacaaacagccacaatcacgatgcgctgctcaaaaattacggcctcttgtactgctttagaaaagatatggacaaggtcgaaacctttctgcggatggtgcaatgtcgctcggttgaaggctcgtgtggattctag

SEQ ID NO: 248134 - RNA, 483 nt, synthetic construct
  misc_feature 1..483: note = Description of Artificial Sequence: Synthetic coding sequence
  source 1..483: mol_type = other RNA
atggcggctggaagtcgcacttctctcctcttagcattcgcgctgctgtgtctcccttggctgcaagaagcagactctattccaacccccagcaacatggaggagacccaacagaagtcgaacttagaactgctgcggatctctctgttgctcatcgagtcatggctggagcccgttcgttttttacgatccatgtttgcgaacaatctggtctacgacactagcgactctgatgattaccacttattgaaggacctagaagaaggtatccagaccctgatgggcagacttgaagacggctcgcgaaggacaggacagattttaaaacagacctattccaagttcgacacgaactcccacaaccacgacgccctgctgaaaaactatggactgctgtattgcttccgcaaagacatggataaagtcgagaccttcctcaggatggtgcagtgccggtcagtggaagggtcctgtggtttttag

SEQ ID NO: 248135 - RNA, 498 nt, synthetic construct
  misc_feature 1..498: note = Description of Artificial Sequence: Synthetic coding sequence
  source 1..498: mol_type = other RNA
tgagggagccgaacctccttactgctggcctttgcccttttgtgtctcccgtggctgcaggaagctggggccgtacaaaccgtgcctttgagccgtctgttcgatcatgccatgcttcaggctcatcgggcccatcaactagccatagatacctaccaggaatttgaagaaacctatatcccaaaggatcagaaatacagttttctccatgattcccaaacgtcattttgtttctccgactccattcccacaccaagtaatatggaagaaacccagcaaaagtcaaacctggaattactgaggatttccctcctactcatcgaatcctggctggaaccagtgaggtttttgagatcaatgttcgcgaataatctggtctacgacacgtcagattcggacgactaccatctgctcaaggatctcgaggaaggcatccagacgcttatgggggtgcgcgtagcccctggggtcgccaatcctggtactccactcgcctag

SEQ ID NO: 248136 - RNA, 786 nt, synthetic construct
  misc_feature 1..786: note = Description of Artificial Sequence: Synthetic coding sequence
  source 1..786: mol_type = other RNA
atggtagttgtggccgccgcccccaaccccgccgatggaacgccaaaggttctgttgctgtcaggccaaccagcatcagccgccggcgctcccgccggacaggccctccccctcatggttcccgcccaaaggggtgcctctcctgaagcggcctcaggcggactgccccaggcaagaaagcggcaaaggctgacccatctctccccagaggagaaagctcttagacgcaaattgaaaaaccgtgttgcagctcaaacagctagggatcggaaaaaggcaagaatgtctgaattagaacagcaagtcgtggatctggaggaagaaaaccaaaagctcctcctggagaaccaactgctgcgcgagaagactcatgggctggtagtggaaaaccaagagttgagacaaaggttaggaatggatgccttagtagcagaagaggaagccgaggctaaaggaaatgaggttcgccccgttgcaggctcagctgaatcagcagcattgcgcttgcgcgcaccattgcagcaggtccaggcacagctgtctccgctccaaaacataagcccctggatcctcgccgttttgactctgcagatccaatcgttgatcagctgctgggcattttggaccacctggacccagtcctgttcctcaaatgctcttcctcagtcactgcctgcttggcgctctagccagaggtccacgcagaaggaccccgtcccatatcagccccctttcctctgtcagtgggggcgacaccagccaagctggaaaccccttatgaattag

SEQ ID NO: 248137 - RNA, 2853 nt, synthetic construct
  misc_feature 1..2853: note = Description of Artificial Sequence: Synthetic coding sequence
  source 1..2853: mol_type = other RNA
atgacttggcgtatgggtccgaggtttacaatgctcttggctatgtggctggtgtgtggttcagagccccacccacacgctacaattaggggctcccatgggggacgcaaggtgcctctcgtgagcccagactcatccaggcccgcccgcttcctacggcatacaggccgctccaggggaattgagcgctcgaccttagaggaaccgaacctccagccactgcagcggaggaggagtgtaccagtgctgagactggccagaccaaccgagccacccgctcgctccgacatcaacggtgccgcagttcggcctgaacagaggcccgctgctcgcggcagtccgagagagatgattcgagacgaagggagtagcgcccgaagtcggatgcttaggtttccatctgggtcaagtagccccaatatcttggcgtctttcgcaggcaagaaccgggtgtgggtgattagcgcaccacacgcttccgagggctactacagattgatgatgagcttgctgaaagacgatgtttactgcgaacttgctgaaagacatatccagcagatagtgctgttccaccaagctggcgaggaaggaggaaaggtgaggaggattacgagcgagggccaaattcttgaacaaccgctggatccttctctgatccctaaattgatgtcgtttttaaagctggagaaaggaaaatttggcatggtgttgctcaagaagaccctgcaggttgaggaaagatatccctaccctgtccgccttgaggcgatgtatgaggtgattgatcaggggccaattcggcgaattgaaaagatacgccaaaaaggattcgtgcaaaagtgtaaggcctccggggtcgagggccaggtagttgccgaagggaatgatgggggcggcggggccggacgcccatccctaggatccgagaaaaagaaggaagaccccagaagggcacaggtgcccccgacaagagagagcagagttaaggtgctgaggaagcttgcggctactgcccctgccttgcctcaacccccttcgacaccccgcgccacgaccctaccaccggcccccgctaccactgttaccaggtctacctccagggctgtcacagttgccgctcgcccaatgacgacaaccgcgttcccaacaacccaaaggccctggactccatctccgagccacaggcctccgacaacaacagaggttatcactgccaggcggccctcagtaagcgagaacttatatccccccagccgcaaggaccagcaccgcgagcgtccgcaaactaccagaaggcctagtaaggctaccagtcttgaaagttttactaatgctccccccactacaatatctgagccttcgacgcgggcggcagggcctggcaggttccgggacaacagaatggaccgcagggaacatgggcaccgagatcccaatgtggtcccaggcccccccaagcccgcaaaggaaaagccacccaagaagaaagcgcaggacaagattttatctaatgagtatgaagaaaagtatgacctgagccgtcctactgcctctcagctggaagatgaactgcaggtgggcaacgtcccgctcaagaaggcaaaagagtccaaaaagcacgaaaagctggagaaacccgagaaagagaagaagaagaaaatgaagaacgagaacgcagataaattactaaagagcgagaaacagatgaagaaaagcgaaaagaaaagtaagcaggagaaggaaaaatcaaagaagaagaaagggggaaaaactgaacaggatggctaccaaaaaccaactaataaacattttactcagtccccaaagaagtccgttgctgacctactcggttcatttgaaggcaaaaggagactgctgttgataaccgccccaaaagcggagaataacatgtatgttcagcagagggatgagtaccttgagagtttttgtaagatggccaccaggaaaattagcgtcatcacgatatttggccctgtgaataactcaacgatgaagatagaccactttcaactcgacaacgaaaagccaatgagggttgtcgatgatgaagacttagtcgatcagagacttatatctgaacttcggaaggaatacggaatgacttacaacgatttttttatggtgctaacagatgtggatctcagggtcaaacagtattacgaagtgcccataaccatgaaatctgttttcgatctcatcgatacgttccagagccggatcaaggatatggagaagcaaaagaaggagggaatcgtgtgtaaggaggataagaaacagagcctggaaaacttcctgagtcgtttcaggtggcggcgccgtctgcttgtcattagcgcccccaacgacgaagattgggcatacagccaacagttgtccgccctgtcgggtcaggcatgcaatttcggccttcgccacattacaattcttaagctgctaggcgtgggagaagaggtgggcggggtgctggaactattcccaatcaacgggtccagtgtggttgagagggaagacgtgcctgcccatcttgtcaaagatatccgcaattatttccaagtaagcccggaatacttctctatgctactcgtcgggaaagatggaaacgtgaaatcttggtatcctagcccaatgtggtcgatggttattgtgtacgatttaatcgattcaatgcagctgcgccggcaggaaatggccatacaacaatcgcttgggatgcggtgcccagaagacgagtacgccgggtacggctaccattcataccaccaaggctaccaagacgggtatcaggatgactatcgccatcacgagagctaccaccatggatatccttactag

SEQ ID NO: 248138 - RNA, 624 nt, synthetic construct
  misc_feature 1..624: note = Description of Artificial Sequence: Synthetic coding sequence
  source 1..624: mol_type = other RNA
atggtggcgacctgcctccaggtcgtggggtttgtgacaagttttgttggttggataggtgtgattgttacaacatcaacaaacgattgggtagtcacatgcgggtacacgatccccacttgtagaaaacttgacgaactggggtcaaagggcctctgggccgactgcgtgatggctactggcctctatcattgcaaacctctagtggatatcctgattctccccggttatgttcaggcctgtagagccctcatgatagctgccagtgtcctgggcttaccagcaatcctcctgttacttactgtgttaccatgcattagaatgggtcaggagcccggcgtggctaagtaccgcagagcccagctcgctggggtgctccttattctacttgctctgtgtgcccttgtcgcaaccatctggttcccggtatgtgctcatagagagacaacaatagttagttttggatatagcctttacgctgggtggatcggcgcggtactttgtctcgtcggcggctgtgttatcctgtgttgcgccggtgatgcacaggcctttggagaaaaccggttttattacaccgccggatcatcgtcacccacccacgctaaaagtgcacacgtctag

SEQ ID NO: 248139 - RNA, 1350 nt, synthetic construct
  misc_feature 1..1350: note = Description of Artificial Sequence: Synthetic coding sequence
  source 1..1350: mol_type = other RNA
atgatgaaaaccttgctcctgttcgtaggtctgcttctaacttgggaatccggccaagtgttaggagatcaaactgtgtctgacaacgagttgcaggaaatgtcaaatcagggatccaagtacgttaataaggagatccagaacgctgtaaatggcgtgaagcagatcaagacactgattgaaaagaccaatgaagaaaggaagaccctgctctctaatctcgaggaggcgaagaagaaaaaagaggacgctctgaatgaaacaagggagtcagaaaccaaactgaaggagttaccaggggtttgcaatgaaactatgatggccctgtgggaagaatgtaagccgtgtctaaaacagacgtgcatgaagttttatgcccgggtttgcaggtcaggatccgggcttgtcggcagacagctggaggagttccttaatcaaagcagtcccttttatttctggatgaatggtgacagaattgacagcctgctggaaaacgataggcaacagacccacatgcttgatgtgatgcaagaccactttagccgggcaagtagcataattgatgagctgtttcaggatagattttttacccgagagccacaggacacataccactatctacctttctcactcccacatagacggcctcatttttttttccctaaaagtagaatcgtacggagccttatgcccttctctccatacgaacccctcaatttccacgctatgttccagccatttctggaaatgattcatgaggcgcagcaggccatggatatacactttcattcccccgcttttcaacatccacccaccgagttcataagagagggcgatgacgatcgaaccgtgtgccgagagatccgacataatagcacaggttgcctgcggatgaaagaccagtgtgacaagtgtagagagatactttccgtagactgttctaccaacaacccatcgcaggctaaactcagaagggagctcgatgaaagtctccaggtggccgagcgtttgaccagaaaatacaatgaacttctcaagagttaccagtggaaaatgcttaatacatcctctctgctggagcagctgaacgagcagttcaattgggtttccagactggctaacttgacacaaggtgaggaccaatattaccttagggtcacaaccgtcgcaagccacacctctgactccgacgtgccatctggggtgacagaagtggtggttaagctctttgattctgaccctattactgtaactgtgccagttgaggtcagcaggaagaacccaaagtttatggaaactgttgccgaaaaggccttacaagagtatcggaagaagcacagggaggaatag

SEQ ID NO: 248140 - RNA, 825 nt, synthetic construct
  misc_feature 1..825: note = Description of Artificial Sequence: Synthetic coding sequence
  source 1..825: mol_type = other RNA
atgcaagaccacttttcgagggcgagcagcatcattgacgagttatttcaagatcgctttttcactcgagagcctcaggacacataccactaccttcctttctcactcccacatcggcgcccccattttttctttcctaaaagtaggattgtccgatcattaatgcccttctctccatacgagccccttaactttcacgcaatgttccagccttttttagaaatgatccatgaggcccagcaagcaatggacattcacttccactcacccgctttccagcaccctcccaccgagttcatccgcgagggggatgacgataggacggtctgtagagaaattcgacataactcaacaggctgtcttagaatgaaggaccagtgtgataagtgcagagagatcctgtcagtcgattgttctactaacaacccttcccaagcaaagctacgacgcgagctagatgaatcactgcaggtggctgagagactgacaagaaagtataatgagcttcttaaaagctaccaatggaagatgctgaatacaagctcactactcgaacaacttaatgagcagtttaattgggtgagccggctggctaacctgacccaaggcgaggaccagtattatctccgcgtgacaacagttgctagccacacatcagactccgacgtcccttcaggcgtcactgaagttgtggtaaaactatttgactctgaccccatcacggtcacagttcccgtggaagtgtctaggaaaaaccctaaatttatggaaacggtggctgaaaaggcgctacaggaataccgcaaaaaacaccgcgaggaatag

SEQ ID NO: 248141 - RNA, 1350 nt, synthetic construct
  misc_feature 1..1350: note = Description of Artificial Sequence: Synthetic coding sequence
  source 1..1350: mol_type = other RNA
atgatgaaaacactacttctgttcgtgggcttattgttaacctgggagagcggtcaggtcttgggcgatcagactgtgagcgacaatgagttacaagaaatgagcaaccaaggctcaaagtatgtcaataaggagatacagaacgccgttaatggtgtaaagcagattaaaacccttatcgaaaaaactaatgaagaaagaaagacattgctatcaaatctggaggaagcaaagaagaaaaaggaagacgccttaaacgaaacacgtgaaagtgaaactaaactaaaagaattaccaggagtttgcaatgaaaccatgatggctctgtgggaggaatgcaaaccttgtcttaaacaaacatgcatgaaattctatgcccgagtgtgtcggtcgggatcagggttggttgggcgccagctcgaggagttcctaaatcaatcttctcctttttacttttggatgaacggagataggatcgatagccttctcgaaaatgataggcaacagacgcacatgttggacgtgatgcaagaccacttcagccgggcaagctccattatagatgagctgtttcaggacaggttcttcactagagaacctcaggatacctaccattatctgccgttttctctgcctcaccgtcggcctcacttctttttcccaaagtccaggatcgttagatctcttatgccgtttagcccctacgaaccactcaactttcatgccatgtttcagccatttctcgaaatgatccacgaggcacagcaagcgatggacatccattttcatagtcccgcttttcaacacccacctaccgagtttattcgcgagggcgacgacgatagaacagtgtgtcgagagattcggcataattcaacaggctgccttcgcatgaaggatcagtgcgacaaatgcagggaaatactgagtgtggattgcagcacgaacaaccccagccaggcaaagctacgaagagaactggacgaatcactgcaggtggcggagaggttgacccgaaaatataacgagctgctcaagtcataccaatggaaaatgcttaatacaagctcactgttggaacagctgaacgaacaattcaattgggtgtcgagactggcgaatcttacccagggagaggatcagtattatttgcgggtgacaaccgttgcttcccatactagcgatagcgacgttccttccggagttactgaggtggtggtgaaactgtttgactccgaccctataactgtcaccgtgcctgtcgaagtgagcagaaagaacccaaaattcatggaaaccgtagccgaaaaagcccttcaggagtatagaaaaaagcatagggaggagtag

SEQ ID NO: 248142 - RNA, 615 nt, synthetic construct
  misc_feature 1..615: note = Description of Artificial Sequence: Synthetic coding sequence
  source 1..615: mol_type = other RNA
atgatgaaaactctactcctgtttgtgggactgctgctaacttgggaatctggacaggtgctcggtgaccagaccgtgagcgacaatgagcttcaggaaatgagcaatcaggggagcaagtacgttaacaaggaaattcaaaacgcagtgaacggagtgaaacaaattaagacattgatcgagaagacaaacgaagagaggaagacgcttctgagtaatctggaggaggccaaaaagaagaaggaagacgcactgaatgagactcgggaatccgagacaaagttaaaggagctgcctggcgtatgtaatgaaaccatgatggccttatgggaggagtgcaaaccctgcttgaagcagacatgcatgaagttctacgctcgggtgtgtcgatcaggctccggactcgtcggccgccagctcgaagagtttcttaaccagtcatctccattttatttctggatgaacggcgaccggattgactccctccttgaaaatgaccggcagcagacacatatgttggatgttatgcaggaccatttctcccgtgcctcttccattatcgacgaactgttccaagatcgcttctttacccgggaaccacaggacacatactag

SEQ ID NO: 248143 - RNA, 1350 nt, synthetic construct
  misc_feature 1..1350: note = Description of Artificial Sequence: Synthetic coding sequence
  source 1..1350: mol_type = other RNA
atgatgaagactcttcttcttttcgttggcctcctcctgacctgggaatccggccaggttctcggggaccaaactgtttccgacaacgagctccaggaaatgagcaaccaagggtctaaatatgttaacaaagaaattcagaatgctgtaaacggggtcaagcagatcaagacattgattgagaaaaccaacgaagaacgcaaaacactcttatccaatttagaagaggctaaaaagaaaaaagaggatgcactgaacgaaactagggaatcggaaacaaagctcaaggaattaccaggcgtctgtaatgagacaatgatggcactctgggaagagtgtaagccctgcctcaagcagacatgtatgaaattttacgctagggtctgccgctctgggagcggactagtgggtagacagctggaggaattccttaaccagtcatcgcccttttatttctggatgaatggcgataggatcgatagtctgcttgaaaatgatcgccagcaaacacacatgttggacgtaatgcaggaccatttctcccgtgcctcaagcatcatcgacgaactcttccaggaccgcttttttacgagagaaccacaagacacttaccattacctgcccttcagccttccccaccgacgtccccatttcttcttcccgaagtctcggattgtaagatctctgatgcctttctccccatatgagccacttaattttcatgccatgtttcagcctttcctggagatgatccatgaggcccagcaagcgatggatatccactttcattctcctgccttccagcatccaccgaccgagtttattagagagggcgatgacgacagaacagtctgtagggaaattcgacataattctaccggctgcctgcgcatgaaagatcagtgtgacaagtgccgtgaaatcttgtcagttgattgtagcacaaacaacccttcacaagccaagctgcgacgcgagctcgacgaaagcctccaggtggccgaacggctcactcgcaaatacaatgaactcttgaagtcataccagtggaagatgttaaacacttccagcctgctcgaacagcttaacgaacagtttaattgggtgtcccgtctggctaatcttacacagggggaggatcagtattacctgcgagtgaccacggtggcctcccacacatctgatagtgacgtccccagcggggtgactgaggtggtggtgaaactctttgattctgatcctatcacagtcacagtcccagtggaggttagtagaaaaaacccgaagttcatggagaccgtggctgaaaaggccctccaggagtacagaaaaaaacacagggaagaatag

SEQ ID NO: 248144 - RNA, 816 nt, synthetic construct
  misc_feature 1..816: note = Description of Artificial Sequence: Synthetic coding sequence
  source 1..816: mol_type = other RNA
atgatgaaaaccctcctactttttgtaggactcctactgacatgggaatcggggcaagtccttggcgaccaaacagtgtctgacaacgaactgcaggaaatgagtaatcaggggtctaagtatgtgaacaaggagatacagaacgctgtgaatggcgtcaagcagatcaaaacactgattgagaaaaccaacgaagagcgtaaaacactgctcagtaatctggaggaggcaaaaaagaaaaaggaagatgccttgaacgagactagagaaagcgagaccaaactgaaagaactgcctggagtgtgcaatgaaaccatgatggccctctgggaagaatgcaagccatgcctcaagcagacctgcatgaaattctatgctcgcgtgtgccgctcaggtagcggattagtgggcaggcaattggaagagttcctgaaccagagctcgcctttctacttctggatgaacggggatcgtatcgattccttgctagagaatgataggcagcagacgcatatgctggacgtgatgcaggaccatttcagccgggccagcagcattatcgatgagttgttccaagacagcctgatgcccttttccccttacgagccactcaactttcatgctatgttccaaccattccttgaaatgattcacgaggcccagcaagccatggatattcactttcactctcccgcatttcagcatccacccacagaatttattcgggaaggagacgacgatcgcacagtgtgcagggagatccggcataactctacaggatgtttaaggatgaaagaccaatgtgacaaatgctag

SEQ ID NO: 248145 - RNA, 1383 nt, synthetic construct
  misc_feature 1..1383: note = Description of Artificial Sequence: Synthetic coding sequence
  source 1..1383: mol_type = other RNA
atggaggcatgcaaagattcacgcataggcggtatgatgaagacactgctcttgttcgtgggactcctgttgacctgggagtcaggccaagttttgggcgatcagaccgtgtctgataatgagttgcaagagatgtctaatcaagggagtaagtatgtgaataaggagatccaaaacgcagtgaatggagtgaaacaaataaaaacacttatcgagaagaccaacgaagagcgcaaaaccttactgtcaaacttggaggaggcaaaaaaaaaaaaagaggatgcattgaatgaaacaagggaaagtgagacaaagctgaaagagctccccggagtttgtaacgagacaatgatggcactgtgggaagaatgcaagccctgcctcaagcagacctgtatgaagttttatgcccgggtgtgccggagcggaagtggactggtgggtcgccagttggaagaatttcttaaccagtcgtcacctttttacttctggatgaatggcgatcgcattgacagcctgctggaaaacgaccggcaacagactcatatgctggatgtgatgcaggatcattttagtcgggcttcttccatcatagacgaactgtttcaagaccgcttctttacacgtgagccacaagacacctaccactatctgccattctcgctgcctcaccgccgaccacattttttcttcccgaagtctcgaatcgttaggagtttaatgcctttctctccttatgagcctctgaatttccatgcaatgttccagcccttcctggaaatgatccatgaggcacaacaagccatggatatacactttcatagtccagcattccagcatcctcctaccgagttcatccgcgagggtgacgatgacagaacagtttgtagagaaattcgccacaactcaactggatgccttcggatgaaagaccagtgtgataaatgtagagagattctgagcgttgattgttccactaataatccttcacaggctaaattgcgacgggagctagatgagagtctccaggtggcagagagactcaccaggaaatacaacgagttacttaagagttatcagtggaagatgctaaacacaagttcgctccttgagcagctgaatgagcagtttaattgggtgtctcgtttagccaaccttacccagggtgaggaccaatactacctgcgcgtgaccactgtcgccagccacacttcggattctgatgttccttccggcgtgaccgaagtggtcgttaaactgttcgatagtgaccctatcaccgttactgtcccagttgaagtgtctcgcaaaaacccaaagtttatggaaaccgtcgcggagaaagcattacaggagtaccgaaaaaaacaccgcgaagaatag

SEQ ID NO: 248146 - RNA, 1506 nt, synthetic construct
  misc_feature 1..1506: note = Description of Artificial Sequence: Synthetic coding sequence
  source 1..1506: mol_type = other RNA
atgcaggtgtgcagccaaccacagcgcggatgcgtacgagagcagtccgcaatcaatacggccccaccaagcgcccataacgctgcctctccagggggtgcccgaggccatcgagtgcctctgacagaagcttgtaaggacagccggatagggggcatgatgaagacactactgttatttgtgggactcctgctgacatgggagtcaggccaggtgcttggggatcagacagtctctgataatgaattgcaggaaatgtccaatcagggaagcaaatacgtgaataaggagatacagaatgccgtgaatggtgtgaagcagatcaagactcttattgagaaaacaaacgaggaacggaagactctgctgtccaacctcgaggaagccaaaaaaaagaaggaagacgccctaaacgagactcgcgagagtgaaacaaagctgaaggaactgcccggcgtgtgcaatgagacaatgatggctctgtgggaagagtgtaaaccctgtttaaaacagacttgtatgaaattttacgcccgggtgtgccgaagcggtagcggactggttgggagacagctggaagagttccttaaccagtcatcccccttttatttctggatgaatggcgatagaatcgatagtctcctggagaacgatcggcagcaaacccatatgctcgacgttatgcaagaccacttctctcgagccagtagcatcattgacgagctttttcaagatagattctttacaagggagcctcaggatacctatcattacttgcccttttcactcccacacaggaggccccactttttcttccccaaatcccggatcgtccgcagccttatgccttttagcccgtatgagcctctgaattttcatgctatgttccagccctttctcgagatgatacatgaggcccagcaagcaatggacattcatttccacagccccgcgttccagcacccgcccaccgagttcatcagggaaggcgatgatgacagaaccgtttgccgagaaatcagacacaacagtacaggttgtctgcgaatgaaagatcaatgcgacaagtgcagagagatactatcagtcgattgctctactaataacccttctcaggccaaacttcgccgcgaactcgatgagagtctacaggtggcagaaagactcaccaggaagtacaatgaacttcttaagtcctaccagtggaaaatgctgaacacatcatcattgctggaacaattaaatgagcagtttaactgggtatcacgtctggccaacttgacccagggagaggatcagtattacttgagagtgaccaccgtcgccagccacactagcgatagcgacgttcctagcggggtcactgaggtagtggttaagttgtttgatagcgacccgattacagtcacagtgcccgtggaggtcagccggaaaaatcccaaatttatggagaccgttgcggaaaaagcattgcaagaataccgaaaaaagcacagagaagaatag

SEQ ID NO: 248147 - RNA, 894 nt, synthetic construct
  misc_feature 1..894: note = Description of Artificial Sequence: Synthetic coding sequence
  source 1..894: mol_type = other RNA
atggaagcatgcaaggattccagaatcggtggcatgatgaagacgctgctgctcttcgtgggtttattgctaacttgggaaagtggacaagtgctcggtgaccaaaccgtctctgataacgagctacaagaaatgtctaatcagggatctaaatacgtgaataaggaaatccagaacgccgtgaatggggtaaagcaaataaagaccctgatcgaaaaaacgaacgaagaaagaaagaccttactgtcgaacctcgaagaggccaagaaaaaaaaagaagatgcactgaacgaaactagggagagcgagactaagttaaaagaattaccaggggtctgcaacgaaactatgatggctctatgggaggagtgcaaaccctgtcttaaacagacgtgcatgaagttctacgcgagggtctgtcggtcgggttctggtttggtggggcggcagctcgaagaattccttaatcaaagtagtcccttctacttttggatgaacggagacagaatagacagtctcttggaaaatgacaggcagcaaacacatatgctggacgtcatgcaggaccatttcagtagggctagcagcataattgatgagctatttcaggacagattctttacgcgtgagccacaggatacctaccactatctgcccttcagcttgccgcaccgccggccccatttcttttttcctaaatccagaatcgtgagatcattaatgccattctccccctacgaacccctgaactttcatgctatgttccagccctttctggaaatgatacatgaagcccagcaagccatggacattcacttccactctccagctttccaacacccacccactgaattcatcagagagggagatgatgataggacggtgtgcagatag

SEQ ID NO: 248148 - RNA, 2259 nt, synthetic construct
  misc_feature 1..2259: note = Description of Artificial Sequence: Synthetic coding sequence
  source 1..2259: mol_type = other RNA
atgggcccccttatggttttgttctgcctgctgtttttataccccggtctcgctgattctgcccccagctgcccacagaacgtcaatatttccggaggaacctttactctgtcacacgggtgggcaccagggagcctgcttacctactcctgcccacagggtctgtatcccagtcctgcttcacgactctgcaaatccagcggacaatggcagactccaggagctacaaggtctctttcgaaagcggtgtgtaagccagtcagatgtccagcgcccgttagtttcgagaatggaatctacacgcctcgcctgggaagttacccagtcggcggaaacgtgtcattcgagtgtgaagacggatttatcttacgcgggtcccctgtacggcagtgccggcctaacggaatgtgggatggggaaacagctgtctgcgacaatggtgcgggacattgtccaaatcctgggatcagcctgggagcagttcggaccggcttccgctttggacacggcgacaaggtgcgctatcgttgtagcagcaacttggtacttactggatcctcagagagggaatgccagggcaatggagtgtggagtgggactgagccaatatgccgccagccttactcgtatgacttccccgaagatgtggcgcctgccctggggactagcttctctcacatgctgggagccacaaatccaacccagaaaactaaggaatctttgggacgaaaaatccagatccagagatcaggacatttaaatctctacttgctgctggattgttctcagtccgtgtcagaaaatgatttcctcatcttcaaagagagcgcatctctgatggtagaccggatctttagcttcgagattaatgtgagcgttgctatcatcacattcgctagcgaaccaaaggtcctgatgagcgttttgaatgacaacagtcgtgacatgaccgaagtgatttccagtttggagaacgctaactacaaggaccatgaaaatggcactggaactaacacttacgcggcactcaactcagtttatctaatgatgaacaaccagatgcgcttactggggatggagactatggcttggcaggagatcagacatgctataatccttctgactgatgggaagagcaatatggggggaagcccgaaaactgcagtcgaccatatacgggaaattctgaacattaaccagaagcggaacgactacctggacatatacgccataggcgtgggcaagcttgatgtcgactggcgtgaactaaacgagctcggcagcaagaaggatggcgagcgccacgcgtttatcctccaggacacgaaagccctgcatcaggtcttcgaacatatgctagacgtttccaagcttacagacacaatctgcggagtaggtaacatgagtgccaacgccagtgatcaagaaagaacgccgtggcacgtgactattaaacctaagtcccaagaaacctgtcggggcgcactaatctccgaccagtgggtgctgactgccgcccattgtttcagagacggaaatgaccactcactgtggcgtgtgaatgtcggtgatcccaaatctcagtggggcaaagagtttttgatcgaaaaggccgtaatcagccctggattcgacgtgtttgcaaagaagaatcaaggcatcctcgaattctatggtgatgacatcgccttgctcaagctcgcacagaaagtgaaaatgtcaacccacgctaggccaatctgccttccctgcactatggaggccaatctggcactgcggcgaccacagggaagtacctgccgagatcatgagaatgaactgctgaataaacagtctgtccctgcccacttcgtagcactcaacggaagcaaactgaacatcaatctaaaaatgggagtggagtggacgagttgtgctgaagttgtcagccaggagaagacaatgtttcctaacctgaccgacgtgcgagaggttgttaccgaccagtttctttgctctggaactcaggaggacgaaagtccttgcaaaggtgaatccggtggtgccgtctttctggaacgccggttccggttcttccaagtaggtctagtcagttggggactctataacccatgccttgggtctgctgacaagaattccagaaagagagctcctagatcaaaagtgccaccccccagagactttcacataaacctgtttcgcatgcaaccttggctccggcaacacctcggcgacgtgttgaattttctgccactatag

SEQ ID NO: 248149 - RNA, 1134 nt, synthetic construct
  misc_feature 1..1134: note = Description of Artificial Sequence: Synthetic coding sequence
  source 1..1134: mol_type = other RNA
atgaccgaagtcatctcaagtttagaaaacgccaactataaagaccacgagaacggtaccggtacaaacacatacgccgcactgaatagcgtatatttgatgatgaataaccaaatgcgactactggggatggaaactatggcttggcaggagataagacatgctattatcttactcacagatgggaaaagcaacatgggcggttcacccaagacagcggtagaccatatcagggaaattctcaatattaatcagaaaagaaacgattatcttgacatatatgccatcggggtaggcaagctcgatgtcgactggcgagaattaaacgagctaggttctaaaaaggacggggaaagacatgcatttattctgcaggataccaaagcactgcaccaggtattcgagcacatgctggacgtcagtaagttgaccgacactatttgcggcgttggaaatatgtcagctaatgcctccgaccaggaaaggactccgtggcatgttaccataaaaccaaaaagccaggagacttgtcggggcgctctgattagtgaccaatgggtgctcactgcagcacactgttttcgagacggtaacgaccattctctgtggcgggtgaatgttggagacccaaagtcccagtgggggaaggaatttttgattgaaaaggctgttatctctcctggctttgacgtgttcgcaaagaagaatcaaggaatattggagttctacggtgacgatattgccctgcttaagctcgcacaaaaggtgaagatgtcaacccatgcacggccaatctgtcttccttgcacaatggaagcaaacttagcactgagacgtccccaaggtagtacttgtagagaccacgagaatgagctccttaacaaacagagtgttcccgcacactttgttgccctcaatggctccaagttgaatatcaaccttaaaatgggcgtcgaatggacatcgtgtgctgaggtggtgtcccaggagaagactatgttccctaacctgaccgacgtgagggaagtggttacggatcagttcctgtgcagcgggacacaggaggacgaatcgccttgtaagggaggcagcggcgaactgggcagcctacagccactgccctggttatgctag

SEQ ID NO: 248150 - RNA, 420 nt, synthetic construct
  misc_feature 1..420: note = Description of Artificial Sequence: Synthetic coding sequence
  source 1..420: mol_type = other RNA
atgggtcctttgatggtcttgttctgcttactctttctgtaccccggactggcagatagcgccccatcctgtccccaaaacgtgaatattagcggagggacatttacactcagccatggctgggctcccggaagcttgctcacctactcctgcccacaaggtttgtacccttcccctgcaagccggctttgcaagtctagcggacagtggcagacccccggcgccacacggtcactctctaaggcagtatgcaaacccgtgcggtgtcctgcgcccgttagcttcgagaacggaatctatacaccccggttaggctcctaccctgtcggagggaatgtgtccttcgaatgtgaagacggctttatactgaggggttccccagtgagacagtgtagacccaacggtatgtgggacggttag

SEQ ID NO: 248151 - RNA, 978 nt, synthetic construct
  misc_feature 1..978: note = Description of Artificial Sequence: Synthetic coding sequence
  source 1..978: mol_type = other RNA
atgggaaccagatccgccattgccgcccctagaattctgtgctcaagaggacttaggagtggttctgcccgcgccaccggttctggagttgaaaggtccccctccgccgctaaccctacgctgatgacatccctacggacctggcctctgccctgggctcttcctagccccacttgtctgggaccacctattccgcccagacgacagcggatctttagcttcgagatcaatgtgtcagtcgctatcattacattcgcatccgagcccaaggtgctaatgtccgtactcaatgacaattcccgcgatatgactgaggtgattagctcgttagaaaatgctaactacaaagaccatgaaaacggaaccggaacaaatacttatgcagccctgaactccgtttaccttatgatgaacaatcagatgagacttctgggaatggagaccatggcttggcaagaaatcaggcatgcaataatcctgctgacggatgggaagtcaaacatgggcggctctccaaaaacagccgtggatcacatccgcgaaatactcaatatcaatcagaaacgtaacgattatttagatatctacgccattggagtgggtaaactggatgtggactggagggagctgaatgagctaggaagtaaaaaagatggtgagagacatgcatttatactgcaggatacgaaggccctgcaccaagtgttcgaacatatgctggatgtgagtaagttaactgacacaatctgcggtgtgggcaacatgagcgcaaacgcgtcggaccaggaaaggacaccctggcatgtaaccatcaagcccaaaagccaggagacctgtcgcggagcacttatttctgatcagtgggtcttgacagcagctcactgttttcgggatgggaatgaccactcactttggcgagtgaacgtgggagaccctaagagtcagtggggaaaagagttcctgatcgaaaaagcctag

SEQ ID NO: 248152 - RNA, 1863 nt, synthetic construct
  misc_feature 1..1863: note = Description of Artificial Sequence: Synthetic coding sequence
  source 1..1863: mol_type = other RNA
atggggcccctgatggtactgttttgtctgctgtttctgtatcccgctggacactgccccaaccctgggattagcctaggcgccgtccgaaccggattccgattcggccatggcgacaaggttagatacagatgctctagcaatctcgtactcacagggtcgagtgaacgcgagtgtcaaggcaacggagtatggagtggcactgaacccatttgccgacaaccctattcatacgattttccagaagatgtggcaccagctctaggtacaagcttctctcatatgctgggcgcaactaaccccacccaaaagacgaaggaaagcctgggccgaaagatacaaatccagcgaagcgggcacctcaacctgtacttactgctggattgttcacagtccgtcagcgaaaatgactttctgattttcaaggagagcgcgtctctgatggtggacagaatcttctccttcgagattaatgtgagcgtcgccatcataaccttcgcttccgagcccaaggtactgatgtctgttctgaacgacaactcaagggacatgactgaagtgatctcatcactcgaaaatgcaaattacaaggaccacgagaacggcactggtacaaatacatatgccgcactcaattcagtgtatctcatgatgaacaaccagatgaggctgctcgggatggaaacaatggcttggcaagagattcgacatgcgataattctgctcaccgacggcaaatctaacatgggaggctctcctaaaaccgcggtcgaccacatccgggagattttgaatattaatcagaaacgaaacgactatctggatatctatgccatcggcgtgggcaagctggacgtggactggagagagctgaatgagctggggtcaaagaaagacggggaaagacatgcctttatactccaggacaccaaggccctgcaccaggtttttgaacatatgctggacgtttcaaagctgaccgataccatctgcggtgtgggtaatatgtcagccaatgcctctgatcaggaaagaaccccttggcatgtgactatcaaacccaaaagtcaggagacttgcaggggagcattgatcagcgatcaatgggtgctaactgctgcccactgtttccgtgacggaaatgatcattccctctggcgggtcaacgtgggcgatcctaagtcccaatgggggaaggaatttctgatcgagaaggcagtgattagccctggatttgatgttttcgctaaaaagaatcaggggattctggaattctacggggacgacattgcgctgctcaagcttgcccaaaaggtgaagatgtctacacatgcccggcctatttgcttaccttgcacaatggaagcaaatcttgcgctaaggagaccccagggctcaacctgccgcgaccacgaaaacgagctgttaaataaacaaagtgtaccagcacactttgtagcactgaatggaagtaaacttaatataaacttgaaaatgggggttgaatggacatcctgcgctgaagttgtaagccaggaaaagacaatgttcccaaatctgaccgacgttcgggaggtggttaccgaccagttcctctgtagcggaacccaggaggacgaatctccctgtaagggcgaatccggcggcgcagtgtttcttgagcgtcgcttccggttctttcaagtcggactggtgtcatggggcctgtataatccctgtctgggctctgccgataagaacagccgcaagcgagccccccggtcaaaggtcccaccaccgcgagattttcacataaacttattcaggatgcagccctggctgcgacagcatcttggcgatgttttgaatttcctgccattatag

SEQ ID NO: 248153 - RNA, 5235 nt, synthetic construct
  misc_feature 1..5235: note = Description of Artificial Sequence: Synthetic coding sequence
  source 1..5235: mol_type = other RNA
atgcggctcctgtggggattgatatgggcatcaagcttcttcaccctgtcactccaaaaacccagactcctgctgttttctcccagcgtcgtgcatttgggtgtgcctcttagtgttggggtccagctgcaagatgttcctcgcggccaggtggtcaagggcagcgtctttctcaggaacccaagcagaaataatgtcccatgttcacccaaagtcgatttcactctctcctcagagcgggacttcgctcttctgtctctgcaggttccactcaaggacgcaaaatcctgcggacttcaccaattactgagagggcccgaagtccaacttgtcgctcatagtccttggctgaaggatagtcttagtaggacaactaacatccaggggataaatctgctgttttcgagtaggcgcggccacctgttcttgcagaccgatcagcccatctacaaccctggacagcgcgtaaggtaccgcgtctttgccttagaccaaaaaatgaggccatccaccgatacaataactgttatggtagagaacagtcacggcttgcgcgtgcggaagaaagaggtgtacatgccctcgtccatctttcaggacgacttcgtgatcccagacatttccgaacccgggacttggaaaatctccgcccgcttttctgatggtttggaaagtaactcatcgacacaattcgaagttaaaaaatacgtcctccctaactttgaggtgaaaattactccaggaaagccctatatactgaccgtgccgggccatttggacgagatgcagctggacattcaagccagatatatttatggcaaaccagtacaaggagtggcttatgtgcggttcgggctcctcgatgaagatggaaagaagactttttttcgaggccttgagtcccaaacaaagctggtgaatggccagagccatatctctctatccaaggcggagttccaagatgcactcgagaaactgaatatggggattacagatctgcaaggactacgcctgtacgttgctgcagccatcattgagtcacccggcggcgaaatggaagaggccgagttaacttcatggtatttcgtgagctcgcctttttctctggacctgagcaagacgaagagacacctagtcccaggtgcaccctttctccttcaggccttagtccgggagatgtctggttctccagccagcgggattcctgtaaaagtcagtgcaacagtctcttcgcctggctccgtcccagaagttcaggacatccaacagaatactgacgggagcggccaggtttcaatacctataatcatcccacagacaatctccgaacttcagctctcggttagtgccggaagtccacatcccgcaattgctcggctgacggttgcagcaccccccagcggcggaccaggattcctgtctatcgagcgaccggactctcggccacccagagtgggggatacactgaatctgaacctgcgggccgttgggtccggggccaccttttcacactactactacatgatcctttcgagagggcagatcgtgttcatgaatagggagcccaaacggaccctgacatccgtcagtgttttcgtcgatcaccacctggccccctctttctatttcgtggccttctattaccacggtgaccatcccgtcgcgaatagcctacgcgtagatgtccaagctggagcctgcgaggggaaactcgaactgtcagttgacggcgcaaaacagtaccggaacggagagtcagtgaagctgcacctcgagacagactcactggctctcgtcgcactgggggctctcgacaccgcgctttatgccgctggctctaagtctcacaaacccctgaacatgggcaaggtttttgaagccatgaacagctatgacctggggtgtggtcctggtgggggagactcagctctgcaggtcttccaagctgctggattagctttctctgatggagatcagtggacactgtctagaaaaagactgagttgccctaaggagaagaccactcggaaaaagcgcaacgtgaatttccaaaaggctatcaacgaaaaattaggacagtacgcatctccgaccgctaagagatgttgccaagacggagtaacacgcctgcccatgatgcgctcctgtgaacagcgcgcagctcgggtgcagcagcctgactgtcgcgagcccttcttaagctgctgccaattcgctgaaagcctaagaaagaaatctcgagataaaggacaggcaggcctgcagcgagccctagagatcctgcaagaggaggaccttatagacgaagatgatatcccagtgcggtccttctttccggaaaattggttatggcgggtggaaaccgtagacagattccagattctcaccctatggctccccgattccctgacaacatgggagatccatggactcagcctctcgaagaccaagggcctatgtgtagcaactcctgtacagttgcgggtctttcgcgagtttcacctgcacctgcggttacctatgtccgtaaggcggttcgagcaactggagttgagaccagtgctctataactacctagataagaacctgacagtttccgtgcacgtgagtcccgtggaggggctgtgtctggccggaggcgggggattagcacaacaggtgctggtcccagccggctcagcacgtcctgttgcattcagtgtggtgcccactgcagctgctgccgtttcattaaaggtggttgccagaggctctttcgagttccccgtcggagacgctgtgtcaaaggtcctacagatagaaaaggagggggccattcatcgcgaagaactggtttatgaacttaacccactcgatcataggggccggaccctggagatccctggcaatagcgaccccaatatgatacccgatggggacttcaactcttacgttagagttactgctagtgaccctttggataccctcggcagcgagggcgccctcagccccgggggggtggcctccctccttagactgccccggggttgcggagaacagacgatgatttacctcgcccccactttagccgcaagccgttatttggacaaaactgaacagtggtcaaccctcccgccagaaactaaagatcatgctgttgatctgattcaaaagggttatatgcggatccagcagttccgaaaggccgatggctcctacgcagcctggctttcgagggatagctctacatggctgacagccttcgttctgaaggtactgagtctagctcaagagcaggtcggaggatcccctgagaaactgcaggaaacttcaaattggcttctgagccagcaacaagctgatgggtcattccaggatccttgtccagtcctcgaccgctccatgcagggtggtttagtagggaacgatgagaccgtcgctctcaccgcctttgtcacaatcgctctgcatcacgggctcgctgtttttcaagatgaaggtgccgagccactcaaacaaagagtcgaagcctcgatttctaaagccaacagttttctgggcgaaaaggctagcgcgggcctgttgggagcccatgctgctgccataactgcctacgccctcacactgactaaagcgcccgtcgacttgcttggtgtcgcacacaacaatcttatggcaatggcacaggagactggagacaatttgtattggggttctgtgactggatcacagtctaacgccgtgtcccccacacctgccccaaggaatccatcagatccaatgccccaagctcccgctctctggatcgagacaacggcttacgccctcctgcatctcctactccacgaggggaaggcggagatggccgaccaggcttcagcctggctgacccgccagggaagctttcagggcggctttcgaagcacccaagatactgtgatcgccctggacgctctttcagcttactggatcgctagccacaccaccgaagagcgcgggttgaacgttaccctctcaagcaccggacgcaatggattcaaaagccatgcccttcaattgaataaccggcagatcagaggactggaggaggagctacagtttagcctgggttcaaagatcaatgtgaaagttggaggaaacagcaaaggtactctgaaggtgcttaggacgtacaacgtgttggacatgaagaacactacctgtcaggatcttcaaattgaagtgaccgttaaaggacacgtggagtacaccatggaggccaacgaggactacgaggactacgagtacgacgagctgcctgcaaaggatgatccggatgcaccactccagcctgtgactccgcttcaattgtttgaggggcggcggaaccggaggaggagggaggctccgaaggttgtcgaggaacaggagtcgcgggtccactacaccgtatgtatttggcggaatggtaaggtggggttatcggggatggcaattgctgacgtgaccttactttcagggttccatgccctccgcgctgatctggagaagctcacctcgctcagtgatcggtacgtcagccacttcgaaacggagggtccccatgtgttactgtacttcgattcggtcccaaccagtagagagtgtgtgggttttgaagcagtccaggaagtaccagtgggcctcgtacaacctgcaagcgctactttgtatgactactataacccagaaagacgttgctccgtgttttatggcgccccatctaaatctcggctattggccacactgtgttcagccgaggtgtgtcaatgcgccgaaggtaaatgtccgagacaaagacgcgctttagaaagaggattacaggacgaagacgggtatcgcatgaagtttgcctgttattatccccgggtggagtacggttttcaagttaaggttctaagagaggactcccgcgccgcctttcgactattcgagaccaagatcacacaggttttacatttcacaaaagacgtcaaagctgctgccaatcagatgcggaacttcctggtgagggctagctgcagactgcgtctggagcctggaaaggagtatcttattatgggcctcgatggtgcaacttacgacctagagggtcatccacaatacttgttagactcaaacagctggatcgaggagatgcctagtgagaggctgtgccgctctactcgacaaagagctgcttgcgcacagctgaacgatttcttacaagaatatggtacccaggggtgccaggtctag

SEQ ID NO: 248154 - RNA, 5097 nt, synthetic construct
  misc_feature 1..5097: note = Description of Artificial Sequence: Synthetic coding sequence
  source 1..5097: mol_type = other RNA
atgagactgctttgggggcttatctgggccagcagctttttcaccctgtctctccaaaagccgagactcctgctattttctccaagtgtggtccatctgggggtacccttgagcgtaggtgtgcaactgcaggacgttccaagaggacaggtcgtgaagggaagcgttttcctgcggaacccatcccgtaacaacgtaccatgctccccgaaagttgattttacactgtcaagtgagcgcgatttcgctcttctgtctctgcaagtgcccctgaaggatgccaagagttgtggcctgcaccagctgctgagggggcctgaagtgcagctggtcgcgcactccccctggctgaaggactcactttctcgcacaaccaatatccagggcattaatttactgttttcctctcgtcgtggacatctctttctgcaaactgatcagcccatatacaatcccgggcaacgcgtgagatatcgagtgttcgctctggaccagaaaatgcgcccatcaaccgatacaatcaccgtgatggtcgaaaacagccatggtctgcgagttcgaaagaaagaagtttatatgccttcctcaattttccaagatgactttgtgatacccgacatctcagagcctgggacttggaagatcagcgctcgttttagcgatggactcgaatctaactcttccacacaatttgaggtcaaaaagtacgttctgcccaattttgaagtgaagatcactccaggtaaaccatatattctaaccgtgccaggtcacctggacgagatgcagctggacattcaggccaggtatatttacggaaagccagtacagggcgtggcctacgtgcggttcggtctgctagatgaagacgggaagaaaactttcttcaggggacttgagtcccaaaccaaactggtgaacgggcaaagtcacatttctctgtctaaagcagagttccaggatgctctggaaaagctgaatatgggcataacagatcttcagggccttcgtctgtacgtggcagctgcgataattgaatctcccggcggcgagatggaagaagccgagctcacgtcttggtacttcgtgagctcccccttttctctcgacttgtccaagaccaaacggcacctggtacctggcgcaccttttttactgcaggctcttgtccgcgagatgagtgggtcgcctgcctcgggaattcctgtcaaagttagtgctaccgtgagtagtccaggaagcgtacccgaggtgcaagatattcaacagaacaccgatggcagtggccaggtaagtattccaatcatcattccccagactattagtgagttacagctatctgtgtctgccggaagtcctcatcccgccattgcccgacttactgtcgcagcgcccccaagtgggggccctggctttctttctatagagcgcccagatagcaggcctcccagggtcggggacacgttaaatctgaacctccgggcggtcggcagcggagccaccttctcacactattattatatgattctgagcaggggccagatagtctttatgaatagggagccgaaaagaacgctgacatcagtctcagtgtttgttgatcatcacctggcaccgtctttctactttgtggccttctactaccatggcgaccaccccgtagccaactcattgcgggtggatgtgcaggctggcgcttgcgaaggtaaattggaactgagcgtcgacggcgcaaagcagtaccggaatggcgagtcggtgaaactacacttggagactgattccctggcgctcgtagctctgggcgctttagatacagccttatacgcagcgggaagtaagagccacaaaccactgaatatggggaaagtttttgaggccatgaatagttacgacctcggatgtggcccaggcggaggagattctgccttgcaggtttttcaagctgcagggctggccttcagcgatggtgaccagtggaccttatctcggaaaagactgtcctgcccaaaggagaaaaccacccggaaaaagagaaacgttaatttccagaaggccatcaatgaaaagctggggcagtacgcctccccaacggccaagagatgctgccaggatggcgtcacgagacttccaatgatgcgtagctgtgagcagcgagccgctagggtacagcagcctgattgccgtgagccctttctgtcatgttgtcaattcgctgagagtctgcgcaagaagagcagagataagggtcaggccgggctccagagggcattagagatcctccaggaagaggacctcattgacgaagacgacattcctgttcggtctttctttcctgagaattggctgtggcgggtggagacagtagaccgctttcagatactcaccctctggctcccggatagcctgactacttgggaaattcatggactttcactcagtaaaacaaaaggactatgtgtcgcgacgccagtgcagctgagagtgtttcgcgagtttcacttacacttacgactgcctatgagcgtccgtagatttgagcagttagaattgcggcccgtgctgtacaattatctggacaaaaatctgaccgtgtcggtgcacgtgtcacctgttgaaggattgtgtctcgccggaggaggtgggctggctcagcaggttctggttccagccgggtctgcgcgccctgtggcttttagcgtcgtgcctactgctgctgccgcagtctcactgaaagtggttgctcgcgggtccttcgaatttcccgtgggtgatgcagtcagcaaggtcctgcagattgaaaaggagggtgcaatccaccgggaagagttggtgtacgagctgaatccactggatcatcgcgggcgcacactggaaatccctgggaacagtgaccctaatatgattcctgatggcgatttcaattcatacgtgcgcgtaaccgccagtgatccactggataccctaggaagtgaaggagcactaagtccaggaggggtggcatccctgctacgcctgcctcggggttgcggagagcagactatgatttatctggctcccacactcgcagcttcgcgctaccttgataagaccgagcagtggtctaccctgccacccgaaaccaaggatcacgccgtagatttgatccagaaaggctacatgcgcatccagcagtttcgaaaggcggacggttcctatgcagcctggctctctagggatagttctacctggcttacagcttttgtcctgaaagttctttctctagcccaggagcaggtcggaggctccccggagaagctgcaggaaacatcaaactggctcctgagccaacagcaagcggacggttccttccaagatccttgccctgtgcttgatcggtccatgcagggaggcctcgtgggaaatgacgagactgtagcgctgaccgcttttgtgactattgccctgcaccatggattagccgttttccaagacgaaggcgctgagccactgaagcagagagtggaggcctccattagtaaggcaaactctttcctcggcgagaaggcatccgctggactcctgggagcccatgctgccgcgattacagcctacgccctgaccctgaccaaagcccctgtggatcttctaggcgtggcccataacaaccttatggccatggctcaggaaacgggcgacaacctttattggggatccgtaacaggatcccagagcaacgctgttagccccacaccagccccccggaatccttctgatcctatgccccaggcacctgcactctggatagaaacaaccgcatatgccctgcttcatctgctccttcacgaaggcaaggccgagatggctgaccaggcttctgcatggctcaccaggcaaggaagtttccaagggggcttccggtccacccaggacaccgtgattgccctggacgccctgtctgcatactggatcgcctctcacacaaccgaagaacgcgggctgaacgtgactttaagctccactgggaggaatggatttaaatcgcacgccctgcagctgaacaacaggcaaatccgaggtctagaagaagaactgcagttttcattgggtagcaaaatcaatgtgaaagtcggtgggaacagcaagggcactcttaaagtgctgagaacatataacgtcctggacatgaaaaacaccacctgtcaggatttgcagattgaggtaacggtgaaggggcacgttgaatataccatggaggccaacgaggactacgaagactacgaatacgatgagctcccagcaaaggacgaccctgatgccccgctgcaacctgttaccccactccaactgttcgaggggcgaagaaaccgaagacgacgggaagcacccaagctcacatcgctctcagatcgttacgtttcgcattttgagacagaagggccccatgtgctgttgtattttgattccgtacctacatccagagagtgtgttgggtttgaggccgtgcaggaggtgcctgtcgggttggtgcagccggcttccgcaactttatacgattattacaaccccgaaagaaggtgttctgtcttctacggcgccccaagtaaatctaggctgttggctactctttgtagtgcagaggtgtgtcagtgcgcagagggtaagtgccctagacaacgccgcgcactagagcgaggtcttcaagatgaagatggataccgcatgaagtttgcctgctattacccccgtgtggaatacggtttccaggtcaaagtcctaagagaggactcccgggccgcgtttcgattattcgaaaccaagatcactcaggtactccactttaccaaagatgtgaaggctgccgctaaccagatgcgcaatttcctcgttagggcatcctgcagactgaggcttgagccaggcaaagagtatttaattatgggcttggacggagcaacttatgacctcgagggtcatccacagtaccttctcgacagtaactcctggatcgaggagatgccaagcgagaggctgtgtaggagcaccaggcagagggcagcgtgcgcgcaattgaatgatttcctgcaagagtacggcactcaggggtgccaggtgtag

SEQ ID NO: 248155 - RNA, 813 nt, synthetic construct
  misc_feature 1..813: note = Description of Artificial Sequence: Synthetic coding sequence
  source 1..813: mol_type = other RNA
atgtgtccggaggacagtctacaagtgccactgaaagatgccaaatcctgcggtttgcaccaacttcttagagggccagaggtgcagctggtagcacactctccatggcttaaggacagtttaagtcgcaccacaaacatccaaggcatcaatctgctcttttcctctcgccgcggccatctgttcttacaaacagatcagccaatttacaacccaggtcaaagggtccggtatcgcgttttcgccctggatcaaaagatgcgccccagcacagatactatcaccgtaatggtagagaatagccacggattgcgtgtaaggaaaaaggaagtgtacatgccttcgagcattttccaagacgattttgtgatcccagacatttctgagcctggtacttggaaaatcagtgcccgcttctccgacggattagagtccaactctagcactcagttcgaggttaaaaagtacgtactccccaattttgaggtcaagatcacccctggcaaaccatacatcctgacggtcccgggacaccttgacgaaatgcagttggacatccaggcccgctacatctatggtaaacccgtgcagggagtggcatacgtccgtttcggtctactagatgaagacggtaagaagaccttctttcgtggcctggaatctcagacaaaacttgtcaatggtcagtcacatatctccttgagcaaagctgagtttcaagatgccctagaaaagctgaacatgggcatcacggacctgcagggtctgaggctgtacgttgccgcagcaataattgagtcccccggagggtag

SEQ ID NO: 248156 - RNA, 675 nt, synthetic construct
  misc_feature 1..675: note = Description of Artificial Sequence: Synthetic coding sequence
  source 1..675: mol_type = other RNA
atggccacccaccatactctgtggatgggcttggctttgctgggtgtactaggagatctgcaggccgctccagaggctcaggtcagtgtccagccaaacttccaacaagacaaattcctcggacgctggtttagtgctggattggcttccaatagctcctggttgcgggaaaaaaaggccgccctgtctatgtgtaaatccgtcgtagcccccgccacagatgggggactcaatctaacctccacctttttgcgtaagaaccaatgcgaaacaagaacaatgcttcttcagcccgctggcagtcttggctcctactcttaccggagtccacgagaatggggcttgcaccggccccctggcccgtccctgggcgcgacgcttgccgggacaaccctggggcaaccccccgctgcagaaatccatggtgtgggcgactggggctccacgtattcagtctcagtggttgaaacggattatgatcaatacgccctactgtatagccaaggttcgaagggtcctggcgaggattttagaatggctacactttactctcgaacacagacccctagagcagagctgaaagaaaaattcaccgccttttgcaaggcccagggattcactgaagacacaatcgtgttcctgccgcagaccgacaagtgtatgacagagcagtag

SEQ ID NO: 248157 - RNA, 4992 nt, synthetic construct
  misc_feature 1..4992: note = Description of Artificial Sequence: Synthetic coding sequence
  source 1..4992: mol_type = other RNA
atggccacagacggcgcgagctgtgagccggacttgtcaagagccccagaggacgccgctggtgctgcagctgaggctgctaaaaaagaattcgacgttgacaccctgtcaaagagtgagttgcgaatgctgctgtctgtcatggaaggcgaactggaagccagagacctcgtcatagaagccctgcgcgccagacgtaaagaggtgttcatacaagagcgatatggccgatttaacttgaacgaccccttcctggcactgcagagagactacgaggcaggagctggggataaagaaaaaaaacctgtatgcacgaacccactttctatcctcgaagcagttatggcccattgcaagaaaatgcaggagagaatgagcgcgcaactggcggctgccgagagccgacaaaagaagctggagatggagaaattgcagctacaagcgctggaacaagaacataagaagctcgccgctcgcctggaagaggaaaggggaaagaataagcaggttgtgctcatgttggtgaaagaatgcaaacagctatccgggaaagtaattgaagaggcccaaaagctcgaggacgtcatggccaagctggaagaggagaagaaaaagacaaacgaacttgaagaagagttgagtgcggagaaaagacgctctaccgagatggaagcccaaatggaaaagcagttaagcgagttcgacacagagagagaacagctccgcgcaaagctcaatagagaggaagcgcacactaccgatctgaaggaagaaattgacaagatgcggaagatgatcgagcagttgaagaggggaagcgactcaaagccatcattatcgctgcctagaaagaccaaggatcggcggcttgtcagtatctctgttggcactgaggggaccgttacaagatctgtggcttgtcaaacggatctcgtgaccgaaaacgctgaccatatgaagaagctcccactcactatgccggtaaagcccagtaccgggtcaccgcttgtgagcgcgaacgccaaaggctctgtctgtacttctgcgactatggcacggccaggtatcgatcggcaggcttcctacggagatctaatcggagcttcagtaccggctttccccccgcccagtgcaaataagatagaggaaaatggaccttctactggctccacaccagaccccacttcaagcactccccctctgccatctaacgccgcgccccctacagctcaaactccagggatagcccctcagaacagccaagctcctcctatgcactcactgcacagtccatgcgctaatacaagcttgcaccctggactgaatcctcgtattcaagctgcccgattccgctttcaaggtaacgctaacgacccagatcagaacggtaatacaacccaaagtcctccaagcagagatgtctctcccaccagcagagacaatctggttgcgaagcagctggctcgaaatacggttacacaggcacttagtcgatttacaagtccacaagcaggagctccctccagacccggggtgccccccacaggcgacgtcggcacacacccccctgtcggaagaacatccctcaaaacccacggagtagctcgcgttgatcggggcaacccacctcccatcccacccaagaagccgggcctttcacaaactccatcacccccccacccccagttgaaggtgatcatcgacagcagccgcgcatctaataccggagctaaagtcgataacaaaacagtcgcttccacaccttcttccctccctcaaggcaatcgggtgattaacgaggaaaacctgcccaagtcgtcaagcccacagctgcccccaaaaccatcaatcgacctgactgttgcccccgctggatgcgcggtctccgcgttggcgacttctcaagtcggggcttggcctgccgccacacctggcctgaaccagccagcatgttccgactccagcttggtgatccctacaactattgccttctgttcttctatcaacccagtgagtgccagctcctgccgaccgggagcttccgactcactcctcgtcaccgccagcggctggtctccatctttaacccctcttttaatgtcaggaggcccggccccactggcgggacgcccgacactgctgcagcaggccgccgcccaggggaatgtaaccctcctgagtatgctgctgaacgaagagggtctggacatcaactactcctgcgaggatggccactccgccctttactcagccgcaaaaaacggtcatactgactgtgtcaggctgctgctctccgctgaggctcaggttaatgctgctgataagaatggcttcaccccactgtgcgccgccgcagcacaaggacactttgagtgcgtggagctcctgatctcatatgatgcaaacattaatcatgccgccgacggcggccagacccccctatacctggcttgtaagaacggaaacaaagaatgcattaagctgctccttgaagccggaacgaatcgctctgtgaaaactacagacgggtggactccagttcacgctgccgttgacactggcaacgtcgattcgttgaaacttctcatgtaccatcgaatcccagcccacggcaattcctttaacgaggaggagtccgagtcctccgtcttcgacctggacgggggagaggaatcccccgaaggcatttccaagccagtggtacctgctgatctgattaatcacgcgaacagagaaggttggactgccgcccatatagctgctagcaagggctttaagaactgtctcgaaatcctgtgtaggcatggaggtcttgaaccagagaggcgtgacaagtgtaaccgcactgtgcatgatgtagctaccgacgactgcaaacatcttcttgaaaatctgaatgccctgaagatcccacttaggatctcagtcggagagatagaacctagcaattacggctccgacgatctggagtgtgaaaacaccatatgcgccctgaatattcggaaacagactagctgggacgatttcagcaaggccgtgtctcaggctctaaccaaccacttccaggctatctccagcgatggttggtggagtctcgaggatgtgacctgtaacaataccaccgatagcaacattggattgagcgctagatcaatccgatcgatcactctgggtaatgtaccgtggtccgtcggccaatcctttgcccagagcccgtgggactttatgaggaagaacaaagccgagcatattactgtgttgcttagcgggcctcaggaggggtgcctgtcttccgtaacatacgcaagcatgataccactgcaaatgatgcagaattatctcaggctggtggaacagtaccataatgttatcttccatgggcctgagggcagccttcaggattatattgtccaccagctcgctctctgcctaaaacataggcagatggcagccggtttctcctgcgaaattgtgcgtgcggaagttgacgccggcttctccaaggagcagctcttggacctctttatctcatcggcttgtctgattccagtgaagcaatccccatcaaaaaagaaaattatcattatcctcgaaaatctggaaaaatcctcattatccgagctcttgcgggactttttggcacccctggagaataggagtacagagagcccctgcaccttccagaaggggaacggccttagcgaatgctactatttccacgaaaactgcttcctaatgggaaccatcgcaaaagcatgtttacaaggatctgatcttcttgtacagcagcactttcggtgggtacaactcagatgggacggcgaaccaatgcagggtcttctgcagcgcttcctcaggagaaaggtcgtaaacaagtttaaaggccaggctccctctccttgcgatcccgtctgcaaaatagtggactgggctctgtctgtttggagacaacttaactcttgtttagcccggcttgggacgccagaagcattacttgggcccaaatactttctttcgtgtccagtggtgcccggtcatgctcaggttacagtcaaatggatgagcaagctatggaatggggtcatcgcgcctagagttcaggaggcgatcctctcccgagcatctgtcaaacgtcagcccggttttggccagaccacggctaagagacacccttcacagggccagcaggctgttgtgaaggcggcgttgtctatcctcttaaacaaggccgtgctccacggttgcccacttcctcgtgccgagctcgatcagcacacagcggacttcaaaggcggatctttccccttaagcatcgtgagctcttataatacttgtaataaaaaaaagggagaaagcggagcctggcgcaaagtgaacacctcaccacgccgcaaatccggtagattttctctgccaacctggaataaacccgacctttccaccgagggaatgaagaacaaaaccataagccaactcaattgtaaccgtaacgccagtctgagtaagcaaaagtcactagagaacgatctgtctcttacactcaacttggatcagaggttgagcctgggtagcgatgatgaggctgacctggttaaggagctgcagtctatgtgttcctccaaaagcgaatcagacatatcaaaaatagccgatagcagagatgacttaagaatgtttgattcatccggcaacaacccggtgctgagcgccaccattaataatcttagaatgccagtaagtcaaaaagaagtgagcccattatcatcacaccaaacaaccgagtgcagcaattcaaagtcaaaaacggagctgggagtcagtagggtaaagagctttttgcccgtcccgaggtcgaaggtgacacagtgctcccagaacacgaaaagatcttccagttcttccaacacaagacagatcgagattaataacaattctaaagaagtgaactggaacttacacaagaacgagcacctcgagaaacccaacaagtag

SEQ ID NO: 248158 - RNA, 1233 nt, synthetic construct
  misc_feature 1..1233: note = Description of Artificial Sequence: Synthetic coding sequence
  source 1..1233: mol_type = other RNA
atgcagcgattattatttcctcccctgagggctcttaaggggcgacagtacctccctcttctggcacctagggccgcccctcgcgcgcagtgcgattgtatccgacggccgctccgtcccggtcaatactctacaatttctgaggtggccctccagtccggccgtggcaccgtgagtctcccctccaaggcagccgagagagtggtgggcagatggttgctagtctgctcagggacggtggctggcgctgtgattttaggaggagtaacgcggctgactgagtcaggcttatccatggttgattggcatttaatcaaggagatgaagcctccaacaagtcaagaagaatgggaagctgaattccaaagataccagcagtttccagagttcaagatcctgaaccatgatatgacccttacagagttcaagtttatctggtacatggaatactctcacagaatgtggggccggctggttgggctggtgtacattcttccagcagcttatttttggagaaaagggtggttaagtcgtggtatgaagggtcgagttctggctctttgtggattggtgtgctttcagggactccttggttggtacatggtgaaaagcgggctggaggagaagagtgactcccatgatatccctagggttagccagtaccgtctcgcggcacatctgggaagcgcccttgtgctctactgcgctagcctgtggacaagcttgtctctgctgttaccccctcataaactgcccgagacacatcagctgctccaacttcggcggttcgcccacggaactgctggtttggtgtttttaactgctctgtccggagccttcgtggctgggttggacgctggactggtgtataacagcttcccaaaaatgggcgaatcatggatccctgaagacttgtttactttttcacccattttgaggaatgttttcgaaaaccccactatggttcagtttgaccaccgaatattggggatcacttccgtgacagccattactgtgctgtacttcctgtcccggcggattcctttacctcggagaaccaaaatggctgctgttactttgctggctctcgcctacacgcaggtgggcttgggtatctccacgcttttgatgtacgtccctacgcccctcgctgccacccaccaaagcggctcactggctctgttaacgggcgccctatggctgatgaacgaacttagacgagtcccaaagtag

SEQ ID NO: 248159 - RNA, 2604 nt, synthetic construct
  misc_feature 1..2604: note = Description of Artificial Sequence: Synthetic coding sequence
  source 1..2604: mol_type = other RNA
atggaggtacccgcggccgggagggtgcccgcggagggggcccctaccgccgcagtggccgaggttcgctgtcctggcccagctccactgcgccttctagagtggcgggttgctgccggagccgctgtgagaatcgggtccgtgttggcggtgttcgaagctgctgcaagcgcccaatccagcggcgcttctcagtctagagtggccagcggtggatgcgtccgccccgctaggccagaaaggcgattgaggagtgagcgcgccggcgtggttagggagttatgtgcccagcccggccaggtggtcgcacccggtgctgtgctcgtccgcctcgagggttgcagccaccccgtggtgatgaagggcctatgtgcagaatgcggacaagatctcacccaacttcagtccaaaaacggaaaacagcaagtgcctctgagtacggccacagttagcatggttcatagcgtgccagaactgatggttagctctgagcaggcagagcagctgggacgggaggaccagcaacgactccaccgaaatagaaagcttgtattgatggtcgacctcgatcagaccctcatccacacaacagaacagcattgccaacaaatgtccaacaagggcattttccactttcagcttggcaggggcgagcccatgctccatacacgcctccggccccactgcaaggattttctggagaaaattgcaaaactgtatgaactccatgtgttcacttttggctcaagactgtacgcacatactatcgccggcttcctcgaccccgaaaaaaagctttttagtcaccgcatactgtcgagagacgaatgcattgaccctttctcgaagacgggaaatttgaggaacctcttcccctgcggagactctatggtgtgtattattgatgatagggaggacgtgtggaaattcgcaccaaaccttattacagttaaaaagtatgtatatttccagggaaccggagacatgaacgcacctccagggtcgagggaatcacagacccggaaaaaggtgaatcactcacgggggactgaggtctcagaaccttcaccacccgtccgcgaccccgaaggtgtgactcaagctcccggcgtagaaccatctaacgggctcgagaaacctgctcgagaattaaatgggtccgaggcagccacacctagggacagtcctaggcccgggaagcccgatgagcgtgacatctggccacctgcgcaagccccaacatcgtcccaagaactggccggcgcacctgagccccaggggagctgcgcccaggggggaagagttgccccagggcagaggccagcacagggtgcgaccggcacagacttagattttgacctgtctagcgatagtgaatcctccagcgaatccgagggcactaaatctagtagttcagcctccgacggtgagagtgagggaaagcgcggtcggcagaaaccgaaggccgcccccgaaggggccggggccctggcacaaggaagcagcctggagccaggaaggccagccgcaccttccttgcctggtgaagcagagccaggagcgcacgctccagacaaggaaccagagctgggcggacaggaggagggagagagggacggcctgtgcgggcttgggaacgggtgcgcagatcgaaaggaggctgagactgagagccaaaacagcgaactcagtggagtaaccgcgggggagtctctggaccagagtatggaggaagaggaggaagaagacaccgacgaggacgatcaccttatctatttggaggaaatccttgtcagggttcacacagactattacgccaagtacgatcgatacttgaacaaagagattgaggaggctcccgacatccggaaaattgttcccgaacttaagtccaaagtgctagcagacgtcgcaataatcttcagcgggctgcatccgaccaattttcccatagaaaaaaccagagaacattatcatgcaacagctctgggcgccaaaatactaaccagactggtccttagtccagatgcccccgatcgcgccacacacctgatcgccgcgcgcgctggcactgagaaggtgctgcaggctcaagagtgcggccatttacatgttgtgaatccagattggctttggtcttgcctagagcggtgggacaaagtcgaagaacagctgtttcccctgagagacgaccacacaaaagcgcaaagagagaactctccagcagcatttcctgacagggaaggagtgcccccaaccgccctgttccatcctatgcccgtgctcccaaaagcccagccggggcctgaagttaggatctatgatagtaataccggtaagctgatccgcactggcgcccggggtccgcctgctccctcctcctctctccccataagacaggagccatctagcttcaggtggacaacttcactggagaaagcagccaccacggcaacagcacgaagaggcggtctgagaagtcggaggagatctccttcacctggttcgcagggaccagcaggatcaggacggtcaggccatttgcgccccgccaggggtgccagacaaggcgcaggcggaccagaggccaccagaggcagttag

SEQ ID NO: 248160 - RNA, 606 nt, synthetic construct
  misc_feature 1..606: note = Description of Artificial Sequence: Synthetic coding sequence
  source 1..606: mol_type = other RNA
atggcaagggactacgaccatctatttaaactgctcatcatcggggattccggtgtcggaaagagctcactgctgctccgttttgctgataatacattttcaggctcttatattacaaccattggagtagacttcaagataaggacagtggagatcaacggcgaaaaagtgaaactccagatatgggacaccgccggccaagaacggttcagaactattacgagtacttattaccgtggcactcatggtgttattgtggtctatgatgtgacatctgccgagagttttgtaaacgtgaagcgctggctgcacgaaataaatcagaattgcgatgatgtgtgtcggattctcgtgggaaacaagaacgacgatccagagagaaaagttgtggagacagaggacgcttataagtttgctggacagatggggattcaattgtttgagacaagtgctaaggaaaatgttaacgtagaagagatgttcaactgtatcaccgaactggtactcagagccaagaaggacaacctggcgaaacagcaacaacagcagcaaaatgacgtggttaaactcacgaagaacagtaagagaaagaagagatgctgttag

SEQ ID NO: 248161 - RNA, 1530 nt, synthetic construct
  misc_feature 1..1530: note = Description of Artificial Sequence: Synthetic coding sequence
  source 1..1530: mol_type = other RNA
atggccgccgctgccggaatgctgcttctcggactgctgcaggcaggaggaagcgtattgggccaggccatggaaaaggtcactggcggcaaccttcttagtatgttgctgattgcatgtgcatttaccctttctcttgtctaccttatccggctcgccgccgggcatctggttcagttacctgcaggggtgaaaagccccccatatatattttctccgattcccttcttaggccacgctattgccttcggcaaatccccgatagaattccttgagaacgcctacgagaaatatggcccggtgttttccttcaccatggtgggaaagacctttacatacctgctgggttctgatgccgccgccctcctgttcaactcaaaaaacgaagacctgaatgctgaggacgtgtattcccgtctcactaccccagtatttggaaagggcgtcgcttatgacgtcccaaatcccgtcttcctggagcaaaagaaaatgctgaagtcggggcttaatatagcgcattttaaacagcatgtttcaattattgaaaaggagacaaaggaatactttgagtcttggggggaaagcggagagaagaacgtgtttgaggccttgagtgagttaataatcctgaccgcctcccactgcctacatggcaaagaaattagatctcaactgaacgagaaggtcgcccagctgtacgcagacctggatggcggattctctcacgctgcctggctgctcccaggttggctgccgctccccagctttagaaggcgggacagggcacaccgggaaataaaggacatcttttacaaggcaatccaaaagagacgacaaagccaagaaaaaattgacgatattttgcaaacccttcttgatgccacatataaagatgggcggcctttaaccgacgacgaagtggcggggatgctcattggtctgctcctggccggacagcacacttcttccacgacatcagcatggatgggcttcttcttggcacgcgacaagaccctacaaaagaaatgttacctggagcagaaaacagtttgtggtgagaacctgcccccgctaacttacgaccaattgaaggacttgaacctgctggaccgttgcattaaagaaacgctgagacttcgtccgcctattatgatcatgatgcgtatggctcgcactccacagacagtggcgggctatactattccaccagggcatcaagtatgtgttagcccaactgtgaaccagcgcctaaaggacagctgggtagaaagacttgattttaaccccgatagatatctccaggacaacccagcctctggggagaagttcgcgtacgtcccattcggcgctggcagacaccgatgcatcggggaaaatttcgcatacgtgcagataaaaaccatctggtccacaatgttaagactgtacgagttcgacctgattgatggctacttccctacagtaaactataccaccatgattcatacgccagagaaccccgttattcggtataagcggaggagtaaatag

SEQ ID NO: 248162 - RNA, 1080 nt, synthetic construct
  misc_feature 1..1080: note = Description of Artificial Sequence: Synthetic coding sequence
  source 1..1080: mol_type = other RNA
atgaaggcaacaattatactgttgttgttggctcaggtaagctgggcaggaccctttcagcagcggggccttttcgacttcatgttagaggatgaggcatcaggtattggaccagaagtgcctgacgaccgagacttcgaaccttcgctgggccccgtttgccctttccgatgtcagtgtcatcttagggtggtgcagtgctcggatttgggcctggataaggtgcctaaagatctccctccagataccactctcctggatttacagaataataagattacagagatcaaagatggtgactttaaaaatctgaaaaacctacacgctctgatcctggtgaacaataagatcagtaaagtaagcccaggcgcgtttacgcccttggtcaagctggaacgcttatacctctcaaagaaccagctaaaagagctgcccgaaaagatgcctaaaacacttcaggagctcagagcccatgagaacgagataacaaaagtccgaaaggtgacatttaatggccttaatcagatgatcgtgatcgaactgggaacgaacccgttgaaaagctcaggaattgagaatggcgcatttcaggggatgaaaaaattatcctatatccgtattgccgacacaaacatcacttcaataccacagggtctaccgccctctctcactgaactgcacctcgacgggaacaaaatatctagagtggatgcagcctcccttaagggtctcaacaatctcgcaaagcttgggctgtctttcaactcaatttctgcagtggacaatgggtccctcgccaacactccacacctaagggaactccacctggacaacaacaaacttacacgcgtcccgggaggactagcagaacacaagtacatccaagtggtatatttacacaacaataatatttctgtcgtaggatctagtgatttctgtcccccaggacacaacaccaagaaggcctcttactctggcgtcagtctattttcaaaccccgtgcagtattgggagatccaaccgtcaacttttcgatgcgtctatgtccgctcagccattcaactgggaaactacaaatag

SEQ ID NO: 248163 - RNA, 909 nt, synthetic construct
  misc_feature 1..909: note = Description of Artificial Sequence: Synthetic coding sequence
  source 1..909: mol_type = other RNA
atgcactatccaacagcccttctgtttctgattctcgcgaacggagctcaagccttccgaatctgtgcttttaatgctcagaggctaacactcgcaaaagtcgcaagggaacaggttatggatacattagtgagaattctggccaggtgcgatattatggtcctgcaggaagtggtggactcatccgggagcgccatccccctgttactgagagagctcaatagatttgacggaagtggtccttactctactttatcctctccacagctaggccggagcacgtatatggagacatacgtgtacttctatagatctcataaaacacaggtgttatcttcatatgtttacaatgacgaggatgatgtgtttgcaagggagccattcgtggcacaattctcattaccttcaaacgtgttgcctagcctcgtgcttgtgcctttacacacaactcccaaggcggttgagaaggaattgaatgctctgtacgatgtcttccttgaagtttcacagcactggcagtccaaagacgttattcttctaggcgactttaatgccgattgcgcgagcttgactaagaagagactggacaagttggaactgagaaccgaacctggctttcactgggttatagcagatggtgaggatactacagtacgcgcaagcacacattgcacatatgatagagtggtactgcacggcgagcgttgccgttccctcctgcacaccgctgcagcatttgactttcccacatctttccagctgacagaagaggaggccctcaacatctcggatcactacccagttgaagtggagcttaaattatctcaagctcattctgtacaaccattatctctgaccgtccttctcctgctgtcgctgctctccccccaactgtgccccgcggcatag

SEQ ID NO: 248164 - RNA, 282 nt, synthetic construct
  misc_feature 1..282: note = Description of Artificial Sequence: Synthetic coding sequence
  source 1..282: mol_type = other RNA
atgaaacttttgatggtgctcatgttagccgctctctctcaacattgttatgctggttctggatgtcctcttctcgagaacgtgatcagcaaaaccattaacccccaagtcagcaagaccgaatacaaagaactgcttcaagagttcatcgacgataatgctactaccaatgctatagacgagctgaaagagtgttttttgaaccagactgatgaaaccctgtctaatgtcgaagtgtttatgcagctgatttatgattcaagcctgtgcgacctcttttag

SEQ ID NO: 248165 - RNA, 1689 nt, synthetic construct
  misc_feature 1..1689: note = Description of Artificial Sequence: Synthetic coding sequence
  source 1..1689: mol_type = other RNA
atggacgccatgaaaagaggcctatgctgtgtgctgctgctctgcggggcagtctttgtgtcaccatctcaggagatccacgctcggttcagaagaggagcaaggagctaccaagtaatctgtagggacgagaaaactcaaatgatctatcaacagcaccagtcttggctacgccccgtgctgagatcaaatagggttgagtactgctggtgtaattctgggcgtgcccaatgtcatagtgttcctgtaaagagttgcagtgaaccccggtgtttcaatggaggcacctgccaacaagcgctctacttcagtgattttgtgtgccagtgtccagaagggttcgcaggtaaatgctgcgagatcgacacacgggctacctgttatgaggaccaaggcataagctaccgcgggacttggtcaactgcagagtcaggcgctgagtgtacgaactggaactctagcgccctggcccagaagccttacagcggtcggcggcccgatgccatccgcctgggacttggaaaccacaactactgtcggaatccagaccgggatagtaagccttggtgctatgtatttaaagcaggcaaatactcaagcgaattttgcagtaccccagcatgctcggaaggtaatagcgattgttattttggcaatggcagtgcctaccgtggaacccattccctgaccgaaagcggcgcttcctgcctcccttggaactccatgattctgatcggaaaagtctatactgcgcagaatccttcagcccaggccttagggctcggtaagcataattactgtagaaatcccgatggcgatgccaaaccgtggtgccacgttctcaaaaatcgtagacttacgtgggaatactgcgatgtgccaagctgcagcacatgtggactgcgtcaatacagccagcctcagttcagaattaaaggtggcctgttcgccgatattgccagtcatccttggcaggccgccatcttcgcaaaacaccgcaggagcccaggggagagattcttgtgtggcggaattctaatttccagttgctggattctgtccgccgcccactgtttccaagagcgattcccgccgcaccatctgaccgtaattctgggcagaacttacagagtagtgcctggagaggaggagcagaagttcgaggtggaaaagtacatcgtgcataaagaattcgacgacgacacatacgacaacgacattgctcttctgcagctcaagtctgattcttcacggtgcgcccaggaaagtagcgtggttcgtacagtgtgcttgcccccagctgacttgcagctcccagattggactgagtgtgaactctccggctacggcaaacatgaggcattatcccccttttactccgaacgtctgaaagaagcccatgtgaggctatacccatcttcacgctgtacaagccaacacctgctgaatcggacggtgacagataacatgctgtgtgcaggcgacacacggtccggcggacctcaagctaacctccacgacgcctgtcagggcgactccggcgggcccctcgtgtgcctgaatgacggcagaatgacactggtgggcattattagctggggtctgggctgtgggcagaaggacgttcctggtgtttacactaaagtgacaaactacttagactggatcagagataatatgaggccgtag

SEQ ID NO: 248166 - RNA, 5286 nt, synthetic construct
  misc_feature 1..5286: note = Description of Artificial Sequence: Synthetic coding sequence
  source 1..5286: mol_type = other RNA
atgcagttccagttaaccctctttctgcacttaggatggctgagttactccaaggcccaggacgactgcaaccgaggtgcttgccaccctactaccggagacctcctcgtcgggagaaatacccagttaatggcttcatccacttgcggactttctagggctcagaagtattgcatactgtcttatctggagggagaacagaagtgttttatttgtgatagcagatttccatacgacccctacgaccagcctaattcccataccattgaaaatgttattgtaagtttcgaacccgatcgggagaaaaaatggtggcagtcagagaacgggttggatcacgttagcattcgattggatctggaggcacttttccgtttttcccatctcatcctcacttttaaaacttttaggcccgccgccatgctggtggagagaagtacagattacgggcataactggaaggtctttaagtattttgcaaaagattgtgcgacttctttcccaaacataacctcgggccaagctcagggtgtcggcgacatcgtatgcgactccaaatacagcgatatcgaaccatctaccgggggcgaagttgtcctaaaagtactggacccctccttcgaaatagaaaacccatattccccgtatatccaggacctggttaccttgactaacctaagaataaatttcactaagttgcataccctgggcgacgccctgcttggaaggcggcaaaatgattcactagataagtattactatgctctttatgagatgattgtgcgtgggtcttgcttttgcaatggccacgcctccgaatgccgccccatgcagaaaatgcgtggggacgttttttccccccccggtatggtgcacggacagtgcgtctgtcaacataatacggatgggcccaattgcgagagatgtaaagatttttttcaagacgctccctggagaccagcagccgatttgcaggataatgcctgtcgctcttgttcttgtaactctcacagctcccgctgccactttgacatgaccacatatctggcttcaggtggtctcagtgggggcgtatgcgaagattgtcagcacaatacggagggtcagcactgtgatcgatgccgtccccttttttaccgcgaccctctcaagacaatcagcgacccgtatgcctgtataccttgcgaatgcgatcctgatggtacaattagtggaggcatttgtgtcagccactctgaccccgctctgggatcagttgcagggcagtgcctgtgcaaagaaaacgtggaaggagctaaatgtgatcagtgcaagccgaaccattatgggctttccgctacagaccctctcggatgtcagccttgcgattgtaatccattgggtagtttaccctttctgacgtgcgatgtggataccgggcagtgtctctgtctgagctacgtcaccggtgcacactgcgaggaatgcacggtgggttactgggggctcggtaatcatctgcatggctgctccccctgcgactgtgacattggaggagcttacagcaatgtgtgctcccctaagaatggtcaatgtgaatgtcggcctcacgtcacaggccgttcctgctccgagcccgctccgggctatttttttgcgcccctgaacttttacctttatgaggcagaagaggcaacaacgttgcagggtcttgcccccctgggtagtgaaactttcggtcaatcgcctgccgtccacgtggtacttggtgaaccagtgcctggaaatccagtgacttggacagggccgggattcgcgcgcgtgctaccaggagccgggttacgattcgccgtcaataacattccttttccagttgacttcaccattgccatccattacgagacccagtctgcggctgactggaccgttcaaatcgtcgtgaatcctcctggcggctccgagcactgcatccccaagaccctccagtctaagccacagagcttcgctctgcccgctgctactcgaataatgctattgccaacccctatttgcctggagcctgatgtgcaatatagcatcgatgtctacttctcccagcccctgcagggagaatcacacgcccattctcatgtcctggtggacagtctcggtctcataccccagattaactctctggaaaacttttgctcaaaacaggatctcgacgaatatcaattgcacaattgcgtggaaatcgctagcgctatggggccgcaagttctgccaggcgcctgtgaaaggctgatcatatcaatgtctgctaagctgcatgatggtgctgtcgcctgtaaatgtcacccacaagggtcggtgggctcctcctgttcacggctaggcggccagtgccagtgtaagccgctggtggtagggcgttgctgcgacagatgcagtacaggcagctacgaccttgggcaccacggatgtcacccctgccactgtcatccccaggggtccaaagatacagtgtgtgatcaggtgactggtcagtgcccgtgtcacggtgaggtttcaggccgccggtgtgaccgctgtttggccggctattttggctttccttcatgtcacccttgcccttgcaaccggtttgccgaactttgcgaccccgaaacaggctcctgttttaactgtggaggtttcacaacaggtcgcaattgtgagaggtgcatagatgggtattacgggaatccttctagcggtcaaccgtgtaggccatgcctgtgtcctgatgacccttccagcaaccagtacttcgcccatagctgttaccagaatctgtggtcttcggatgtcatatgcaattgtctccagggttataccggaacacaatgcggggaatgcagtactggtttctacggaaaccctcgcatctctggcgctccttgtcagccatgtgcctgcaataacaacatcgatgtcactgatcctgagagttgcagccgagtcacgggggagtgcttaaggtgtctccacaatacacaaggcgccaattgtcagttgtgcaaacctggccactatggcagtgctctgaatcagacttgtcgtcgatgctcctgccacgcttccggcgtatctcccatggaatgtccccccgggggcggtgcatgcctttgcgatccagtgactggtgcctgcccctgtctccccaatgtaaccggcctcgcatgtgaccggtgtgccgacgggtactggaatctggtgccggggagaggctgccaatcatgtgattgcgaccccaggacttctcagagtagccattgcgatcaattgactggtcagtgtccttgcaagctgggctacggagggaaacggtgttcagagtgtcaggagaactactacggtgacccaccaggcaggtgtatcccctgtgactgtaaccgtgccgggacccaaaagcccatttgcgatcctgataccgggatgtgtcgctgtagagagggcgtgtcgggacagagatgtgatagatgtgcccgtggccactctcaagagtttcccacttgtctgcaatgtcatctgtgctttgaccaatgggaccataccatctcgtctttgagtaaggccgtgcagggactcatgcggttagctgctaacatggaggataagagagaaactctgcctgtgtgcgaggccgattttaaggatttaagggggaatgtatcagaaatcgaaaggattctcaaacaccccgtattccctagtggcaagttcttaaaagtgaaggactaccatgactctgtgcggaggcagattatgcaacttaatgagcaactgaaggcggtgtacgaattccaggatctaaaagatactatcgaaagggcgaaaaacgaggcggacctcctccttgaggacctgcaagaagaaattgatctgcagagctcagtgctgaacgcttccatagcggacagctccgagaatattaaaaagtattaccacatctccagcagtgcagagaagaagattaatgaaacgtcatccaccataaatacaagcgcaaataccagaaatgatctcctcacaattctggacactctaactagtaaaggaaatctatccctggagcgactgaaacagatcaaaattcctgatatccaaattctgaacgagaaagtgtgtggcgaccctggtaacgttccctgtgttccactaccttgcgggggtgccctctgcaccggacgcaaaggtcacaggaagtgtcggggaccaggatgccacggcagtttgaccctctcaaccaacgctcttcagaaagcccaggaggctaaaagtatcattcgcaaccttgacaagcaggtgcgcggccttaagaatcagatagaatcgattagcgagcaggcagaagtctcgaagaacaatgcattacaattacgagagaagctcggaaacataaggaatcagtcagatagcgaagaggagaacattaacctgttcattaaaaaggtgaaaaacttcctgctggaggaaaacgtgcctcctgaggacattgagaaagtagctaacggcgtgttggacatccacctgccaatcccaagccagaatcttacagacgaactggtgaaaattcagaagcacatgcagctgtgcgaggattacagaactgacgagaaccggctcaatgaggaggcagacggagctcaaaaattgctcgttaaggcaaaggccgcggaaaaggccgccaacatcttattaaatctggataaaactttgaatcagctgcagcaggctcagatcacacaaggccgagccaatagtaccatcacgcagttgaccgctaacattaccaagattaagaagaacgtgcttcaggcggaaaaccagacacgtgagatgaaatctgagctggagctcgccaaacaacggtccggcctggaggatggattatcactcttgcagacaaagttgcagcggcaccaggatcatgcggtaaacgcaaaagtgcaggctgagtccgcacagcaccaagcaggaagcctcgaaaaggagtttgtggaattgaagaaacagtacgcaattctccagcggaaaacgtctacgacgggcctgactaaggagacactcggcaaagtcaagcagctgaaggatgccgccgaaaagctggcaggggatacagaggccaagattcggcgtatcactgaccttgagaggaaaattcaggatttaaatctgagtcgacaggctaaagccgatcaactccggatccttgaggaccaggtggtcgctataaaaaacgagattgtggagcaggagaaaaagtatgctcgctgctactcttag

SEQ ID NO: 248167 - RNA, 798 nt, synthetic construct
  misc_feature 1..798: note = Description of Artificial Sequence: Synthetic coding sequence
  source 1..798: mol_type = other RNA
atgatgaccatgaccacgatggcagacggcctggaaggtcaggattcttctaagtctgccttcatggaatttggccagcagcaacagcagcagcatagtcccgcgatggcaggggcgcattacccactgcactgcctacactctgccgcagccgccgcagcagcaggctcccaccaccaccatcaccaccagcatcaccatcacggtagtccatatgcctccggcggtggcaatagctataatcacaggtcgctggccgcctatccatatatgagccacagccagcactcaccatatctccaatcataccataattcttccgctgccgctcagactcgaggcgacgacacagaccagcagaagacaacagtcatcgagaatggagaaatcagatttaacggcaagggaaagaagatacgaaagccacgtacaatatacagttctttacaactgcaggctctcaaccatagattccaacaaacacaatacttagctcttcctgaacgagccgagttggccgccagccttggattgactcagacccaagttaagatctggttccagaacaaaagaagtaaattcaagaagcttctgaaacagggatcaaacccccacgagtctgaccccctgcaggggagcgccgcactgtccccaagaagtcccgccttacctccagtctgggacgtatcagcctctgctaagggggtttccatgcctccaaatagctatatgccaggatattcacattggtattctagcccacatcaagacaccatgcagcggcctcagatgatgtag

SEQ ID NO: 248168 - RNA, 1563 nt, synthetic construct
  misc_feature 1..1563: note = Description of Artificial Sequence: Synthetic coding sequence
  source 1..1563: mol_type = other RNA
atgccagccagcgaactcaaggcctcggagatcccttttcacccatctattaagacacaggacccaaaagccgaagaaaaaagcccgaagaagcagaaagtgacccttaccgcagctgaggctctgaaattatttaagaatcagctgtcaccttacgaacaatctgaaattttggggtacgccgaactctggtttctgggcctcgaagccaagaaactcgatacagcccctgaaaagttttcaaaaacaagtttcgacgacgagcatgggttctatctgaaggtactgcatgatcacattgcttatcgctacgaagttttggagaccattggtaagggcagctttggacaagttgctaaatgtctagaccacaagaataatgaactggtggcattaaaaattattagaaacaaaaagagatttcaccagcaggcccttatggagctcaagatcctggaagccttgcgaaagaaagacaaggacaatacctacaacgtcgtccatatgaaggactttttttacttccgcaatcatttctgtattacatttgaactgcttggcatcaacctatatgagttaatgaaaaacaacaattttcagggcttctccctgtccatcgtgagacggttcacactgtcggtcctcaagtgcttgcaaatgctcagcgtggagaagatcattcattgtgatttaaaacccgaaaacatagtcctgtatcaaaaaggccaagcgtccgttaaagttatcgacttcggttcctcttgctacgagcatcagaaagtttacacctatatccaatcgcggttctataggtcacccgaggtaattctggggcatccctacgatgtggctatcgacatgtggtctttaggctgtatcactgctgagttatatacagggtatcctctctttcctggcgaaaacgaagttgaacagctggcttgcattatggaggtgctcggcctcccccctgctggcttcatacaaaccgcctcaagacgccagaccttcttcgactccaaaggcttccccaagaacattacaaataacagggggaaaaagagataccctgatagcaaggatctgaccatggttctgaagacatatgatacttcatttctggactttctgagaaggtgtctggtatgggaacctagtctgagaatgacccccgatcaagctctgaagcacgcatggatacaccagtcaagaaatctaaagccccagccccgccctcagacactgcggaaaagtaatagtttctttccaagcgaaacacgaaaagataaggtgcagggctgtcaccactcttctcggaaggcagacgagatcaccaaggaaaccacagagaaaacaaaagattcacctaccaagcatgtgcagcactccggcgatcagcaagactgccttcaacatggagctgataccgttcagctcccccagctcgtcgatgctcccaagaaaagtgaggcagctgtgggcgcagaggttagcatgacgtccccaggtcagagcaagaattttagtctcaagaacacgaacgtgcttccaccaatagtgtag

SEQ ID NO: 248169 - RNA, 2619 nt, synthetic construct
  misc_feature 1..2619: note = Description of Artificial Sequence: Synthetic coding sequence
  source 1..2619: mol_type = other RNA
atgagttccaaggcggaaaaaaagcagagactttccggacggggttcgtctcaagctagttggtccggcagagccacaagggccgctgtcgccactcaagagcaaggcaatgctccagccgtgtctgagccagagttacaggcggaattacccaaagaagaacctgaacctaggctcgagggtcctcaggctcagtccgaagagtcagttgagcctgaggctgacgtgaagcccttgttcctgagcagggcagccttgactgggttagcagacgccgtttggacccaggagcatgatgcaatccttgaacacttcgcacaagaccccacagaatctatccttacgatttttatcgatccatgtttcggactgaaactggaactgggcatgcccgtccagacacagaaccagctagtctattttatccgccaggcccctgtgcctattacttgggagaacttcgaagccactgtgcagttcgggactgttagaggaccatacatccccgcacttttgagactgctaggaggcgtgttcgctcctcaaatatttgcgaacactggatggcccgaatcaataaggaaccactttgcctcgcacttgcacaagttcctggcttgcctcactgatacaagatataaacttgaaggccacacagtactttatatcccagctgaggcaatgaacatgaagcccgaaatggtaattaaggacaaggaattagtccagcggctcgagacaagtatgatccattggaccagacagatcaaagagatgttaagcgcccaggaaaccgtagagaccggcgagaacctcggtcctctcgaagaaatcgaattttggagaaatagatgtatggacctgagtggcatttctaaacaacttgtgaagaagggtgtgaagcacgttgagtcgattctgcatctcgctaagagctcttacctcgccccattcatgaaattggcccaacagatccaagacgggtcaaggcaggcccagtctaacctgaccttcctcagtattctgaaggagccttaccaagagctcgcattcatgaagcctaaggatatatcgtcgaagctgccaaaacttatttctctcatccgaatcatttgggtcaactctccacactataacacgcgggaacgactgacctctctattccgcaaaatgagcaacgagatcatcagactgtgctgccatgccatttccttggaccgtatattcgaaggttatgtgagctcgtccaaagaggatcttcagggatgtattctgtgctgtcatgcgtggaaagaccattatgtccaggccgtgcagatgcacatacagttctcttctcggggctgggtgctcgatcagacttcgatattcgcacaggtcgatgcatttgtacagaggtgtaaggacctcattgaagtgtgcgactgccaatatcacttcgctcgctgggaagatggaaagcaggggcccctgccatgcttcttcggagcccagggaccccagatcacaaggaacctgttggagattgaagatatctttcataagaacttgcacacacttcgcgccgtcagaggggggattctagatgtcaaaaatacctgttggcacgaggactacaacaagtttagagctgggataaaggatctggaggtcatgacacaaaatctgatcacttctgccttcgagctcgtacgcgacgttccccatggagttctgctgttagacacctttcatcgattggcatctcgggaagctataaagcgaacatatgacaaaaaggcggtagacctgtatatgctctttaactccgagctcgccctggtgaatcgcgaacggaataaaaaatggccagacctggagccctacgtcgcgcaatatagtggcaaggctagatgggtccatatcctccggcgaaggatcgatagggtcatgacctgcctcgctggcgcgcatttcctgcctaggatcggaaccggcaaggaatctgtgcatacatatcaacaaatggtgcaggccatcgacgaattggtgaggaaaaccttccaagagtggacttcgtctctggacaaggattgtatcaggcgcctggacacccccctcttgcgtatctcccaagagaaagcagggatgttggacgtaaacttcgacaagtataggtctcatctggcccctttcccttatacaccactgctccagctttctcaggagtttcacagccacctgctaacgcccctcttcataattttgtcattaagtcatactatttgccttctcagttctttttacttctttttcagtagcttcatctttgtaagccctcacttacccccgtgttaccagcacttcaactttaccacatacctgaagacacagcagaacaagactatgatcggccaggcccgatggctcacccctgtgatacctgctctctgggaagccgaagtcggtgcctcgcttgaaccaagatccttgcggacggcttgggcaacgtggcagaaccctgtctctgcgaagaataccaagatctcatgggcttggtggcataaaccagtggtgtcggctacctgggagggtgaggtcggcgggtctccagagccaggacggcaacgcctccagtag

SEQ ID NO: 248170 - RNA, 2592 nt, synthetic construct
  misc_feature 1..2592: note = Description of Artificial Sequence: Synthetic coding sequence
  source 1..2592: mol_type = other RNA
atggcccgcagaagttccttccaaagttgtcaaatcatttctctcttcactttcgccgtgggggtaaatatctgtctcgggttcactgcccatagaataaagcgggcagagggctgggaagaaggcccgcctacagtcctatcagatagcccttggactaacatttccggaagttgtaaaggacgctgtttcgagctccaggaagccggtccccctgactgccgctgtgacaacctctgtaagtcttatacctcctgctgtcatgatttcgacgagctgtgcttaaagaccgcgcgcggctgggaatgcaccaaagaccggtgtggggaggtgcgcaatgaggaaaacgcgtgccactgtagtgaggactgtttggcccggggggattgctgcacaaactatcaggtcgtgtgtaaaggtgagagtcactgggtcgatgatgactgtgaggagattaaggccgccgagtgccccgcagggttcgtccggccccctctcattatatttagcgtggatggctttcgcgcaagttacatgaagaagggctcgaaagttatgcccaacattgaaaagctaaggagctgcggcacgcattctccctatatgagacctgtctatcccacgaagacttttcctaacctctatactttggccacagggttgtacccagaatctcacgggatagtcggaaacagcatgtatgaccccgtgttcgacgctaccttccaccttcgcggacgtgaaaaatttaaccatcgttggtgggggggacagcctttgtggattaccgctaccaagcagggcgtgaaggccgggacttttttctggtcggtcgttatccctcatgagcgcagaatattgaccatactgcagtggctaactctgcctgatcatgagagaccttccgtctatgccttttacagcgagcaacccgatttttccggccataagtacggccccttcggtcccgagatgacgaaccctctgcgcgaaatagataagatcgtcggccagctaatggatgggctcaaacagctgaaactccaccgctgtgtcaacgtgatcttcgtgggagatcacggaatggaagatgttacatgcgaccgaaccgaattcctttctaactaccttacaaatgttgatgatatcactctggtcccaggaacccttggacggatccggagtaagttctccaacaatgcgaagtatgacccaaaggccataatagctaacctgacttgtaagaagccagatcagcatttcaaaccgtatctcaagcagcacctgcctaagcgcctgcactacgccaataatcggagaatcgaggatattcacctgttggtagaaagaaggtggcacgtggccagaaaaccattggacgtgtataaaaaaccatcagggaaatgtttcttccaaggcgatcatggatttgacaacaaggtgaattccatgcaaactgtcttcgtggggtacggctccacctttaaatacaaaaccaaggttcctccgttcgagaatatagagctttacaacgtgatgtgtgatctgttgggactaaaacctgcccctaacaacggcactcacggcagcctgaatcatctgctacggacaaatactttcaggccgacaatgcccgaggaagtcaccaggcctaattatcccgggatcatgtaccttcagtccgattttgatcttggctgcacttgcgatgataaagttgaacccaaaaacaagctagacgaactgaacaagcggctgcataccaaaggaagcaccgaagaaagacacctcttgtacgggcgtcctgcggtgctatacagaactcgttatgatatcctgtaccataccgacttcgagtcaggctactcagagatattcttgatgcccttgtggacttcttacaccgtaagcaaacaggcggaagtgtcaagtgtgcccgaccacctgacaagctgtgtgagaccagatgtccgcgtatccccctccttttcacagaattgtcttgcttacaaaaacgataaacaaatgagttacggctttcttttcccaccctatctgtcttcctctcccgaagccaagtatgacgccttcctcgtgacaaatatggtccccatgtaccccgccttcaaaagggtctggaattattttcaaagagtgctggtgaagaaatatgcttcggaaagaaatggcgtcaacgttatcagcgggcccattttcgattacgactatgacggtctccatgacactgaggataaaattaagcagtacgtcgagggatcatccattcccgtacctacacattactatagcattataacttcgtgcctcgactttacacaacccgcagataagtgtgatggacccttaagcgtctcttcgttcattctcccacataggcctgataatgaggagtcttgtaacagctctgaggatgagtccaagtgggtggaggagttaatgaaaatgcacaccgctcgagtgcgtgacattgaacatctgacctcactggactttttcaggaagactagcaggtcctatcctgaaatcctgaccttgaagacctatctccatacttacgaaagtgaaatctag

SEQ ID NO: 248171 - RNA, 1332 nt, synthetic construct
  misc_feature 1..1332: note = Description of Artificial Sequence: Synthetic coding sequence
  source 1..1332: mol_type = other RNA
atgctcccctgcgcatcttgcctgcccggcagccttctgctttgggctctcttgctcctcttactaggttcagccagcccccaagactctgaggaaccagactcctacaccgagtgcactgatggatacgaatgggaccccgactcccagcactgccgagatgtaaacgaatgtctgactatcccggaggcctgcaagggagaaatgaaatgtatcaatcactatggaggatatctatgtctccctcgcagtgccgcagtgattaatgacctccatggcgagggccccccaccgcccgtaccccccgcacaacatccaaacccttgcccaccaggatatgaaccagatgaccaggactcctgtgttgatgtggacgagtgcgctcaggctctgcatgactgccggccctcacaggattgccacaacctcccgggaagttaccaatgcacatgcccggatggatataggaagataggtcccgaatgtgtggacatcgatgaatgtaggtaccggtattgtcagcataggtgtgtcaacctcccaggttctttccgctgtcaatgcgagcctgggtttcagctgggccctaacaaccgttcctgtgttgacgttaatgaatgcgatatgggggccccctgcgagcaacggtgtttcaactcatatggtactttcttgtgccgctgccaccaggggtacgagctgcatcgggacggcttctcttgttccgatatcgacgaatgctcttactctagttacctctgccagtacagatgcatcaatgagccgggaaggttttcatgtcactgccctcagggctaccagctgctcgctaccagattatgtcaggatatcgatgagtgtgaatcaggagcccaccagtgctcggaagctcagacctgtgtgaacttccacggaggatacagatgtgtggatactaaccgatgtgtggaaccctatattcaggtgtcagaaaaccgttgtttgtgccccgctagcaaccctttgtgtcgcgaacagccatcctccattgtgcataggtacatgacaattacatcggagcgctctgtacctgcagacgtgtttcagattcaagctacctccgtctatccaggggcgtacaatgcattccaaatcagggctggaaactctcagggggatttttacatcagacagattaataatgtgagcgctatgctggttctcgcccgtcctgtgactggccctagagagtacgttctagacctcgaaatggtgaccatgaactctctaatgagttatcgcgcctcttcggtcttaagactcaccgtgtttgtaggtgcctatacgttttag

SEQ ID NO: 248172 - RNA, 609 nt, synthetic construct
  misc_feature 1..609: note = Description of Artificial Sequence: Synthetic coding sequence
  source 1..609: mol_type = other RNA
atgctcccctgcgcatcgtgtctaccagggagccttctcctctgggctctacttctcctgctgctcgggtccgcctcgccgcaagactccgaagagccagattcctatactgagtgcaccgacggttatgagtgggatcctgatagtcaacattgtagagatgtgaacgagtgtctgactattcctgaagcgtgtaaaggagagatgaaatgcatcaatcactacggcgggtacctctgtctgcccaggtcagccgccgtcataaatgacctgcacggggaagggccaccccccccagtgccacctgcacaacatcccaatccctgtcctcccggttacgagcccgacgatcaggactcatgcgtggacgttgacgaatgcgcccaggcacttcacgactgccgcccctcccaggattgccacaatcttccaggaagctatcagtgtacttgcccagacggataccgaaaaatcggcccagaatgtgtggatatagatgagtgtcgctacaggtattgtcaacaccggtgcgtgaatcttccgggaagctttcgctgccagtgtgagcccggattccagctagggccaaacaacagatcatgtgtgtag

SEQ ID NO: 248173 - RNA, 552 nt, synthetic construct
  misc_feature 1..552: note = Description of Artificial Sequence: Synthetic coding sequence
  source 1..552: mol_type = other RNA
atgctaccttgtgcctcatgtctgcccggatctctcctgttatgggcgctcttgttgctcctgctgggctccgcttcaccccaggactccgaggaacccgacagttatacagaatgtactgacggctacgagtgggatcccgactctcagcactgccgcgatgtcaacgaatgtttaaccatccccgaagcatgtaaaggtgaaatgaagtgtatcaatcattacggaggctatttgtgccttcctcgcagcgccgctgtcattaacgacctgcatggggaagggccaccccctccggttcccccggcccaacatccaaatccgtgccctcctggatacgaaccagatgaccaggactcatgtgttgacgtggacgaatgcgcccaggcccttcacgattgtagaccttcacaggactgccacaatctgccaggatcctaccagtgtacatgtcctgacggatacagaaagatcggacccgaatgtgtggacatcgacgagtgtcgttatcggtactgtcagcacaggtgcgttaatcttcctggaagttag

SEQ ID NO: 248174 - RNA, 1332 nt, synthetic construct
  misc_feature 1..1332: note = Description of Artificial Sequence: Synthetic coding sequence
  source 1..1332: mol_type = other RNA
atgctgccctgtgccagctgcctcccaggatctctactcttgtgggcactgcttcttctgctcctgggatcagcttcacctcaagattctgaggagccagacagctacactgaatgcactgatggctacgaatgggaccctgactcccagcactgcagagacgtgaacgagtgtctgacaataccggaggcatgtaaaggggagatgaagtgcatcaaccactatgggggctatctctgtcttccgcggagtgcagccgtgataaacgaccttcacggtgaaggacccccccctcctgttccaccagcgcagcacccaaacccatgtccgccagggtatgaacctgacgatcaggatagctgtgtggacgttgacgaatgtgcccaggctcttcacgactgccgaccttcccaggattgccacaacctccctggaagctatcaatgcacctgtcctgatgggtaccggaagatcggacctgagtgtgtggacatagatgaatgtagatacagatattgccagcaccggtgcgtcaacctacccggttcttttagatgccagtgtgagcccgggttccaactcggcccaaacaataggtcatgtgtggatgttaacgagtgtgacatgggtgctccttgcgaacaacgctgctttaattcctacggtacatttctgtgccgctgtcatcaaggatacgaacttcaccgggatggatttagctgttctgatatagacgagtgctcatattctagctatctctgtcagtatcgatgtatcaacgaacccggtcggtttagctgccattgtcctcagggctaccaactgctcgccacacggttgtgccaagacattgatgaatgcgaaagtggcgcgcatcagtgctcagaagcccagacatgtgtgaatttccacggaggctacagatgtgttgatactaatcggtgtgtggagccgtacatccaagtcagcgagaatcgatgcttatgccctgctagcaatcctctctgtcgcgagcaaccttcatctatcgtgcaccgttatatgacgataacttcggagaggagtgtgccagcagatgttttccagatccaggccacttccgtttacccaggggcgtacaacgcattccaaatacgggccggcaattctcagggggacttttatatcagacaaatcaacaatgtgtcagcgatgctggttctggcgcggcctgtcacgggaccccgcgagtacgttctggacctcgaaatggtgacaatgaacagccttatgtcctacagggcatcttccgttctgcgtcttacagtctttgtcggagcttacaccttctag

SEQ ID NO: 248175 - RNA, 3018 nt, synthetic construct
  misc_feature 1..3018: note = Description of Artificial Sequence: Synthetic coding sequence
  source 1..3018: mol_type = other RNA
atggctcctgcgaggggccggctccccccagccctgtgggtcgtgaccgctgctgctgccgctgcgacatgcgtctctgcagcaagaggcgaggtgaatctgctggacacatcaacaattcacggtgactggggatggctgacatacccagcacacgggtgggactcgatcaatgaagtggatgagagtttccagcctatccatacataccaggtgtgtaacgttatgtcacctaaccagaacaattggttgagaaccagctgggtaccaagagacggcgctcggagggtgtacgccgagatcaagttcaccctgagggactgcaactctatgccaggggtgctgggcacatgtaaagagacctttaacttgtattacctagagtctgaccgtgacctgggggcttccacacaggagagccagttcctgaaaattgacacaatcgcggcagatgagagttttactggagctgatctgggggtgagacgactcaagctgaacactgaggttaggagcgtaggtccactctcaaagaggggcttctatctggcatttcaggacataggggcctgccttgctatactgagcctgaggatctactataaaaaatgtccagcgatggtgcggaacttggccgcattctcagaggctgttactggggccgatagttccagtctggtggaagttcgaggtcagtgcgtgcgccactcagaggaaagggataccccaaaaatgtactgttcagccgagggagagtggcttgtgcctatcggtaagtgtgtttgcagcgcaggatatgaggaaaggagggacgcatgcgtcgcatgtgaactcggattctataaatctgcccccggagatcagttgtgcgccagatgccctccacattcacactccgcagcacctgcagcccaggcttgtcattgtgacctgtcctattatcgcgccgctctggatcccccgtcctctgcttgcacccgcccaccatctgccccggttaatctcataagttccgtcaatggaacatctgtaacattagaatgggcacctccgctggatcccggtggtcgaagcgatatcacttacaacgcggtgtgcagacgttgcccttgggcacttagccggtgcgaagcctgtgggtccggtacacggttcgttcctcagcagacgagcttagttcaggcttcgctgctcgtggccaatctgcttgctcatatgaactacagcttttggatagaagcagtgaatggggtctccgacctttctcccgagcccagaagagccgctgtcgtgaatatcactacaaaccaggccgccccgtctcaggtcgttgttattcgtcaggagcgggccgggcaaacctccgtgagcctgctatggcaagagcctgaacagcctaatggcatcatcctggaatatgagatcaaatactatgaaaaagacaaggaaatgcagtcttattccacactaaaggccgtaactacccgggctacggtttctggcctgaagcccgggacacgttacgttttccaggtaagggctcggacatctgctggctgtggacggttctcccaagcaatggaggtggaaacaggtaagcctagaccacgctatgacaccagaacgatcgtgtggatttgcctcacgttaatcacaggattggtagttctgctcttactgcttatctgcaaaaagcgtcactgcgggtattctaaagcatttcaggattccgatgaggaaaagatgcattaccagaatggtcaggctccccctcccgtttttcttcccctccaccacccaccgggcaagctgccagagccccagttttacgcagaaccacatacctacgaggaacctgggcgcgcgggacggagcttcacccgggagatcgaagcctctcggattcacattgagaagattatcgggtccggagattctggagaggtttgctacgggcgcctgcgtgtacccggacagagagatgtccccgtggccatcaaggcgttgaaagccgggtataccgagcggcagcgaagagactttctttctgaagctagtatcatggggcagtttgatcaccccaatataatacgtctcgaaggagtggtgacgcgcgggcgtttggccatgatagttaccgagtatatggagaatgggtcactcgataccttcctgaggacccacgacggacagttcacaatcatgcagctggttggtatgttgcggggggtcggagccgggatgcgatatctcagtgacctcggatatgtacatcgggacctcgccgctcggaatgtactagtcgatagtaacctagtgtgtaaggttagtgactttggactctcccgggtcctggaagacgatcctgatgccgcgtacactaccaccgggggcaaaatcccaatcagatggaccgccccagaggcgatagcatttagaactttctcttccgcctcggacgtttggtctttcggcgtggtaatgtgggaggtgttggcctacggagaacggccgtattggaacatgactaatcgggacgtcatctcctccgtcgaagaaggctaccgcttgccagcgccgatgggctgcccacacgcgctgcatcagcttatgctagactgttggcacaaggatcgcgcacagaggcctcgattctctcaaatcgtatccgtgttggacgcactcatcagatcccccgaaagcctgcgagccacagctaccgtctctcgttgcccaccacctgcttttgttcggtcatgttttgatcttaggggaggatctggaggtgggggtggtctcacggtcggagattggctggactccatccgaatgggccgttacagggaccattttgctgctggagggtattcctcccttggcatggtactgcggatgaatgcccaggacgtgagggccctcggtataacactcatgggacatcagaaaaaaatcctcggttctattcagactatgagggcccagctgacttcaacccaaggcccacgtcgccatctgtag

SEQ ID NO: 248176 - RNA, 1653 nt, synthetic construct
  misc_feature 1..1653: note = Description of Artificial Sequence: Synthetic coding sequence
  source 1..1653: mol_type = other RNA
atgagcacaagctctttgaggaggcagatgaagaacattgtccataactactccgaagctgaaatcaaagtgcgcgaggcaacttccaatgatccgtggggtccatccagctctctaatgagtgagattgccgacctgacatacaatgtggtggccttttctgaaattatgagtatgatctggaaacggctaaatgatcacggcaaaaactggcggcacgtctacaaggccatgaccttaatggagtacttaattaagacaggctctgagagagtcagtcagcagtgtaaggaaaacatgtacgcggtgcagaccctaaaggactttcaatacgttgatcgtgatgggaaagatcagggcgtcaacgtccgagaaaaagccaaacagctagtcgcactcttgcgcgatgaagaccgtcttcgcgaggagcgggcacacgcactgaaaacgaaggagaagctggctcagacggcaaccgcgtcttccgccgccgtagggtctgggcctccacctgaagctgagcaggcatggcctcagagttccggcgaggaagagttgcagctgcagctcgctctggctatgagtaaagaagaagccgatcaagaggagagaatccgccggggggacgacttgcgactacagatggcaatcgaagaatcgaagagagagaccggaggtaaggaggagagttcactgatggaccttgccgacgtgtttaccgccccggccccggcacccactactgatccctggggcgggcctgcaccaatggccgccgccgtaccgacagccgcacctacatcggacccttggggaggacccccggtgccacccgctgcagacccctggggtggacccgcacccacacccgcatccggtgacccttggcgcccagccgcacctgccggaccctctgtagatccttgggggggcactcccgctccagcagctggcgaggggcctacccccgacccttggggctccagcgacggaggtgtccctgttagcggcccctctgcctccgatccttggaccccagctcctgctttctctgatccttggggaggttccccagccaaaccctccactaacggaaccacggcaggtggattcgataccgaaccagacgaattttctgacttcgaccgcctgaggactgccctacccacttcgggttcatcggctggggagctggagttgctggcgggcgaagtacccgcgcggtcccctggcgcctttgatatgagtggcgtgagaggatccctcgcagaagctgtgggctcccctcctccggccgccacccctacgccgacccccccaactaggaaaaccccagaaagttttctgggcccaaatgccgccctggtggaccttgattcactggtgtcgcggccaggcccaaccccacccggcgccaaagcttcaaacccatttcttcccggcggcggacccgccacaggcccaagcgtaacaaatccctttcaacctgcgccccccgccactcttacactaaaccaactgcggctgtcccctgttcccccagttcctggcgccccgccaacatacatctctcccctcgggggagggcctggcttaccgccaatgatgcccccaggaccccctgcacccaacactaacccctttctgctgtag

SEQ ID NO: 248177 - RNA, 1272 nt, synthetic construct
  misc_feature 1..1272: note = Description of Artificial Sequence: Synthetic coding sequence
  source 1..1272: mol_type = other RNA
atgagctctcaggtggtggggatcgaaccgctctatatcaaagccgagcccgctagcccagacagtccaaagggcagctccgagaccgagacagagccacccgtagcactggcacctggacccgcccccacaagatgcctcccaggccataaagaggaggaagatggggaaggggcaggacctggagagcagggcggaggaaaactcgtgctttcaagtctaccgaaacgcttatgcctggtgtgtggggatgttgccagtgggtaccattacggcgtggccagctgtgaggcctgtaaggccttcttcaaaagaaccattcaaggatcaattgaatattcttgccctgcttcaaacgaatgtgaaattacaaagcgccggcgtaaggcgtgccaggcatgcagattcacgaaatgcctccgagtggggatgctgaaggagggcgtccgtctcgatcgcgtaagaggaggacggcagaagtataagcgcaggcctgaagtcgacccactgccctttcctggcccctttcctgcaggccccctggcggtggcagggggtccccgcaagactgccgcccccgtcaacgcacttgtgtcccacctgttggtagtcgaaccggaaaaactgtatgcgatgccagacccagctggtcccgatggacacctgcctgctgtcgccactctgtgtgatctgtttgacagggagatcgtggtcaccatatcttgggctaagtcaatcccagggtttagcagcttgtcccttagcgaccagatgtcagtgctgcagagcgtatggatggaagtactagtgctgggtgtggctcagcgatccttacccctgcaggatgaactcgctttcgcggaagaccttgttcttgatgaggagggcgcccgagctgcgggtttaggagagctgggcgcggcattacttcagctggttagacgactacaggccctccgtctggagagagaagaatacgtactgctcaaggccctcgctcttgcaaacagcgattcagtccatattgaggacgccgaggcagttgaacagctgagggaagcattgcacgaggcattgctggagtatgaggccgggcgagctggacccggcggcggggcggaacgccgccgagccggacggcttttattgaccctgcccctcctcagacagacagccggaaaggttctcgctcacttctacggtgtcaagctggagggtaaagtgcccatgcacaagctgtttcttgagatgctcgaagctatgatggattag

SEQ ID NO: 248178 - RNA, 1239 nt, synthetic construct
  misc_feature 1..1239: note = Description of Artificial Sequence: Synthetic coding sequence
  source 1..1239: mol_type = other RNA
atgggcctccatctccggccataccgagtaggcctactccctgatggattgctgtttctcctgctcctgttgatgctgttagctgaccccgcactccctgcaggacgccatccccctgtcgtactagtccctggtgaccttggcaaccagcttgaggccaaattggacaagccaaccgtggtgcactacttgtgcagtaagaaaactgaatcctacttcaccatttggctgaacttagaattgctgctacctgttattatcgattgctggatagataacattaggctggtttacaataaaacatcgcgtgccacacagtttcccgacggagtagacgtgcgagtgccggggtttggcaagacatttagtctcgaatttctggaccccagcaagtcttcagtgggctcatacttccacacaatggtagagtctcttgttggctggggttacacccgcggtgaagacgtccgaggcgcaccttatgactggcggcgcgctcccaatgagaatggcccctactttctcgcgctcagagagatgattgaagagatgtatcagttgtacggtggacccgtcgttcttgttgctcatagtatgggtaacatgtacaccttatatttcctgcaacggcagccccaggcctggaaggacaaatatattagggcgttcgtgagtctaggcgcaccttggggtggggttgctaagactctgcgggttttggcttctggagacaataacagaattcccgtcatcggtccgttgaagattcgagagcaacaaaggtctgccgtgtctacgtcgtggctcctcccttacaactacacgtggtcacccgaaaaagtctttgtacagactcctaccatcaattacacgttgcgggattatagaaaattcttccaggacatagggtttgaggacggatggctaatgcggcaggatacagagggcctcgttgaggcaacaatgcccccaggggtgcaactgcactgcctttatgggactggagtgccgaccccagattcattctattatgaatcctttcccgatagagaccctaaaatctgtttcggcgacggagatggaacagtcaatctgaagtctgccctgcagtgccaggcttggcagtcgagacaggagcaccaagtcctgctgcaggagctgccaggatctgaacatatcgaaatgctggcaaatgccacgactctggcttatttgaagcgggtgttgctcggaccatag

SEQ ID NO: 248179 - RNA, 939 nt, synthetic construct
  misc_feature 1..939: note = Description of Artificial Sequence: Synthetic coding sequence
  source 1..939: mol_type = other RNA
atggcaaaggtcttttcttttatcctcgtgacaactgccctcaccatggggagggagatcagtgccctggaagattgtgctcaggagcaaatgaggttgagagcacaggtgcgactgctcgagactcgtgtaaagcaacaacaggtaaagatcaagcaactcctgcaggaaaatgaggttcaatttttggacaagggagatgagaacaccgtgatcgatctgggatcgaaacgccagtatgccgactgtagcgaaattttcaatgacggatataagctctcaggcttttacaaaatcaagccacttcagagcccggctgaattttcggtgtattgtgatatgagcgacggcgggggatggacagtgatacaaagacgatcagatgggagcgaaaatttcaacagagggtggaaagactacgagaacggttttgggaatttcgtgcagaagcatggggaatactggctcggcaacaagaacctgcactttctcaccactcaagaggattatacccttaaaatagatctagctgacttcgaaaagaattcaaggtatgcacagtataagaacttcaaagtcggtgacgaaaaaaacttctacgagttgaacatcggtgagtattcaggcacagcaggagactccctcgctgggaattttcatcctgaagtgcagtggtgggctagtcaccagcgcatgaagttctccacctgggaccgcgatcatgacaactatgagggcaattgtgcagaagaagaccagagtggctggtggttcaacagatgccacagcgcgaatttaaacggcgtctattacagcggcccctacacagcaaagaccgataatggcatcgtttggtatacctggcatggttggtggtactctctcaaatcagtagtcatgaaaatccggcctaacgatttcattcctaacgtcatttag

SEQ ID NO: 248180 - RNA, 939 nt, synthetic construct
  misc_feature 1..939: note = Description of Artificial Sequence: Synthetic coding sequence
  source 1..939: mol_type = other RNA
atggccaaagtatttagttttattctcgttaccacagcgcttaccatggggcgcgaaatctccgctctcgaagattgcgctcaggaacagatgcggctgcgagcccaagtccgtctgctcgagacccgtgtgaagcagcaacaggttaagataaaacaacttctgcaggaaaacgaagtccagttcctcgataaaggtgacgaaaacacagttattgatctcggatcaaaacggcagtacgctgattgcagcgaaatcttcaacgacgggtataagctctctggcttttacaagattaagcctttgcagagcccggcagaattctctgtgtactgtgatatgtcggatggcggtggatggacagttatacagaggcggtcggacgggagtgaaaacttcaatcgcggttggaaagactacgaaaacggctttggaaatttcgttcagaaacatggcgagtattggctgggcaacaagaatttacactttctgacaactcaggaggactacacactaaagatagaccttgctgacttcgaaaagaattcccgatacgcccaatataagaattttaaagtgggggatgaaaaaaatttctatgaactcaatatcggtgaatattccgggactgcaggagattcattggctggcaattttcatcctgaggtgcaatggtgggcttctcaccagaggatgaagtttagcacttgggacagagaccacgataactatgagggtaactgcgcagaggaagatcagtccggttggtggtttaataggtgtcatagcgctaaccttaatggtgtgtattatagcgggccatatacagctaagactgataacgggatcgtctggtacacatggcatgggtggtggtattcattgaaatcagttgtgatgaaaattcgacctaacgattttattcctaatgtaatttag

SEQ ID NO: 248181 - RNA, 939 nt, synthetic construct
  misc_feature 1..939: note = Description of Artificial Sequence: Synthetic coding sequence
  source 1..939: mol_type = other RNA
atggccaaagtgttctcattcattttagtaacgacagccctcactatgggaagggaaatttcagccctcgaagattgcgcacaggagcagatgaggttacgagcacaggtacgtcttttggagactcgcgtgaaacagcaacaagtgaaaattaaacagttactgcaagagaacgaggtacaatttctggataagggcgatgagaacaccgttatcgatctgggaagcaagaggcagtacgcagattgcagtgagatcttcaacgatgggtacaagttgagtggattctataagatcaagcccttgcagtcacccgcagaattttccgtctattgtgacatgagcgacggcggcggatggactgtgatccagcggagatctgacggcagcgaaaactttaatcgaggctggaaggattatgagaatggctttgggaacttcgtgcagaagcacggcgaatactggttggggaataagaatcttcactttcttactacacaggaagattataccttgaaaatcgacctcgctgatttcgaaaagaattcgcgctatgcacagtacaaaaacttcaaggtgggggatgaaaaaaacttctatgaactaaacattggagagtattcaggaaccgcgggggactcattagccggtaatttccacccggaggtacaatggtgggcctcacatcagaggatgaagttctctacatgggatagggaccatgacaattacgagggcaactgcgccgaagaggatcagtccgggtggtggttcaaccgatgtcacagtgctaatctgaacggcgtctattattctggcccctacacagctaagaccgataacgggatcgtctggtacacttggcatggatggtggtactctcttaaatctgtggtcatgaagatccgtccgaacgactttatccccaatgtaatctag

SEQ ID NO: 248182 - RNA, 939 nt, synthetic construct
  misc_feature 1..939: note = Description of Artificial Sequence: Synthetic coding sequence
  source 1..939: mol_type = other RNA
atggcgaaggttttctcttttattttagtgactacagccttgactatgggaagggaaatttcagcattggaggactgcgctcaagaacagatgcgcctgcgagctcaggtgagactgcttgaaacgcgcgtgaagcagcaacaagtcaaaataaaacaactgctccaggagaacgaggttcagtttctggacaagggcgacgagaacaccgtgattgacctagggagcaaacgacagtacgctgattgctcggaaatttttaacgacggctacaaacttagcggattttacaagattaagcctctccagagtccagccgaattcagtgtgtactgtgacatgtccgatgggggtggctggacagtcattcagcgccgcagcgacggttctgaaaattttaaccgcggttggaaggactacgagaacggttttggaaactttgtgcagaagcacggcgaatattggcttggtaataaaaacttgcacttcctgacaacccaggaggattatacccttaagatagatctggctgacttcgaaaagaatagccggtatgcccagtataagaattttaaggttggtgatgaaaagaatttttacgagttaaacattggcgaatattccggtacagcaggtgatagcttagctggcaactttcaccctgaggtgcaatggtgggcctcgcaccaaaggatgaaatttagtacttgggaccgcgaccacgataattatgaggggaactgtgcggaagaggaccaaagcggctggtggtttaatcgctgccattcggctaacctgaacggagtatactattccggcccctatacagcaaaaactgacaacggcattgtgtggtatacttggcacggttggtggtattccttgaaaagtgttgtcatgaagatacgccccaatgacttcattccaaatgtgatttag

SEQ ID NO: 248183 - RNA, 939 nt, synthetic construct
  misc_feature 1..939: note = Description of Artificial Sequence: Synthetic coding sequence
  source 1..939: mol_type = other RNA
atggccaaggtcttctcttttattttagtcaccacagctctgacaatgggtagagaaatatccgcgttagaggactgtgctcaagaacagatgcgccttcgtgcgcaggtgcggctgttagaaactcgcgtaaaacagcagcaggtgaagataaagcagctccttcaggagaacgaagtgcagttcttagacaagggagacgaaaataccgtcatcgacctgggaagcaaaagacaatacgccgattgttcagagatattcaacgacgggtacaagttatccggattctacaaaattaaaccattacagtcccctgccgaattcagcgtatattgcgacatgtcagatggcggaggatggacagtgattcagaggagatccgatgggagcgagaactttaacagagggtggaaggattatgagaacggcttcggaaattttgttcaaaaacatggagaatactggttgggaaacaaaaatcttcacttcctgacgactcaagaagattataccctcaagatcgacctggctgacttcgagaaaaattccaggtatgcacaatacaagaacttcaaagtcggtgatgagaaaaacttctacgagcttaatataggcgagtactctggcactgctggagatagtctcgccggcaattttcatcctgaagtacagtggtgggcttcgcaccaacgcatgaaattttctacatgggatcgggaccatgataattatgagggcaattgtgcagaggaggaccagtccgggtggtggttcaatagatgtcatagcgctaatctcaatggcgtatattattctggtccatacacagctaagacggataacggcatagtctggtatacctggcacgggtggtggtactctcttaagtccgttgtgatgaaaatccggcccaacgacttcatccctaacgttatctag

SEQ ID NO: 248184 - RNA, 939 nt, synthetic construct
  misc_feature 1..939: note = Description of Artificial Sequence: Synthetic coding sequence
  source 1..939: mol_type = other RNA
atggcaaaggtgttttcattcatcttggtgactaccgcgcttaccatggggcgcgagatatctgcactggaggattgcgctcaagagcaaatgagactgcgcgcgcaggtgaggttactggagacacgcgttaaacaacagcaggtcaagattaagcagttgttacaggaaaacgaggtgcagttcctggacaaaggggacgaaaacacagtcattgatcttgggagtaagcggcagtacgccgattgttcagaaatttttaacgacggctacaaactctccggcttctacaaaatcaagcccctgcagagccccgccgagttcagcgtatattgtgacatgtccgacggcggtggctggaccgtgatccaacgcaggtcagatgggtccgaaaactttaatagaggatggaaagattatgagaacgggtttggaaacttcgtacagaagcatggtgaatattggttgggcaacaagaatctacattttctgaccacccaggaagactacactttgaaaatagatctggccgatttcgagaaaaattccaggtatgcgcaatacaagaattttaaggttggcgatgaaaagaacttctatgagctcaatatcggagagtattccgggaccgccggagattcacttgccgggaactttcatccagaagtgcaatggtgggcttctcaccagcggatgaagttttcgacctgggaccgcgaccatgataattacgagggaaattgtgcagaagaagaccaatccggatggtggtttaatcgctgtcacagcgccaacttgaatggagtgtattattctgggccttataccgcaaagacagataacggaatcgtatggtacacatggcatgggtggtggtactcgctgaagagtgtcgtcatgaaaatcagaccaaacgacttcatacctaatgtgatctag

SEQ ID NO: 248185 - RNA, 849 nt, synthetic construct
  misc_feature 1..849: note = Description of Artificial Sequence: Synthetic coding sequence
  source 1..849: mol_type = other RNA
atgagattacgggctcaggtgagattactcgaaactagggttaagcaacagcaggttaagatcaaacaactgttacaagagaacgaggtgcagttcttggataaaggcgacgaaaacaccgttattgacctggggtctaagagacagtatgcagattgctccgaaatttttaacgacggatacaagcttagtggtttttacaaaataaaacctctacagtcacctgcagaattttcggtatactgtgacatgtctgacggcggggggtggactgtgattcagagaaggtctgatggatcggaaaactttaaccgtgggtggaaagattacgaaaacggatttggcaactttgtgcagaaacacggagaatactggctcggcaataaaaacctgcatttcttaaccacccaggaggactatacactcaagattgacctggcggactttgagaaaaactcccgctacgcccaatacaaaaactttaaggtgggcgacgagaagaatttttacgagctgaacatcggtgaatattcgggaacagccggagatagtctggccggaaacttccacccagaggtgcagtggtgggcaagccatcagcggatgaagttttccacctgggatagagatcatgataactatgaggggaattgtgctgaagaagatcaatccggctggtggttcaataggtgtcactcagctaatctcaacggcgtctactattctggcccctatacggcaaaaaccgataatggcattgtctggtacacatggcacggctggtggtatagcctgaaaagtgtggtgatgaaaattaggcctaacgattttatcccaaacgtcatctag

SEQ ID NO: 248186 - RNA, 939 nt, synthetic construct
  misc_feature 1..939: note = Description of Artificial Sequence: Synthetic coding sequence
  source 1..939: mol_type = other RNA
atggcaaaagtattctcatttatccttgtaaccacagcacttaccatgggccgagaaatttccgcccttgaggattgtgcccaggaacaaatgcgtctgcgtgcgcaagtacggctgctggaaactcgggtgaaacagcaacaggtaaaaattaaacagctgctgcaagagaacgaggtgcagttcctggataagggcgacgaaaacactgtcatagatctcggcagcaaaagacaatatgctgactgtagtgagatatttaatgatggctataagctgagcggattctataagatcaaacccctgcaaagcccggccgagttcagtgtgtactgtgacatgtccgacggagggggctggaccgttattcagcgccgcagtgacggatctgagaatttcaatcgcggctggaaggactacgaaaacgggtttggcaactttgtccaaaaacacggtgagtactggcttgggaacaaaaatctccatttccttaccacacaggaggattacaccctgaagatcgacctggccgactttgagaaaaatagtagatatgctcagtataagaattttaaagtcggtgatgaaaagaatttttacgaattaaacattggcgagtactctggaaccgctggtgattcattggctggaaacttccatcccgaggtacagtggtgggcaagtcatcagcgcatgaaattttcaacatgggaccgcgaccacgataattacgaaggaaactgcgccgaagaagatcaatccggctggtggttcaatagatgccactctgccaacctgaacggggtctattactcggggccgtatacagcaaagactgacaatggcattgtatggtatacctggcacggctggtggtattccctaaagagtgtcgtgatgaagattcgccctaacgatttcattccgaatgtcatctag

SEQ ID NO: 248187 - RNA, 2052 nt, synthetic construct
  misc_feature 1..2052: note = Description of Artificial Sequence: Synthetic coding sequence
  source 1..2052: mol_type = other RNA
atggagagagccgcgccttcccgccgtgtgcccctacccctcctcctgcttggagggctcgctctgctagcggccggagtagacgcagatgtactgctcgaggcctgttgtgccgacggccataggatggctacgcatcagaaagactgctccctcccctacgcaaccgagagtaaagagtgtcgaatggtgcaggaacaatgctgccacagccagctcgaagagctccactgtgctactggaatctccctggcaaatgagcaggataggtgcgcgacgcctcacggagacaatgctagcttagaggccactttcgtaaagaggtgttgccactgttgcttgttgggcagagctgcacaggcacaagggcagagctgtgagtatagtctgatggtaggataccagtgtgggcaggtgttccaggcctgttgtgtgaagagtcaggaaacaggagatctggatgtcgggggcctgcaggaaacggataaaatcatagaagtggaggaagaacaagaagatccatacctcaacgatagatgtaggggtggcggtccctgcaagcaacaatgtagagacactggggacgaggtggtgtgcagctgctttgtgggctaccagctactgtccgacggcgtcagttgtgaggacgtgaatgagtgcattacaggctctcactcatgtcggttaggtgagtcctgcattaacaccgtgggtagttttaggtgtcaaagagattcaagctgcggcactggttatgaattaacggaagacaactcttgtaaggacattgacgagtgtgagagcggaatccataactgcttgcccgacttcatctgccagaataccctaggctccttccggtgtcgcccaaagctgcagtgcaaatctggctttatccaagatgcattagggaattgcattgacataaatgagtgccttagcatatcagccccgtgccccatcggtcatacatgtatcaatacggagggaagctacacatgccagaaaaacgtgcctaactgtggtcggggatatcacttgaatgaagaaggtacacgctgtgtcgacgtggatgaatgcgcccccccagccgaaccttgtgggaaaggccataggtgtgtcaactctcctgggtccttcagatgcgagtgcaaaaccggatattacttcgatggcatttccagaatgtgcgttgatgtcaatgagtgtcagcgttaccccggaaggctttgcggacacaaatgcgagaacacgctgggctcatatctgtgttcctgctctgttggttttaggctaagcgtggacggtcgatcttgcgaggacattaacgaatgttcctctagtccttgctctcaggagtgtgccaacgtttacggttcttaccagtgttattgtcgtcgaggataccagctgtctgatgtggatggtgttacatgcgaggatatagacgagtgcgcattgcccaccggcggacacatctgcagttacagatgcatcaacatccccggatcatttcaatgctcttgtccatcttccggctacagactggccccaaatggcagaaactgccaggatatagatgagtgtgtgacaggtatccataattgctctatcaacgagacatgcttcaacatacagggaggctttaggtgtctggcctttgaatgccctgagaactatcgacgatccgctgcaacacgatgcgaaaggctgccttgtcacgaaaatagagaatgctccaaactgccgctcagaatcacatactaccatctcagttttcccactaacatacaggcccccgccgttgtgtttcggatgggccctagcagtgctgtgccgggcgattctatgcaactcgctatcactggtggaaacgaagagggattctttacaactaggaaggtttcaccccacagcggcgtggtggcactcacaaagcccgtcccagaacctcgcgatctacttcttaccgtgaaaatggacttgagccgacatggaacagtcagttctttcgtggcaaaactgtttatctttgtctctgccgaactctag

SEQ ID NO: 248188 - RNA, 2112 nt, synthetic construct
  misc_feature 1..2112: note = Description of Artificial Sequence: Synthetic coding sequence
  source 1..2112: mol_type = other RNA
atggagagagccgccccctcccgaagggttcccctgccgctactgctgcttggaggactagctctacttgctgctggggtggacgccgacgtgctgttggaagcctgttgtgcagacggccatcgaatggctactcaccagaaagactgctccctcccctatgccaccgaatccaaggagtgtcgtatggttcaggagcagtgttgtcacagccagctggaggagctacattgtgccaccggcatatcattagcaaatgaacaggaccgttgcgccactccccatggcgataacgcttcactggaagcgacattcgtgaagagatgttgtcactgttgtctgctcggtagagctgcccaggcgcaggggcagtcctgcgagtactcactgatggttggctaccagtgcggccaggttttccaggcttgttgtgtaaagtcccaagaaactggtgatctggacgttggaggattgcaggaaacagacaagataatcgaggtggaggaggaacaggaggatccttaccttaatgacaggtgtcggggagggggaccttgcaaacaacagtgccgcgacaccggtgacgaggtcgtttgctcctgcttcgtcggataccagctgctgagcgacggagtgtcttgtgaggacgtaaatgaatgtataacaggcagccatagttgtagattgggggaaagttgcatcaatactgtcggcagtttccggtgtcagcgcgactcttcatgtggcacaggatacgaacttaccgaggacaactcgtgtaaggatatagatgaatgcgaatccggcatccacaactgtctgccagacttcatttgccagaataccctgggctcattccgctgccgccctaaactgcaatgtaagtctggttttatccaggatgctttaggtaattgtattgatattaacgaatgtctgagtatttccgcaccctgcccgattggccacacctgtataaatacagagggatcttacacttgtcaaaagaatgtccctaattgtggtagaggataccaccttaatgaggaggggacccggtgcgtggacgtcgacgagtgtgcacctcctgccgagccttgcggaaaagggcatcgttgtgttaacagccctgggagtttccggtgtgaatgcaagactggctactactttgatggcattagtcgaatgtgcgtcgatgtcaatgaatgtcaaagataccccgggagactctgcggccataaatgcgaaaatacactaggaagttatctgtgctcttgcagcgtcggtttccgattgagcgtagacggtaggtcctgtgaggacatcaacgaatgcagcagctccccttgctcgcaagaatgcgccaacgtatacggcagttatcaatgctattgtcgaagggggtaccaattgtcagacgtagacggtgtcacctgcgaggacattgacgagtgcgccttacccaccggaggacatatttgttcttaccgttgcataaacattcctggctcgttccagtgctcctgcccttcatctggatataggcttgccccgaatggaaggaattgccaagacattgatgagtgcgtaacagggattcataactgcagcattaacgagacgtgcttcaacatccaggggggttttaggtgtctagccttcgagtgccctgagaactacaggagatccgccgccactcttcaacaggaaaagactgatactgtgcgctgcatcaaatcctgccgtcccaatgatgtcacgtgtgtcttcgatcctgtgcacaccatctcacacacagtgatctcactaccgacgtttcgcgagttcacaagaccggaggaaattatctttttgagggcaataacaccacctcatccggccagtcaggccaacattattttcgatattacagaaggcaacctcagggactcgtttgacatcatcaagcgttacatggacggcatgactgtcggggtggttcgccaggtccgacccatcgtgggcccttttcacgccgtgctgaagttagaaatgaattacgtggtcggaggtgtcgtatctcacaggaatgtggtaaacgtccacatcttcgtgagcgaatactggttttag

SEQ ID NO: 248189 - RNA, 1701 nt, synthetic construct
  misc_feature 1..1701: note = Description of Artificial Sequence: Synthetic coding sequence
  source 1..1701: mol_type = other RNA
atggagcgagccgccccctcacggagggtacctcttcccctcttgctgttaggaggactcgccttgttggctgctggagtggacgccgatgtcctgttagaggcctgttgcgcagatggtcacagaatggcgactcaccagaaggattgcagtctgccgtatgcaactgagagcaaagagtgcaggatggtgcaagaacagtgttgccacagccagctagaagagttgcactgtgccacggggatcagtttggctaatgaacaggaccgctgcgcaacaccccacggggacaacgctagcctcgaggcaacttttgtgaagaggtgttgccactgctgcctgttgggacgggccgcgcaagcacaagggcaaagctgcgagtatagcctgatggtcggataccagtgtggccaggtgttccaggcttgctgcgtgaaatctcaggaaacaggtgacctcgatgtgggcggtctccaggagacagacaagatcattgaggttgaagaggaacaggaagatccatacctgaatgacaggtgccgcggcggaggaccttgtaaacagcaatgtcgggatactggggacgaagtcgtttgcagttgtttcgttggctaccagctgctttcagatggcgtgtcctgcgaggacgttaacgagtgtattaccggctcgcattcatgcaggctcggagagtcctgtatcaatactgtcggatcattccgatgtcagagagattcaagctgtggaactgggtatgagctcacggaagataatagttgcaaggatatcgacgagtgtgagtcagggatccataattgcctgccagattttatttgccagaacacgttaggctcttttagatgccggcccaaactgcagtgcaagagtgggtttattcaggatgctctcggcaattgtattgatataaacgaatgtctgtcaatttcggctccatgcccaatcggccatacctgtatcaacacagaggggagctacacatgtcagaaaaacgtccccaattgcggaagggggtatcatctgaatgaagaggggacacgttgtgttgatgtcgacgaatgcgcacctcctgcagagccctgcggcaaaggacataggtgtgtaaatagcccagggtcttttagatgcgagtgtaaaacagggtattactttgacggcatcagccgtatgtgcgtagacgtgaacgaatgccagcgatatccgggtaggttgtgcggccacaaatgcgaaaacacacttggatcttatctttgctcttgcagtgttggcttccggctctccgttgatggtagatcctgtgaggacatcaatgaatgctcctcttccccgtgctcacaggaatgtgctaacgtttacggatcctatcagtgctactgcagacgggggtaccagctgagcgatgtagatggtgtgacatgcgaagatatcgacgaatgcgccctgccaacgggaggacatatatgtagctaccgctgcatcaatatcccaggaagctttcagtgctcatgcccctccagcggttataggttggctcctaatggacgaaactgtcaagatatagatgaatgtgttactggaattcataattgttccatcaacgaaacgtgcttcaatatccagggcggctttagatgtctcgcattcgaatgccccgagaattaccggcgcagcgctgctacctag

SEQ ID NO: 248190 - RNA, 2112 nt, synthetic construct
  misc_feature 1..2112: note = Description of Artificial Sequence: Synthetic coding sequence
  source 1..2112: mol_type = other RNA
atggaacgcgccgctcccagtagacgggtgccattgccgctgctactccttgggggattagcgcttctcgccgctggagtggatgcagatgtgttgcttgaggcttgttgcgcggatggacatcgtatggcaacgcaccagaaggattgcagcctcccttacgcaaccgaatccaaggagtgcagaatggttcaagaacaatgctgccactcccagcttgaagagttgcattgtgctacaggaatctccctggctaatgaacaagaccgctgtgctacacctcacggggataatgcttcactggaagcgacctttgtcaaacgctgttgccattgttgcctgctgggacgggccgcacaggcacaaggtcagagttgtgagtactctcttatggtgggctaccagtgtggccaagtatttcaggcctgctgcgtaaagagccaggaaacaggggaccttgacgtgggggggctacaggaaaccgacaagattatcgaagtagaggaggaacaggaagatccatatcttaacgatcgctgccggggtggcggaccatgcaagcagcagtgtcgcgatacaggggacgaagtcgtgtgcagctgttttgtcggatatcaactcctctctgacggagtctcatgtgaggacgtgaacgagtgtatcactggttctcactcctgtcgactcggtgaatcatgtataaacaccgttgggagcttccgctgccagcgcgacagtagctgtggcaccggttacgagctaacagaggataactcatgcaaagatatcgatgaatgcgaatctggaatacacaattgcttaccagactttatctgccaaaacacgctgggcagcttccgatgccggccaaagttacaatgtaagtcaggatttatacaggatgccctgggtaattgtatcgatataaacgagtgtctttcaattagcgcgccctgcccgattggacatacctgtattaatacagagggctcctacacttgtcagaagaacgttcccaattgtggcaggggataccatcttaatgaggaaggaactcgatgtgtcgacgtggatgagtgtgccccacccgctgaaccgtgcggaaaagggcaccgttgcgtgaattccccgggctcatttagatgcgaatgtaaaacaggttactatttcgacggcatcagcaggatgtgtgtggatgttaatgagtgccagaggtatccggggcgactatgtgggcacaaatgcgaaaacaccctggggtcttacctgtgcagttgcagcgtgggctttagactatctgtcgacggacggagctgtgaagacataaatgagtgcagtagctcaccctgctctcaggagtgcgccaatgtgtacgggtcataccaatgttactgccgcagaggatatcagttgtcagacgtggatggggtgacttgtgaggacatcgatgaatgcgcgctccccaccggaggacacatatgcagttacaggtgcatcaatataccaggtagcttccagtgctcatgcccgtcctccggatatcggttagcaccaaatgggagaaattgtcaagacattgacgagtgtgttacaggaattcacaattgctctatcaatgagacttgctttaacatccagggaggattcaggtgtctagctttcgagtgtcctgagaattatagacgcagcgccgcaacccaaaagagcaagaaaggaaggcaaaacacccccgctggctcttctaaagaggactgtcgtgtcctaccctggaagcaggggttagaagacactcatctggatgcttatctgccctgttgtcgccgtttcacgcgacctgaggaaatcatctttttaagggccattacccccccacacccggcgagtcaggccaacataatcttcgacatcactgaaggcaacctaagggacagtttcgatattatcaagagatacatggatggcatgacagttggagtggtgcggcaggtgaggcccattgtgggtccatttcatgccgtcttaaagctcgagatgaactatgtcgtagggggggtcgttagtcaccgcaatgtggtgaatgtgcatatttttgtgtcagagtattggttctag

SEQ ID NO: 248191 - RNA, 2166 nt, synthetic construct
  misc_feature 1..2166: note = Description of Artificial Sequence: Synthetic coding sequence
  source 1..2166: mol_type = other RNA
atggagcgcgcagccccatctaggcgtgtccctctgccccttcttctgctcgggggtttggcactcttggccgctggagtcgatgctgacgtcctgctcgaggcatgctgcgcagacgggcatcggatggctacacatcaaaaagattgttccctcccttatgcaacagaatctaaagaatgcagggctgtgggactggcctcactatgccaagacttaaacggggcatgggcggtgtggaaggtcggccgtgcatcacaggcagaaggaactgccagtgctagagcacagagacggggcatggttcaagagcaatgttgtcattcgcagctggaggagttgcattgcgctactggaatctccctcgccaacgaacaggatcggtgtgcaacaccacatggggataatgcaagtctcgaagccacctttgtcaagcgatgttgtcactgctgtctgctcggtcgagcggcacaggctcaaggtcagtcatgcgaatattccctcatggttggatatcagtgcgggcaggtttttcaagcatgttgtgttaagtcccaagagaccggtgacctggacgtcgggggtctgcaagagactgacaagatcatagaggtggaggaggagcaggaggacccgtatctgaacgatcggtgccgcggcgggggtccgtgcaaacagcaatgccgcgacaccggggatgaagtagtgtgctcctgttttgttgggtaccagctgctgtcagacggcgtgtcctgcgaagacgtcaatgaatgtattacagggtcccactcctgtcgactgggagagtcgtgtatcaatacggttggttccttcaggtgtcaacgagacagctcttgcggcactgggtacgagctgaccgaggacaattcatgtaaggatattgatgagtgcgagagcgggattcacaattgtctccctgacttcatatgccagaacacgttgggcagtttccggtgcaggccaaagctgcagtgcaaaagtggattcatccaggatgccctcggcaattgtatcgacatcaacgaatgcctgtccatcagcgctccctgccccattggtcacacgtgtatcaataccgaaggttcatacacatgccagaagaatgttcccaactgtggtcggggctaccacctcaatgaggaggggacccgttgcgtcgatgtggatgaatgcgccccccctgccgaaccctgcggaaagggccaccgctgcgtcaactcacccggcagctttcggtgcgaatgtaagacgggctattacttcgatggaattagtaggatgtgcgtggatgtgaacgagtgtcagcgctatcccggtcggctgtgtggtcacaaatgtgaaaacacgctaggctcctacctttgcagctgtagcgtcggttttcggctgtcagtggacggtaggtcatgtgaggacatcaacgaatgtagctcttcaccctgttctcaggagtgcgcaaacgtttatgggtcttaccagtgctattgccggagagggtaccagctgtcagacgtcgacggggtgacatgtgaggacatagacgagtgcgccctaccaaccgggggacacatatgcagttaccggtgtataaatatccctggaagtttccaatgcagttgcccttcaagcggctacagactggcaccaaatggcaggaactgtcaggatatcgacgaatgtgtgaccggaatacataactgctcaattaatgaaacttgtttcaacattcagggaggatttagatgcctcgccttcgaatgcccagagaactatcggcgaagcgctgcgaccaggtgtgaacggctcccttgtcatgagaaccgagaatgttcaaagctcccactgcggatcacctactaccacctgagttttccgactaatattcaggctccggcagtggtgttcagaatgggcccttcttctgccgtacccggagattccatgcagctggccatcacgggtggaaatgaggagggatttttcactacccggaaggtaagtccccactcaggagttgttgcgctaacgaagcctgtgcctgaaccacgggacctgctgttgactgtgaaaatggacttatccaggcatggaaccgtgagttcctttgtggccaaactgttcatctttgtttccgccgaattgtag

SEQ ID NO: 248192 - RNA, 570 nt, synthetic construct
  misc_feature 1..570: note = Description of Artificial Sequence: Synthetic coding sequence
  source 1..570: mol_type = other RNA
atgaatagctacacccgagggagccgccggccatcagccaaagctgctagtcctgcagcatccgtaacctcacgcgtttccccgagtggaccgggcgtacccgtggacgcagatgttctgctagaagcatgctgcgcagatgggcacaggatggctacccatcagaaagattgcagcctgccatatgcaacggagtccaaagaatgcagaatggtccaggaacagtgctgccactcccagttagaagagttacactgtgccactgggatatcactcgcaaatgaacaggaccggtgcgctactccacacggcgacaacgctagcctggaagctacttttgtgaagaggtgctgtcattgctgcctgttgggtagagctgcccaggcccagggtcagtcctgcgagtacagtctgatggtagggtatcagtgtggccaggtcttccaagcgtgttgtgtaaaaagtcaggaaaccggcgatctggacgtgggaggcctgcaggagaccgataaaatcatcgaggtggaagaagagcaagaagacccttaccttaatgatagatgccgctag

SEQ ID NO: 248193 - RNA, 81 nt, synthetic construct
  misc_feature 1..81: note = Description of Artificial Sequence: Synthetic coding sequence
  source 1..81: mol_type = other RNA
atggcgactcaccagaaagactgtagccttccatacgcaactgagagcaaagaatgcagaatggtccaagaacagtgctag

SEQ ID NO: 248194 - RNA, 1806 nt, synthetic construct
  misc_feature 1..1806: note = Description of Artificial Sequence: Synthetic coding sequence
  source 1..1806: mol_type = other RNA
atggagagggctgcccctagccgccgggttccacttccactgctcctgctcggggggttggctttactggcagccggagtggacgctgatgttttgctggaggcgtgttgcgccgacggccacagaatggctacacaccagaaggattgttcgctgccgtatgctacagaaagtaaggagtgccgaatggtgcaggagcagtgttgtcactcccaattggaagagcttcactgtgcgactgggataagcttagctaacgaacaagatagatgcgccaccccccatggagataatgcgtccttagaggccactttcgtgaaaaggtgttgccactgttgcttacttggaagagctgcccaagcccagggccagtcttgcgagtatagcctgatggtggggtatcaatgcgggcaggtcttccaagcgtgttgtgttaaaagtcaagaaactggcgatctcgacgttggggggctacaagagaccgataaaattatcgaggtagaggaggaacaggaagatccataccttaatgatcggtgccgcggggggggtccctgcaagcaacagtgcagggacaccggggacgaggtagtctgttcatgcttcgtgggctatcagctgctatctgacggggtttcatgcgaagatgtgaacgagtgtatcaccggtagccactcttgtagactaggggaatcatgtatcaacaccgttgggtccttccgatgccagcgagactcatcctgtgggacagggtatgagttgacagaagacaactcttgcaaggacattgacgaatgtgaatcagggatccacaattgcctcccagactttatttgtcagaacactctaggtagctttcggtgccgtccaaagctgcagtgcaaatctggcttcattcaggacgcactgggcaactgtatcgacataaacgagtgtttgagcatctcagcaccctgccccatcgggcacacatgcatcaacactgaagggagctatacatgccagaagaatgtacctaattgtggaagagggtaccacctaaacgaggagggaacccggtgcgtggatgtggacgagtgcgccccaccagccgaaccatgtggtaagggccatcggtgtgtcaattctcccggctccttcaggtgtgagtgcaagacaggctattacttcgatggaatctcaagaatgtgtgtagacgtgaatgagtgccagcgctacccaggcagactgtgtgggcacaaatgcgagaacactcttggcagttacctatgcagttgttccgtgggcttcaggctgagcgtggacggacggtcatgcgaggatatcaacgagtgcagcagctctccgtgcagtcaggagtgtgctaatgtgtacggctcttaccaatgctattgtaggcgcggctaccagctctccgatgtggatggggttacgtgtgaggatattgatgagtgtgcactccccacaggtggacacatctgctcctaccggtgcatcaacatacccgggtcctttcaatgttcttgtccatctagcggatacagactggcccccaatggacggaactgccaggacatagacgagtgtgtcacaggcattcataactgttctattaacgaaacgtgttttaatatccagggcggctttagatgcttagcctttgaatgccctgaaaactacaggaggagcgcagcaacacaaaaatcgaagaaaggacgccaaaacacccccgccggctcaagtaaagaggactgcagggtactcccatggaaacagggtttagaggatactcatctggacgcctag

SEQ ID NO: 248195 - RNA, 198 nt, synthetic construct
  misc_feature 1..198: note = Description of Artificial Sequence: Synthetic coding sequence
  source 1..198: mol_type = other RNA
atggctacccaccagaaggactgtagtctgccgtatgctactgaatccaaagaatgccggatggtacaggaacaatgctgccacagccagctcgaggaacttcactgcgcaaccgggatctcactggcaaatgaacaggataggtgtgccacaccccacggagataacgccagcttagaagcaacctttgtcaaatag

SEQ ID NO: 248196 - RNA, 546 nt, synthetic construct
  misc_feature 1..546: note = Description of Artificial Sequence: Synthetic coding sequence
  source 1..546: mol_type = other RNA
tgccggatggtccaggaacagtgttgtcactcacaacttgaggaactgcactgtgcaacaggaatttccttagctaatgaacaggacaggtgtgcaaccccacacggggacaatgccagcctagaagctacattcgtcaagcggtgctgtcattgctgccttctgggacgagccgcccaggcacaaggtcagagttgcgagtacagtctaatggttgggtatcagtgcggccaggtgtttcaagcttgttgcgtgaaatcccaggaaacaggcgatttagacgtaggaggactgcaagaaacaggcggcgggccttgcaaacagcagtgtagggacacaggggatgaagtggtgtgtagttgtttcgtcggttaccaacttctttctgacggagtttcatgcgaagacgtgaacgagtgtataactggtagccacagctgccgactcggggagagctgtataaacactgtagggtcattccgttgccagagagattcctcctgtggtactggatatgagctgacagaagataactcatgcaaatag

SEQ ID NO: 248197 - RNA, 420 nt, synthetic construct
  misc_feature 1..420: note = Description of Artificial Sequence: Synthetic coding sequence
  source 1..420: mol_type = other RNA
atggcaactcaccagaaggactgttctctaccttatgctacggagtccaaagagtgccggatggtccaggaacagtgttgccattcccagctggaagaactgcattgtgctacaggcattagtctcgctaacgaacaggatagatgcgctaccccccatggcgacaatgcctccttggaagcaaccttcgtgaaacgctgctgtcactgttgtttattaggtagagccgctcaggcccagggacagtcctgcgagtattctctgatggtcggatatcagtgcggacaggtctttcaagcatgctgtgtgaaatcgcaggagacaggagatctggacgttggtgggttgcaagaaaccgacaaaataattgaagtagaggaggaacaggaagatccatacttgaacgaccggtgcaggtag

SEQ ID NO: 248198 - RNA, 519 nt, synthetic construct
  misc_feature 1..519: note = Description of Artificial Sequence: Synthetic coding sequence
  source 1..519: mol_type = other RNA
atggaaagagccgcgccttctaggagagtaccactgcccctgctgttacttggaggcttagcgcttctggccgccggtgtggacgctgatgtcttattagaggcgtgttgtgccgacggtcacagaatggctacgcaccagaaagattgtagtcttccatacgcaacagaaagtaaagagtgccggatggtgcaggagcagtgctgtcactcccagctggaagagctgcactgtgccacgggcataagcctcgccaacgagcaggataggtgcgccacccctcatggagataatgcttcactcgaggccacattcgtaaaacggtgttgccattgctgcctcctgggccgcgcagctcaagctcagggtcagtcctgcgagtatagcctaatggtgggataccagtgcggccaggtgttccaggcttgttgtgtgaagagccaggagaccggagatctggacgtcggaggactccaggagacagggggagggccatgcaaacagcagtgtagggattag

SEQ ID NO: 248199 - RNA, 792 nt, synthetic construct
  misc_feature 1..792: note = Description of Artificial Sequence: Synthetic coding sequence
  source 1..792: mol_type = other RNA
atgcgacctggggcacctggacctctttggccccttccatggggtgcacttgcttgggcagtaggtttcgtgtcaagcatgggaagcgggaatccagcacctggtggagtgtgctggctccagcagggacaggaggccacatgtagccttgtgttgcagacagatgttacccgtgctgagtgctgtgcgagcggtaacattgacacagcatggtcaaacctgacacaccccggtaataagattaatctcctgggcttcttgggtcttgttcattgcctgccatgtaaagactcatgtgatggcgttgagtgcggcccaggaaaggcttgtagaatgctcggaggtaggcccagatgtgagtgcgctcctgactgttcagggcttccagcccggctgcaagtctgtgggtccgatggggctacatatagagacgaatgtgaactcagagccgctcggtgtcgagggcaccctgacctttcagtaatgtacaggggtagatgtagaaagagctgtgaacatgtggtctgcccacgtccacaaagctgcgtggtagaccaaacgggatcagcccattgcgtcgtatgtagggccgctccttgtccagtcccctcttctcccggacaggaactttgcggaaataacaacgtcacttacatatcctcgtgtcacatgagacaagccacctgcttcctcggccgttccatcggtgtgagacatgcaggtagctgtgctggaacaccggaagagcctcctggcggagaatccgcagaggaggaagagaattttgtctag

SEQ ID NO: 248200 - RNA, 984 nt, synthetic construct
  misc_feature 1..984: note = Description of Artificial Sequence: Synthetic coding sequence
  source 1..984: mol_type = other RNA
atgggaaggacttctaaagacaagcgggacgtgtattaccgtttggcaaaagaaaatggctggcgtgctcgctcggcattcaaactcctgcagcttgataaagagtttcaactgttccagggggttacaagagccgttgacctctgcgctgccccaggctcttggtcacaggtactcagtcagaaaatcggcggtcaaggctccggtcatgtggtggctgttgatctgcaggcaatggctccactaccaggcgtcgtccaaattcagggagacattacccaactgtctactgccaaagagatcattcaacacttcaaggggtgccccgccgatttggtggtgtgcgacggcgcacctgatgtgactggcctgcacgatgtggatgagtacatgcaggcacagctgctcctcgctgccctgaatatcgccacacacgtcttgaagccagggggatgctttgtagcaaagatttttcgtggacgcgatgtgaccctgctctatagtcaacttcaggtgttcttcagttccgtcctgtgcgcaaagccgcgttcctctcggaatagttccatcgaggcctttgccgtttgtcagggatacgatccacccgaggggtttatacccgatctgtcaaaacccctgctggaccacagctacgattttaaccagctggatggacctacaaggattatcgtgcccttcgtcacttgcggagacctgagcagctatgatagcgaccgctcatacccactcgacctggaaggtggttctgaatataagtatacgcctccaactcagccccctatctcccccccataccaggaagcttgcactctgaagagaaagggccaactagcaaaagagatacggccgcaggattgtccgatctctcgagtcgatacattcccgcagcctcttgcagcgccccaatgtcacacgcttctggctcccgaaatggaggacaatgaaatgtcgtgtagtccctag

SEQ ID NO: 248201 - RNA, 1404 nt, synthetic construct
  misc_feature 1..1404: note = Description of Artificial Sequence: Synthetic coding sequence
  source 1..1404: mol_type = other RNA
atgcggccccaggagctgccaagacttgccttccccctgctgctcctccttctgctattgctccctccccctccttgccccgcacacagcgcaacacggtttgatcctacttgggagtcactggatgccagacagctgcccgcctggtttgatcaggcaaaatttggaatattcatacattggggggtgttcagtgtgccttcgttcggctcggaatggttctggtggtactggcagaaggaaaagatccctaagtacgttgaattcatgaaagataattaccccccgtctttcaaatatgaggatttcgggccattatttactgccaaattctttaacgcaaatcaatgggcagatatttttcaggcgagcggagcaaagtacatcgtgttgacctccaaacatcatgagggattcactttgtggggttctgaatatagttggaattggaacgcaattgacgagggacctaagagagatattgtcaaagagctggaggtggctattaggaacagaaccgacctccgctttggtttgtactactccctcttcgaatggtttcacccgctgtttctcgaagacgaaagctcatctttccacaagcgccaattccccgtttctaagacattacctgaactgtacgaactcgtgaacaactatcagcccgaagtactctggagcgatggggatggcggcgcccctgaccaatactggaattccacagggtttttagcctggctctataacgagtcccctgtgcggggcactgtcgtcaccaacgatcgctggggcgccggctccatctgcaagcacgggggtttttatacctgctcagacagatacaatcccggccatctcctcccacacaaatgggaaaattgcatgacaatcgataaactgagctgggggtatcggagagaagctggaatttccgattatttgactatagaagaattggtgaaacaactagtggagactgtgagctgcggcggcaatctgctgatgaacattgggcccaccctggatggaactatctccgtagtgtttgaagagagactgaggcaaatgggctcctggctgaaagttaatggcgaggccatatacgagacacacacctggcgatcccaaaacgacactgtgacccccgacgtgtggtataccagcaaaccaaaggagaagctcgtgtacgccatattcttgaagtggcccaccagcggacagctctttttgggccaccctaaggccatactgggcgccactgaggtgaagctccttgggcacggacagccactgaactggatatcccttgagcaaaacggaatcatggtcgaactcccccagctaactatccaccaaatgccttgtaagtgggggtgggccctggccctaactaacgtcatttag

SEQ ID NO: 248202 - RNA, 354 nt, synthetic construct
  misc_feature 1..354: note = Description of Artificial Sequence: Synthetic coding sequence
  source 1..354: mol_type = other RNA
atgaagtggatgtttaaagaggatcactcattggaacacagatgtgttgaatctgctaaaatccgtgctaagtaccccgaccgagtgccagtcatcgtggaaaaggtgtccggatctcagatcgtagacattgataagaggaaatacctggttccctctgacattacagtggctcagtttatgtggatcatacgaaaaagaattcaactaccgagcgaaaaggccatttttctatttgtcgataaaacagtcccccaatctagcctgacaatgggccagctttacgaaaaagagaaggacgaagatggcttcctatacgttgcatatagtggggaaaatacatttggtttttag

SEQ ID NO: 248203 - RNA, 1371 nt, synthetic construct
  misc_feature 1..1371: note = Description of Artificial Sequence: Synthetic coding sequence
  source 1..1371: mol_type = other RNA
atgaggaagtcacctgggctctccgattgtctgtgggcttggatcctattgctctccacccttactggaaggtcatatggccagcctagcctgcaggatgagctcaaagataatacgacagtctttacacgcatactggataggcttctggatggctacgacaaccgcctccgcccgggacttggggagagggtgactgaagtgaagaccgatatatttgttacatctttcggtccagtatctgaccacgatatggagtacacaatagatgtcttttttaggcagagctggaaggacgagcggcttaagtttaaaggacctatgacagtgctacggctgaataatttgatggcttccaagatctggaccccggatacattcttccacaacgggaaaaagagtgtcgcgcacaacatgaccatgccaaacaaactgcttaggataaccgaagacgggactctgctttacaccatgaggctgactgtgagagccgaatgtcccatgcacctagaggatttccctatggatgcccatgcatgtccattgaagtttgggtcatacgcttataccagagcagaagtggtttacgaatggacccgagagcctgctagatctgtcgtcgtggctgaggatggcagcaggcttaaccaatacgatctgctggggcagactgtcgatagcggcatcgtacaatcttcaactggcgagtacgtggtgatgacgacacacttccacctcaaacgtaagatcggatacttcgtcattcaaacatacctgccgtgcataatgacagtgatattaagccaggtctccttttggctgaatagagagtccgtgcccgctagaacggtgtttggcgtgacaacggtgctgacgatgactactttatccatctccgctaggaactccctaccaaaagtcgcatatgctactgcaatggactggttcattgcagtctgctatgctttcgttttctctgctctaatcgagttcgccacggttaactactttacgaaaagaggctatgcttgggacggaaagagcgtagttccagaaaagcctaaaaaagtaaaggacccactgattaaaaagaataatacttatgcacccacagctacttcatatactccaaatctcgcccggggggacccaggacttgcaacaatagcaaaaagcgccacaatcgaacccaaagaagtgaaacctgagaccaagcccccagagccaaagaaaacctttaatagcgtctctaagatcgatagactctcccgaatcgccttcccgctcctttttggaatatttaacctggtgtactgggcaacgtatttaaatcgggaaccacaattgaaagccccaaccccacatcagtag

SEQ ID NO: 248204 - RNA, 345 nt, synthetic construct
  misc_feature 1..345: note = Description of Artificial Sequence: Synthetic coding sequence
  source 1..345: mol_type = other RNA
atggcaaacagcgggtgtaaggatgtaaccggtcccgatgaggagtcgttcctctatttcgcctatggcagcaatttgctgactgagaggatccatctgcgtaatccttctgccgcctttttctgtgtcgctaggttgcaggactttaaattggatttcggcaatagtcagggtaaaacttcacagacttggcacggtgggatcgccaccatattccaatcccccggagatgaagtgtggggagtggtatggaaaatgaacaaaagcaacctcaactctcttgatgaactttttgcctgggtacagaaaaaaatggtctgtcggtggagcattaaaaggagctag

SEQ ID NO: 248205 - RNA, 2196 nt, synthetic construct
  misc_feature 1..2196: note = Description of Artificial Sequence: Synthetic coding sequence
  source 1..2196: mol_type = other RNA
atggtggtggaacacccagaattcttgaaagctgggaaggagccagggttacagatctggagagtggagaagttcgacctggtgccagtacccactaacctgtatggggatttctttacaggagatgcgtatgtcattctgaagaccgtgcaattgcgtaacggaaatttacagtatgacctccactactggttgggcaatgagtgcagccaggatgaatcaggagccgccgcgattttcacggtgcaactcgatgattacctgaacgggagagctgtgcagcatagagaggtccagggattcgaatctgcgaccttccttggttacttcaaaagcgggcttaaatacaaaaaggggggagtcgcatctggctttaagcatgtggtacctaatgaggtggttgttcagagactgtttcaggtaaaaggacgtagggtggtgagggctactgaggtaccagtttcttgggagagctttaataacggcgattgcttcattttagatctgggtaacaacatacaccagtggtgtggctcgaattcaaatcgatacgagaggttaaaggcaacccaggtgtccaagggcatcagagacaacgaacgatcgggaagggcgagagttcacgtatcagaggagggtactgaaccagaggcaatgttgcaagtgttgggccctaagccggcactacctgcagggaccgaggatacagctaaagaagatgcggcaaataggaagctagcaaaactgtacaaggtctctaacggcgcgggcaccatgtccgtaagtcttgtcgcagatgaaaatccttttgcacagggagccctaaaaagcgaagattgtttcatcctcgaccatggaaaagacggaaagatttttgtctggaagggcaagcaagcaaatacagaagaacgcaaagccgctttaaagaccgcttcagatttcatcaccaaaatggattaccccaaacagacgcaggtcagtgtcttgccagagggaggcgaaactcctttattcaagcaattctttaagaattggagagacccggaccagacggatggcctgggattgtcctacctgtcctctcacattgctaacgttgagagagtgccttttgacgccgcaaccctccacacatcgactgccatggctgcccagcatgggatggacgacgacggcactggccagaagcagatctggaggattgagggctcgaataaggtgcctgtcgatccagctacatacgggcagttctacggtggggatagctatataatcctgtacaattataggcacggcgggcggcagggacagatcatctataactggcaaggagctcaatcaacccaggacgaagtggccgccagcgcaattttaacggctcagttagacgaagagctcggcggaacacctgtgcagtctagagtcgtccaaggaaaggagccagcccacctgatgagtctgtttggtggcaagcccatgattatctacaaaggtggaacctctagagaaggcggccagaccgcacccgctagcacccgactgttccaggtacgggcaaacagtgcaggcgcgacgagagccgtggaagtcttacctaaagccggggcattaaattctaacgacgcatttgtgcttaagactcccagcgcagcctacctctgggtgggcactggtgcctccgaagctgagaagaccggagcccaggagctgctgagggtgctgcgggctcagccagttcaagtggccgagggctcggaaccggacggcttctgggaggcgcttggagggaaagctgcgtaccgaaccagtcccagacttaaggataaaaaaatggacgctcaccccccccgactattcgcatgttctaacaaaatcggcagattcgtcatcgaggaagtacccggggagctgatgcaggaggatctggccactgacgacgtgatgctcctcgatacttgggatcaggtgtttgtttgggtcgggaaagactcccaagaggaagagaagaccgaggcgctgacctcagcaaagcggtacatcgagacagatccggccaacagggacagaaggacaccgattacagtggtgaagcagggattcgaacccccttccttcgtcgggtggtttctggggtgggatgacgattactggtcggtcgaccccctcgatagagccatggccgaactggccgcttag

SEQ ID NO: 248206 - RNA, 2196 nt, synthetic construct
  misc_feature 1..2196: note = Description of Artificial Sequence: Synthetic coding sequence
  source 1..2196: mol_type = other RNA
atggtggtcgagcacccagagtttctgaaggccggaaaagaacccgggctccaaatctggagagtggaaaaatttgatttagtccccgttcccaccaatctgtacggagatttcttcacgggggatgcatacgtaattctgaaaactgtgcaactgcgaaacggtaacttgcagtatgacctccactattggttgggaaacgagtgctcccaagatgagagcggggccgcagcaatcttcacagtccaacttgacgactatctcaacggaagggccgtgcagcaccgcgaagtccaaggattcgagtccgccacatttttagggtacttcaagtctggcttgaagtacaagaagggaggggttgcaagcggatttaaacacgtggtgcctaatgaagtggtggtgcaaaggttattccaggtcaagggtagacgggtcgttcgagccactgaagttcctgtatcctgggagagctttaataatggggattgcttcattcttgaccttggcaataacatccaccagtggtgtgggagtaacagtaatcggtatgagagactcaaagccacacaagtctcaaagggcataagagataatgaaagaagcggacgagcccgggtgcatgtgtccgaggaaggaaccgagcccgaagcaatgctccaagtcctagggccaaaacccgcccttcctgcagggaccgaagacacggcaaaagaagatgcagcaaatcgaaaactggcgaagttgtataaagtgagtaacggggccgggacaatgtctgtgagcctcgttgcagatgaaaatcccttcgcccagggggccctgaagagtgaagactgtttcatcctggatcatggtaaggatggcaagatcttcgtgtggaaaggcaaacaggccaatacagaggagcgcaaagcggccctgaagactgcttctgattttataaccaagatggactatcctaaacagacacaggtgagcgtactgcctgagggtggcgaaactccactcttcaaacagttttttaaaaactggcgggaccccgatcagacagacggcctgggactctcgtacctctcgtcccacatcgctaatgtggaaagggtgccattcgatgccgctactctgcatactagtacagcgatggccgcccaacacggcatggacgatgacggaaccggccaaaaacaaatttggcggattgaagggtctaacaaagtgcctgtggatcctgctacatacggtcagttctacggaggcgactcttacataattttatataattaccgccacggaggacggcagggacaaatcatctataactggcagggcgcccagtccacccaggatgaggtagccgcaagtgcaatcttgactgcacagcttgacgaagaattgggtggaaccccagtccagtcgcgcgtcgtacagggaaaggaacccgctcacctgatgtccctgttcgggggtaaaccaatgattatatataagggtggaacttctagagagggaggacaaaccgcccctgctagtactcggcttttccaggtgcgggctaattccgctggggccactcgagcagttgaggtgctgcctaaggccggcgctctgaactccaatgatgcttttgtcttaaagacacccagcgctgcgtacttgtgggtgggtaccggggcatctgaagccgaaaaaacaggtgcccaggaactcttgcgcgtcttgagggctcagccggttcaggtcgccgaggggagcgaacccgacggattttgggaggccctcggaggtaaagctgcatacaggacctccccacgacttaaggacaagaaaatggacgctcaccccccccggctgttcgcctgcagtaacaaaattggtcgatttgtgatcgaagaagttccaggtgaacttatgcaagaggatctcgcaacggacgacgtgatgctgctggacacttgggaccaggtgtttgtgtgggtcgggaaggattcccaagaggaagaaaaaaccgaagcactaacatctgctaagcgatacatagagactgatcctgctaacagagaccgccggactccaattaccgtcgttaaacaaggtttcgagccaccatcttttgttggttggttcctcggctgggacgatgattactggtctgttgatccgctcgatcgcgctatggccgagctggcagcctag

SEQ ID NO: 248207 - RNA, 2349 nt, synthetic construct
  misc_feature 1..2349: note = Description of Artificial Sequence: Synthetic coding sequence
  source 1..2349: mol_type = other RNA
atggccccccaccggccagcaccagctctgctgtgtgccctgtctttagccctgtgtgctttgtccctgccagttagggctgccaccgcaagtcggggcgcctcgcaagccggggctcctcagggtagggtgcccgaggcccggccaaatagcatggtggttgagcaccccgagtttctgaaagccgggaaagagccaggcttacagatctggcgcgttgaaaagtttgacctcgttcccgtccccactaatctttacggcgactttttcaccggggacgcctacgtcattcttaaaactgtacaactgaggaacgggaatctccagtacgaccttcactattggctgggaaacgaatgctcacaggatgagagcggcgccgcggccatcttcaccgtccagctggacgactaccttaatgggagagccgtgcagcacagggaggtgcaaggcttcgaaagtgcaacgttcctcggatacttcaaaagcgggctgaagtacaaaaagggaggggtagcttcagggttcaagcacgtggtgcctaacgaggtggttgtgcagcggttatttcaagtcaagggccgcagggtggtgagagcaacagaagtgcctgtttcttgggaatcgtttaacaacggcgattgctttatccttgatcttggaaacaacatacatcagtggtgtggctctaattcaaaccgatatgaaagacttaaggccacccaggtctcaaagggcatacgtgataacgagagaagcggccgggcacgcgtccacgtttctgaggaaggcacagagcccgaggctatgctgcaagtgcttggtccgaagcccgctctgcctgctggaactgaggataccgctaaagaggacgccgccaaccgaaagctggccaagctttataaagtgtcaaacggagccggaaccatgagcgtgtccctagtggccgacgagaacccatttgctcagggagcactaaagtcggaggattgttttattcttgatcacggaaaggatggtaaaatctttgtctggaagggaaaacaggctaacaccgaggaaagaaaagcggccttgaagaccgcatcagacttcataaccaagatggattatccaaagcagacccaagtgtccgtgctccctgaagggggagaaacaccactcttcaagcagttcttcaaaaactggagagatcctgaccaaacagacgggctgggactttcctatctctccagccatattgcaaacgtggagagagtgccgtttgatgcagccacattgcatacttccacagccatggccgctcagcacgggatggatgatgatggaacagggcagaagcagatctggcgcatcgaaggcagtaataaagtccctgtggatccggcaacctatgggcagttttacgggggtgacagctacatcatcctgtacaattacaggcatggcggaagacaggggcagattatttataactggcaaggcgcacaatcgactcaggatgaggtggccgcaagcgcgatccttactgcccagctggacgaggaactcggcggcacccccgtgcagagtcgtgttgtgcagggaaaagagcccgcccatctgatgagccttttcggcggcaagccaatgatcatttacaaaggaggaacaagccgggagggcggccagaccgctcccgccagcaccagactgttccaggttagagccaatagcgcaggagctacgcgtgctgtcgaggtgttacccaaagcaggagccctcaattctaacgacgccttcgtactgaaaacccccagcgccgcttatctgtgggtcgggacaggcgcttctgaagcagaaaaaaccggggcccaggaactgctgagagtcctgcgggcacagcctgttcaggttgcagaaggatcagagccagacgggttttgggaagcactgggaggaaaagctgcgtacaggacctccccccggcttaaggacaaaaaaatggatgcccatccccctcgactttttgcctgttctaataaaatcggcagatttgtgattgaggaggtgcctggcgaattgatgcaggaggacctggcgaccgacgacgtgatgctcctggacacgtgggatcaagtattcgtttgggtcggtaaggatagtcaagaggaagaaaagaccgaggccctgactagcgcaaaacgttatatcgagaccgacccagccaatcgcgacagacgaacccctataactgtagttaaacaaggctttgaaccgcccagcttcgtcggctggttcctcggatgggatgacgactactggtccgtggaccctctggaccgagctatggccgaactggccgcatag

SEQ ID NO: 248208 - RNA, 2196 nt, synthetic construct
  misc_feature 1..2196: note = Description of Artificial Sequence: Synthetic coding sequence
  source 1..2196: mol_type = other RNA
atggttgttgaacatcctgagttcctgaaggctgggaaggaacccggattacagatctggagggtggagaaatttgatttagtacccgttccgaccaacctatacggggactttttcacaggtgacgcttacgtgattttgaaaactgttcaactgaggaatggaaacttgcagtatgacctgcactactggcttggcaatgagtgttcacaagatgaatctggcgctgcagctattttcacggttcagcttgacgactacttgaacggcagagcggtccaacacagagaggtgcagggcttcgaatccgcaacctttctcgggtacttcaaatctggtctgaagtataaaaaaggaggtgtggctagtggattcaaacatgtcgtcccgaacgaagtcgtggtgcagcggcttttccaggtgaagggacgaagagtagttagggcaacagaggtacctgtgagctgggagtcctttaacaacggcgattgctttattctagatctcggtaacaatattcatcaatggtgtgggtccaatagcaatcggtatgagcggcttaaggctacccaggttagcaagggtataagagataatgaacggtctggacgcgctagagtccacgtgtccgaggaggggaccgagcccgaagcaatgctgcaagtactggggccgaagcctgctctcccagctggaactgaggacacagctaaggaggatgccgctaatcgcaaactcgcaaaactgtacaaggtgtccaacggagctggaacgatgtccgtctctctggtggccgacgagaatccctttgcacagggagccctcaaatctgaagactgttttatactggatcacggcaaggacggcaaaatattcgtgtggaaaggcaagcaggccaataccgaagaacggaaggctgcactgaaaactgcatccgattttatcaccaagatggactaccccaaacagacacaggtgtcagtgcttcctgagggaggagagacgcctctgtttaaacagttcttcaagaattggagagatcccgaccagacagacggattgggtttatcctatttaagcagtcatattgccaacgtggagagagtcccatttgacgccgccacactgcatacaagcactgccatggccgctcaacatggtatggacgatgatggaacaggtcagaagcagatctggagaattgaaggctccaataaggtccccgtcgatcctgctacctatggacagttctatggcggagattcctacatcatcctgtataattataggcatggggggagacaaggacaaattatatacaattggcagggagctcaatctacccaggatgaggtcgcagccagcgccatccttactgctcagctagatgaagaacttggtgggacgcccgtgcagagtcgggtggtccaagggaaagaacccgcccatctcatgtctctgtttggtgggaaacctatgattatatacaagggtggaacatccagggaaggaggccagaccgcacccgcatccacgaggctctttcaagtgagagctaattctgccggcgccacacgggctgttgaggttctccccaaggccggggccctgaatagcaatgatgctttcgttctcaaaactccaagtgccgcctatctctgggtcggaacgggggcctcagaggctgaaaaaactggggctcaagagttgctgcgcgtactcagagcacaaccagtccaggttgctgaaggctctgagcctgatggcttttgggaagcactgggagggaaggctgcctaccggacctccccaagactgaaagataagaagatggatgcccaccccccaagactattcgcttgtagcaataagatcgggaggtttgtaatagaggaggtccccggggagttaatgcaagaagacctggctactgacgacgtaatgttgcttgatacgtgggaccaggttttcgtgtgggtgggaaaagatagccaagaagaggagaagactgaggccctaacctctgccaagagatatatcgagacagacccagctaatagagaccgcaggactcccatcactgtcgtgaagcaggggtttgaaccaccgtctttcgtcggatggttcttgggctgggacgatgactattggagtgtggaccccctcgacagagccatggccgaactggctgcgtag

SEQ ID NO: 248209 - RNA, 2148 nt, synthetic construct
  misc_feature 1..2148: note = Description of Artificial Sequence: Synthetic coding sequence
  source 1..2148: mol_type = other RNA
atggtggtggagcacccggagtttttgaaggcgggaaaagagccgggtttgcagatctggcgtgttgagaagttcgatgcgtatgtcatcttgaagactgtccaacttcgtaacggcaacttgcagtacgatctccactactggctcggcaatgaatgcagtcaggacgagagcggcgctgccgcaatcttcacagtacagctggacgactacctgaacggccgggccgtgcagcatcgggaggtgcaaggatttgagagtgcaacatttcttggttatttcaaaagtggactgaaatacaagaagggaggcgtggcatctggttttaaacacgtggtgcccaatgaggtcgtcgttcaacgcctgtttcaggtgaagggcaggagggttgttagggcaactgaagtgcccgtttcgtgggaatcattcaataacggagactgctttatactggatctggggaacaatattcatcagtggtgtggatccaatagcaatcgttatgaacgtcttaaggctactcaagtgtcaaaagggattcgagataatgagaggtccggtagggcccgggtgcacgttagcgaggaaggcactgagcccgaggctatgcttcaggtgttggggcccaagcccgccctcccagctggaaccgaggatacagcaaaagaggatgcagcaaatcgcaagctggcaaaactgtataaagtgtccaacggcgccggcacaatgagcgtcagcctggtcgcagatgaaaatccattcgcccagggggccctaaagtccgaggactgttttattctggatcatggaaaagacggaaaaattttcgtctggaaggggaagcaggctaacaccgaagaaaggaaggccgctttaaaaacagcgtcagattttatcactaagatggattaccccaaacagacacaggtgagcgtgttgcccgaaggtggcgaaacacccctcttcaaacagttcttcaaaaattggagagacccagaccaaaccgacggcttggggctctcttacctgtcaagccacattgctaacgttgaaagggttccctttgatgctgctacactccatacaagtacggctatggcagcccagcacggaatggatgacgacggcaccgggcaaaagcaaatttggcgtattgaggggagcaataaggtgcccgtagacccagcaacctacggacagttttatggaggcgactcttatatcattttatacaactatagacacggaggacgacagggccagatcatctacaactggcagggggcacagagtacacaggacgaggttgcagccagtgccatcttgacagctcagttggacgaagagctcggaggcacacccgtgcaaagcagggtcgtacagggtaaggagcctgctcaccttatgagtctttttggtggcaaacctatgatcatatacaaagggggtacttctagggagggaggccaaacagccccagctagtactagactgtttcaggtccgcgccaattctgcgggtgccacgagggcagttgaggtgctgccaaaggctggagctttaaacagcaacgacgcatttgtgttgaagactcctagcgcagcttatttgtgggtgggcaccggagccagcgaggcagagaagacaggcgcccaggaacttctgagagtacttagggcacagccggtgcaggtggccgaaggatcagagcccgacggattctgggaagccctgggaggaaaggccgcgtacagaacctcacccaggttgaaagacaaaaaaatggacgcccaccccccccgattatttgcctgcagtaacaagattggtagattcgtgattgaggaggtccctggggagctcatgcaggaagatctcgctacggacgacgttatgcttctggatacttgggatcaggtctttgtttgggtgggaaaagacagccaggaggaggagaagaccgaggccctgacatctgccaagcggtatatagagacagatcctgccaaccgcgaccggagaacccccatcacagtcgttaagcagggttttgagcccccctcttttgtggggtggtttctagggtgggatgatgattactggagcgtggacccccttgatcgagcgatggccgaactcgcggcctag

SEQ ID NO: 248210 - RNA, 2229 nt, synthetic construct
  misc_feature 1..2229: note = Description of Artificial Sequence: Synthetic coding sequence
  source 1..2229: mol_type = other RNA
atggagaaactgttctgctgcttcccgaacagcatggtagttgagcatccagagtttctaaaggcagggaaggaacccgggttgcagatctggcgcgtggaaaagtttgatctggtcccagtccccaccaacctctatggcgacttttttacaggggatgcgtacgttattctcaaaacagttcagctgcgtaatgggaacttgcagtatgatctccactattggctggggaatgagtgcagtcaggatgagtctggcgccgccgctatctttaccgtgcagctggatgactatttaaacggcagagctgtgcagcatcgagaagtgcaaggtttcgagagcgcgacatttttggggtactttaagtcgggactgaagtataaaaagggtggagtcgcttccggtttcaagcatgtcgtgccaaatgaggtagtggtccaacgcctgttccaggtgaaaggtagaagagtggtaagggcaactgaagttccggtatcatgggaaagctttaataatggagactgcttcattttggacctggggaacaacattcatcagtggtgcggcagtaatagcaatcgctacgaacgtctcaaagccacacaggtctctaagggaattagagataacgagaggagcggaagagcacgtgtgcacgtttctgaggagggtaccgaacccgaggccatgctgcaggtactgggtccgaagccagccctccccgccggaaccgaagataccgctaaggaagatgcggctaatcggaagctggcaaaattgtacaaggttagtaatggggcagggacaatgagcgtcagcctcgtcgccgatgaaaaccctttcgcccagggcgcactcaagagcgaagattgttttatcctcgaccacggaaaagatggcaaaatatttgtctggaaggggaaacaagccaataccgaggaacggaaggcggcattaaaaacagcttccgatttcattactaagatggattatccaaagcagactcaagtcagtgtactccctgagggtggggaaacgcctcttttcaagcagttcttcaaaaattggagagaccctgatcagaccgacggtctggggctgtcctatctctcatcccatatagcgaacgtcgagcgcgttcccttcgatgccgccaccctgcacactagcaccgcaatggccgctcagcacggaatggacgatgacggcaccggacagaaacagatctggagaattgagggcagcaacaaggtgccagtggatcctgccacctacggtcaattctatgggggggacagctatatcatcctgtataactaccggcatggcggtcggcaaggccaaattatttataactggcagggtgcccagtctacacaagacgaagtcgcagcctctgcaattctaactgcccaactcgacgaggaattgggcggaacccctgttcagtctagagttgtgcaggggaaggagcccgcacatctgatgagtctgttcgggggcaagccgatgatcatttataaagggggtacatctcgggagggaggccaaaccgctcccgccagcacacgcctctttcaagtgcgcgccaactccgccggtgcaactcgagccgttgaggttctcccaaaggccggcgcactgaattccaatgacgctttcgttttaaagacgcccagcgcagcttatttgtgggtgggaactggcgcttctgaagccgaaaaaacgggtgcacaggagttgctgcgtgtgctccgcgcccaacccgtgcaggtcgccgagggctcggaaccagacggcttctgggaagcattaggcgggaaagctgcttataggactagcccgagactaaaagataaaaagatggacgctcatccacctagactcttcgcttgttccaacaagatcggtcggtttgtcattgaagaagtccccggggagcttatgcaggaagatctcgcaacagatgatgtgatgctgctggacacatgggatcaagttttcgtctgggtaggcaaagatagtcaggaagaagagaagacggaagcactgacgtctgcgaagagatatattgaaaccgaccccgctaaccgcgacaggaggactcccattaccgtggtgaaacagggatttgagccaccctcattcgtcggctggtttctgggatgggacgacgactattggagtgttgatccccttgacagagccatggccgagttagccgcctag

SEQ ID NO: 248211 - RNA, 2196 nt, synthetic construct
  misc_feature 1..2196: note = Description of Artificial Sequence: Synthetic coding sequence
  source 1..2196: mol_type = other RNA
atggtagtagaacatcctgaatttttaaaggcaggcaaggagcctggacttcaaatttggcgagtcgagaagtttgacctagtgccagtcccgacaaacctgtatggtgatttctttactggcgatgcatatgtcatcttgaaaacagtgcagctgcggaacggtaacttgcaatatgacctccactattggctaggtaacgagtgctcacaggatgagtcaggcgccgctgccatatttaccgtgcagctcgacgattatctgaacggcagggctgtacagcatcgggaggtccagggctttgagtccgcaacctttctaggctatttcaaatccggtctcaagtataagaaggggggtgtagctagtggattcaagcatgtggttccaaatgaagtagtcgtgcagaggctctttcaagtaaaaggaaggcgggtggtgagggcaacagaagtgcccgtgagctgggaaagcttcaataacggcgactgtttcatcctggacttgggaaacaatatccatcaatggtgtggaagtaatagtaataggtacgagcggctgaaagccacacaagttagcaaaggtatcagagataatgaaagaagcggcagggcgcgagtccatgtctcagaagagggaaccgagccagaagctatgctgcaggtcttgggtccgaagcctgccctccccgccggcacagaagacaccgctaaagaggatgctgcaaaccgcaaactggctaagctctataaggtctcaaatggggccgggacaatgtctgtatccctggtggcagacgagaatcccttcgctcaaggggcactgaaatctgaggactgctttatccttgaccacggcaaggatggcaaaatctttgtttggaagggcaagcaagccaataccgaggaaagaaaggcggccttgaagaccgcgagcgactttatcaccaagatggactatcccaaacagacccaggttagtgtgctgcctgagggaggtgagacacctcttttcaaacagttttttaaaaattggagagaccccgaccagacagacggactcggcctatcttatttgtctagccacattgctaatgtggagcgcgtgcctttcgacgctgctacgttgcacacttctacagccatggctgcccagcacggaatggacgacgacggtaccgggcagaaacaaatttggaggatcgagggttcgaataaagtacctgtggacccggcaacctacggacagttttacggaggagattcttacattatcctctacaactaccgccacggtggtaggcaaggtcagataatctacaattggcagggcgcccagagtacgcaggacgaagtggctgccagtgcaatccttactgcgcagctggatgaggaactcggcggaacacccgtccagtcccgtgtcgtgcagggaaaggaacccgcccatctgatgagtctgtttgggggcaaacccatgataatttataaaggggggacttccagggagggcggccagacggcccctgcaagcactagattatttcaggttcgcgccaattctgccggagccacccgggccgtggaggtattgcccaaggccggggcactaaactcgaatgacgccttcgtgctgaaaacaccgtcagctgcttatctttgggtaggaactggcgcctccgaggccgaaaaaacgggagctcaggagctcttgagagtgctgagggcgcagccagtacaggtagccgaagggtcagaacctgatggcttttgggaagctctgggagggaaggcggcttatcgaacctctccgcgcctgaaggacaagaagatggacgcacaccccccacgcctctttgcctgcagcaataagattggacgattcgttattgaagaggtgccaggggaactcatgcaagaagatctcgccacagacgatgtaatgcttctggatacttgggaccaggttttcgtgtgggtgggtaaggatagccaagaagaggaaaaaacagaagctttgacaagcgcaaaaagatatatcgagaccgaccctgctaacagagaccgacgaaccccaatcaccgttgtgaaacaggggttcgagcccccctcattcgtgggctggttcttaggatgggacgacgactactggtctgttgaccctttagatagagctatggccgaactggctgcttag

SEQ ID NO: 248212 - RNA, 783 nt, synthetic construct
  misc_feature 1..783: note = Description of Artificial Sequence: Synthetic coding sequence
  source 1..783: mol_type = other RNA
atggtcgtagaacaccctgaatttctgaaagctgggaaagaaccaggcctacagatctggcgcgtcgagaagttcgatcttgtgccagtgcctactaatctctatggcgatttttttacgggcgatgcctatgtgatactgaaaactgtacagctaaggaacggcaacctgcagtacgatttacattattggcttggaaatgagtgctcccaggacgagtccggcgctgcggctattttcacagtccaattggacgactacctgaatggacgggcagtccagcaccgtgaagtccaaggctttgagagcgctacatttctgggatatttcaagtccggtctcaaatataaaaaaggaggcgtggctagcggatttaaacacgttgtgcctaacgaggtcgtagtccagcggctattccaggttaaaggcagaagggtggtacgcgcaacagaagtgcctgtgtcttgggaatcttttaacaatggcgactgttttatcctcgatctcggcaataatattcaccagtggtgcggtagcaactctaataggtacgagcgtcttaaggccacgcaggtttccaaaggaatccgggacaatgaaaggtctgggcgtgcacgtgtgcacgtgagcgaggaaggtacagagccagaggctatgcttcaggtcctaggtccgaaaccagcactgccagctggaaccgaggatacagccaaagaagatgccgccaaccggaaactcgctaagctctataaagtgagtaacggtgccggaaccatgagctag

SEQ ID NO: 248213 - RNA, 2229 nt, synthetic construct
  misc_feature 1..2229: note = Description of Artificial Sequence: Synthetic coding sequence
  source 1..2229: mol_type = other RNA
atggagaaactgttttgttgcttccccaactcaatggtcgttgagcacccagagttcctcaaagccggaaaggagccaggactgcaaatttggagggttgagaagttcgacctcgttccagtgcctacaaatctttacggggatttctttaccggggacgcctacgtgatcttaaaaaccgtccagcttcgaaacggaaaccttcagtatgacttgcattactggcttggcaacgaatgctcacaggatgagtctggtgccgctgctatttttacagtacaactagacgattatctgaatggccgggccgtgcagcatagggaggtgcaaggattcgagtctgccacttttctaggttattttaagagcggactaaagtacaaaaagggcggagtggctagcggtttcaagcacgtagtgccaaatgaggtcgttgtgcagcgtttattccaggtcaagggcagaagagtggtacgagccacggaggtccccgtttcctgggagtcatttaacaacggagattgttttattctagacctcggaaacaacatccatcagtggtgcggaagcaattccaacagatacgaaaggctcaaagcaacacaagtttcgaaaggaatcagagacaacgaacgcagtggacgggcgcgtgtccacgtgagcgaggaaggtaccgagcccgaggctatgctgcaggtcctaggtcccaagcctgcgttacctgcgggaacagaggatacggcgaaggaggatgccgccaaccgtaagctcgctaaactgtacaaggtttcgaatggcgcaggtacgatgtccgtcagtctagtagcggacgaaaaccctttcgcccagggcgcattgaaatccgaggattgcttcattctggaccacggaaaagacggcaaaattttcgtctggaaggggaagcaggctaatacagaggaaaggaaagctgccctcaagactgccagtgactttattaccaaaatggactaccctaaacagactcaggtcagcgtactgccagaaggcggtgaaacacccctcttcaagcagtttttcaaaaattggcgggatccagatcagactgacggtttaggcctctcctacctcagctctcacattgccaacgtcgagagggttcccttcgacgcagccacattacatacctcaaccgcgatggcagctcagcacggcatggatgacgacggtacagggcagaaacagatctggcgtatcgaaggatcgaacaaggttcccgtggaccctgcgacatacggacaattctatggaggcgatagctacattatcttgtataattatcggcacggggggagacaaggtcagatcatctataactggcagggggctcagagcacacaggatgaagtcgccgctagcgcaatccttacagcccagctggacgaagaacttggcggcacaccggtgcaatctagggtggtccagggtaaggaacccgcacacctcatgtctctatttggtggtaagcccatgatcatctataagggcggcaccagccgagagggcggacagacagcacctgcatctactagactattccaggtgcgggccaactccgcgggagccacccgtgccgtagaggtgctgcccaaggccggagcattgaactccaacgacgcattcgttctcaagaccccctccgccgcatacttgtgggtcggaaccggggcatcagaggccgagaagacaggcgcccaggaacttctgcgggtactgcgcgcccagccagtgcaagtggccgagggatcagagccagacggcttttgggaagctcttgggggtaaagccgcgtacaggacttcaccacgattgaaagacaaaaagatggacgcccatcctcccagattatttgcatgctccaataagatcggaaggttcgtaatcgaggaggtacctggggagctcatgcaagaggatctggcaacggatgatgtgatgttactagacacttgggaccaagtattcgtgtgggtgggcaaggacagccaagaagaagaaaaaacagaagcactgacctctgctaagagatatattgaaacggaccctgcgaatcgagaccgtaggacccccattactgttgtgaagcagggttttgagccaccctcattcgtcgggtggttcctggggtgggacgacgactactggtccgtggatcccctcgacagagcgatggctgagctcgcagcctag

SEQ ID NO: 248214 - RNA, 2196 nt, synthetic construct
  misc_feature 1..2196: note = Description of Artificial Sequence: Synthetic coding sequence
  source 1..2196: mol_type = other RNA
atggtcgtcgaacaccctgagtttctgaaagcaggtaaggaacctggactgcaaatttggagagtggaaaagtttgacctggtacccgtaccgaccaacctctatggggacttttttaccggcgatgcttatgtaattctgaaaaccgtgcaattgcggaatggtaacttacagtatgatctacactattggttgggaaatgagtgctctcaggatgagtccggcgctgccgcaatctttacagttcagctagacgattacttgaacggcagggccgtgcaacatcgtgaggtgcagggtttcgaatctgcaacctttctcgggtactttaagtctggactgaagtacaaaaaaggcggcgttgcctccggctttaaacacgtcgtgcccaatgaagtcgtagtgcagcggctgtttcaagttaaagggcgccgcgtggttagagcgactgaagtaccggtgtcatgggaatcattcaacaatggagattgctttattttggatcttgggaataatattcaccagtggtgtggctccaattccaacaggtatgaaaggcttaaagccacccaggtcagcaaaggaattcgcgataacgaacgatctggacgcgcccgcgttcatgttagtgaggaggggaccgagccagaggccatgctgcaggtactgggcccaaagcccgctcttcccgcagggactgaagataccgccaaagaggatgccgccaacagaaagttggcaaaactgtataaggtcagtaacggagccggtactatgtctgtgagtcttgtagcagacgaaaacccttttgctcaaggcgccctgaaaagcgaagattgttttattttggatcacggaaaagacggtaaaattttcgtgtggaaaggaaagcaggccaataccgaggagaggaaagccgccctgaaaacagccagtgattttataacgaaaatggactacccgaaacaaactcaagtttcagtgctaccggaagggggtgagacaccgttgtttaagcagttcttcaaaaattggcgcgaccccgaccaaacggatggattgggcttatcgtacttgagtagccacatagccaatgttgaacgtgttccttttgatgctgccaccctccatactagcaccgctatggccgcacagcatggaatggatgacgacggtaccggacaaaaacagatctggcggatcgagggatcaaataaggtccccgtggaccccgcaacttacggccagttttacggtggggattcctatatcattttatacaactatagacacggcggccggcagggccagatcatttataactggcagggggcgcagagcactcaggatgaagtcgccgcatccgcaatactaaccgctcagctggatgaggagcttggcggaaccccagtgcagagcagggtcgtacaggggaaggaacctgcccacctcatgtcactcttcggaggcaaacccatgatcatctataaaggcgggaccagccgcgagggcggacaaactgccccagcgtccaccaggttgtttcaggtccgcgcaaattccgctggagcaacacgagcagttgaagtgctgccaaaggcgggggccctgaactcaaacgacgccttcgtattaaaaacccctagcgcggcgtacttgtgggtagggacaggagccagcgaagccgagaagacaggagcccaggaacttcttagggtgctgagggcgcagccagtgcaggtagctgagggctcagaacccgatggtttttgggaggcccttggcgggaaggcagcttacagaacatcaccccggctcaaggataaaaaaatggatgcacatccacctcgactctttgcctgctccaataagatcgggagattcgtgatcgaagaggtaccgggcgagttgatgcaggaggaccttgccactgatgatgtgatgctgctggatacttgggaccaggtgtttgtgtgggtgggcaaggactcacaagaggaggaaaagacagaagcactgacatctgccaagcgatacatcgagacagacccagcaaacagagatagacgcactcccattaccgtggtgaagcaggggttcgagccaccctctttcgtgggatggttcctcggatgggacgacgactactggagcgtcgaccctctcgatagagcgatggctgagctcgccgcttag

SEQ ID NO: 248215 - RNA, 2118 nt, synthetic construct
  misc_feature 1..2118: note = Description of Artificial Sequence: Synthetic coding sequence
  source 1..2118: mol_type = other RNA
atggtcgtcgaacatcctgaattcctcaaagcagggaaggaacctggccttcagatatggagggtagaaaagtttgacttagtgcccgtacccactaatctgtacggcgacttttttaccggcgacgcatatgtgatcctgaagaccgtccaattaagaaatggcaacctgcaatacgaccttcactactggctagggaacgagtgctcacaggatgaatccggtgctgctgcaatttttactgtgcagttggacgattacctgaaatacaaaaaaggaggagtagcatcaggcttcaagcatgtggtgcctaacgaagtggtggtgcagcgcctgttccaggtcaaaggccggagagtggtcagagccaccgaggttcccgtttcttgggagtcctttaataacggagattgcttcatcttggatctgggaaacaatattcaccaatggtgtgggagtaatagtaataggtacgagaggctcaaagcaacacaagtctcaaagggcatacgcgataacgagcgcagcggtcgggctagagtgcatgttagcgaggagggaacggagcccgaagccatgctccaggtcctgggccccaagcccgctcttccagccggtaccgaagatactgccaaggaagacgccgccaacaggaagcttgctaaactgtacaaggtttcaaacggggccggcacaatgtccgtttccctagttgccgatgagaacccatttgcccagggggcactgaaaagcgaagactgtttcatcttagatcacggcaaggatggaaagatcttcgtttggaagggcaaacaggctaatacagaggagagaaaagctgccctgaagacagcgtctgacttcattactaaaatggactatccgaaacagacccaggtcagcgtgctgcccgagggcggagagaccccactttttaaacagtttttcaaaaattggcgggacccagatcagaccgacggtctaggactaagttatttaagctctcatattgcaaatgtggagagagtcccctttgacgccgccacactccacacatctaccgctatggctgcacaacatggaatggatgacgacggaaccggacagaaacagatctggcgcattgaaggatcaaataaagtaccagtcgacccagctacgtacgggcagttctacggaggcgattcttacatcattctctataattatagacacggaggcaggcagggacagatcatctacaattggcaaggcgctcagagcactcaggacgaggtggcagcctctgctatcctaactgcacagttggacgaagagttaggtggaactcctgtgcaaagtcgggtcgtgcaaggcaaagaacccgcccatctgatgagtcttttcgggggcaagccgatgataatttataaagggggaacatccagggagggaggacagaccgcccctgcttcaacccgactgttccaagttcgagccaattccgcgggagccactcgcgctgtggaagtgctgcctaaggcaggggctctgaactcgaacgacgcatttgtgctgaagactccaagtgcagcgtatctctgggtgggcactggcgcatcagaggccgaaaaaactggcgcgcaggagctactgagggtactgcgtgctcagccggtgcaggttgccgagggcagcgagcccgatggattctgggaagcgttggggggcaaagccgcatatcgcaccagcccacgactcaaggataagaaaatggacgcccatcctcctagactgttcgcttgctctaataagatcgggaggttcgtaattgaagaagtccccggggagcttatgcaggaggatctggctaccgatgatgtgatgctgcttgatacatgggaccaggtgtttgtgtgggtgggaaaagactcccaggaggaagagaagacagaggccttgacgtcagccaagcgatacatcgagaccgatcctgccaatagggataggaggactcccataacagtggtgaagcagggattcgagccccccagtttcgtcggctggttcttgggttgggacgacgattactggagtgttgaccccctggatagagctatggcagaattagcagcatag

SEQ ID NO: 248216 - RNA, 2220 nt, synthetic construct
  misc_feature 1..2220: note = Description of Artificial Sequence: Synthetic coding sequence
  source 1..2220: mol_type = other RNA
atgcccctgtgtactcccaactcaatggttgttgagcatccagagttcctgaaagctggaaaagaacccggcctgcagatttggcgggtggagaagttcgacctagtacccgtgccaacaaacttatatggcgatttctttacaggagatgcgtacgtgattctcaaaacagtgcagctgcgtaacggaaacctgcagtacgacttgcactactggctagggaacgagtgctctcaagatgaaagcggcgccgcagctatcttcactgtgcaattggatgactacctgaatggccgagccgtccagcaccgggaggttcaaggattcgagtccgctacattcctggggtacttcaagagtggtttaaaatataagaaaggcggagtcgcctcagggttcaaacatgtggtccctaacgaggtcgtcgtgcaaagactttttcaggttaaaggaagacgagtggtcagagccacagaggtgcccgtgagctgggaatccttcaacaatggcgattgcttcatcctcgatctgggaaacaatatccatcagtggtgcggatctaattctaatcggtatgagaggttaaaggctacacaggtgagcaaaggcatacgtgacaacgaaagatcagggcgggcccgcgtgcacgtgtcagaggaaggcactgaacctgaagccatgttgcaggtattaggccctaagccagctctgcctgctggaacagaagacactgccaaagaggatgctgccaaccggaaattggccaaattgtacaaggtgtctaacggggccggtacgatgtcggtgagcctagtggcagacgaaaacccattcgcccagggcgcccttaagtcagaggattgtttcatcctagaccacgggaaagacggcaagatattcgtttggaagggtaagcaggcaaacaccgaagaacggaaagctgctctcaaaactgcgagtgatttcataactaaaatggactatcctaaacagacacaagtgtctgtccttcccgaaggcggcgagaccccacttttcaagcagttcttcaaaaactggagggatccagatcagactgacggcttaggtctctcctatttgtccagccacatagccaacgtggaacgagtcccctttgacgcagcgacattgcacacctcaaccgcaatggcggctcaacacggtatggacgatgatggaaccggtcagaaacagatttggcggatcgagggctccaacaaggtccccgtggatcccgccacctatggccagttttacggtggcgattcatatatcattctgtacaactaccggcacggcgggagacagggacaaatcatctacaactggcagggcgcgcagtctacgcaggatgaggtagccgctagcgcgattctgaccgcgcagctagacgaagagctgggcggcactcccgtgcagagccgagtggtgcagggaaaggaacccgctcatctaatgtctctgttcggcggcaagcctatgattatctacaaaggtgggacttcacgcgagggtggccagacagctcccgcctctactaggttgtttcaggtacgagccaatagcgcaggtgccaccagggcagtcgaggtcctcccaaaggccggggcactcaacagcaacgacgcctttgtgttaaagacacctagtgccgcatacctgtgggtaggaactggggcgagcgaagctgagaaaaccggtgcacaggagctactgcgtgtcctccgggcccagccagtgcaggttgccgagggcagtgagcccgacggcttttgggaggctctaggcgggaaggcagcttacaggacttctccccgcctcaaggacaagaagatggatgcacacccacccaggttgttcgcttgttccaataagattggccgctttgtgatcgaagaagtcccaggagagctgatgcaggaagatcttgccaccgacgatgttatgcttctggatacatgggatcaggtgttcgtatgggttggtaaagacagccaggaggaagagaaaacggaagctctcaccagcgctaagagatacattgagaccgaccctgccaacagagaccgcagaactccaattactgttgtaaagcagggcttcgaaccaccgagttttgttggatggttcctcggatgggacgatgattactggagtgttgaccccctggacagggcaatggccgagctagctgcctag

SEQ ID NO: 248217 - RNA, 351 nt, synthetic construct
  misc_feature 1..351: note = Description of Artificial Sequence: Synthetic coding sequence
  source 1..351: mol_type = other RNA
atgccctcaccgggtacagtgtgttctcttctccttttagggatgctttggttagatctggcaatggccggctcttcttttctttcccctgagcaccaacgggtccagcgaaaggaatcaaagaaaccgccggcgaaattgcagccacgggcactggccggttggctacgacccgaggatgggggacaggcagaaggagccgaagatgaacttgaagtgcgcttcaatgcaccctttgacgtcggaatcaagctctctggagttcagtatcagcagcacagccaggctttaggcaagtttctgcaagacattctgtgggaagaagccaaagaggcccccgccgacaagtag

SEQ ID NO: 248218 - RNA, 354 nt, synthetic construct
  misc_feature 1..354: note = Description of Artificial Sequence: Synthetic coding sequence
  source 1..354: mol_type = other RNA
atgcccagccctggcactgtctgcagcttgctattacttggcatgctatggttagacctggcaatggcaggaagcagttttctgtcccccgagcaccaaagggtgcaacagcgtaaggagtcaaagaaaccgcccgccaaattgcagcctagagccttagctgggtggctaaggcccgaagatgggggccaggcagaaggggctgaggacgaattagaagttagatttaatgctccatttgatgtcgggatcaaactttcaggcgtgcagtaccagcaacacagccaagctctcggtaagtttcttcaggacatcctctgggaagaggctaaggaagccccagctgacaagtag

SEQ ID NO: 248219 - RNA, 276 nt, synthetic construct
  misc_feature 1..276: note = Description of Artificial Sequence: Synthetic coding sequence
  source 1..276: mol_type = other RNA
atgccctcaccaggaacggtatgttcactgctgctcttggggatgctctggctcgacctggctatggcaggaagctctttcctgtctccagaacaccagcgggtccaacaaagaaaggagtctaagaagccacctgctaaactgcaacccagagctctggcaggctggttgcggccagaggatggcggacaggcggagggcgccgaagatgaactggaagtgagaagaccccaacccacaagtgatcgtccgcaagcattgctgacatctctgtag

SEQ ID NO: 248220 - RNA, 102 nt, synthetic construct
  misc_feature 1..102: note = Description of Artificial Sequence: Synthetic coding sequence
  source 1..102: mol_type = other RNA
atgcctagccccggaacggtgtgtagcttgcttttgctgggaatgttgtggctcgatctcgcaatggccggaagcagttttcttagtcctgaacaccaatag

SEQ ID NO: 248221 - RNA, 354 nt, synthetic construct
  misc_feature 1..354: note = Description of Artificial Sequence: Synthetic coding sequence
  source 1..354: mol_type = other RNA
atgccctcccccggcacagtatgtagcctgcttctgctcggaatgctttggcttgatctcgccatggcaggcagcagttttctatcccctgaacaccagcgcgtccagcaacgcaaggagtccaagaagccaccagctaaactccaacctagggccctggccgggtggctaagacctgaggacgggggccaagcagaaggggccgaggacgaactcgaagtgcgattcaacgcaccgtttgacgtaggcattaagcttagcggtgtgcagtaccaacagcattcacaagccctgggtaaatttctccaggacattttgtgggaagaggccaaagaggcacctgccgataagtag

SEQ ID NO: 248222 - RNA, 351 nt, synthetic construct
  misc_feature 1..351: note = Description of Artificial Sequence: Synthetic coding sequence
  source 1..351: mol_type = other RNA
atgccctcaccaggcactgtgtgctccttactcctcctgggtatgttgtggttggatctagcaatggccgggtccagtttcctgtccccagagcaccagagagtacaacgtaaagagtctaaaaaaccacccgccaagctgcagcctcgagcactggccggatggctccggcccgaggacgggggccaagctgaaggtgccgaagacgaattggaggtcagattcaatgcccctttcgatgtcgggatcaaactcagcggcgtgcagtaccagcagcatagccaagctttaggaaaatttttgcaggatatattatgggaagaggccaaagaggcccctgccgataaatag

SEQ ID NO: 248223 - RNA, 318 nt, synthetic construct
  misc_feature 1..318: note = Description of Artificial Sequence: Synthetic coding sequence
  source 1..318: mol_type = other RNA
atgtttacttgctggtggagctacctgagatctaccctggcagctgtcccaggcgaagcctcccgtgtgcagcagcgcaaagagtcaaagaaacccccagcaaaactgcagccacgggcacttgctggatggttgagacctgaagacggcggacaggccgagggggccgaagatgagctggaagttcggttcaatgcgccattcgacgtggggatcaaactgtcaggcgtgcagtatcagcaacacagccaggcattaggcaaattccttcaagacatcctgtgggaggaagcaaaagaggctcccgctgataaatag

SEQ ID NO: 248224 - RNA, 201 nt, synthetic construct
  misc_feature 1..201: note = Description of Artificial Sequence: Synthetic coding sequence
  source 1..201: mol_type = other RNA
atgtttacatgttggtggtcgtatctccgcagcaccttggcagctgttccaggcgaggctagtcgcgtacaatttaacgccccctttgatgtcggaataaaactgtccggcgtacagtaccaacagcactcacaagcactcgggaaatttctccaagatattctatgggaagaagcaaaggaggccccggcagataaatag

SEQ ID NO: 248225 - RNA, 315 nt, synthetic construct
  misc_feature 1..315: note = Description of Artificial Sequence: Synthetic coding sequence
  source 1..315: mol_type = other RNA
atgtttacctgctggtggtcttacctgagaagcacactagcggctgtaccaggcgaggcatcgagggtgcagcggaaagagtctaaaaaacctcccgcaaaattgcagccccgcgctttagcaggttggctcagacccgaagacggcgggcaggctgagggggccgaggacgagctagaagttagattcaatgccccattcgacgtcgggatcaagctttcgggcgtgcaataccagcaacactcacaggcactgggaaaattcctgcaggacattttatgggaagaagcaaaggaagcgcccgcggataagtag

SEQ ID NO: 248226 - RNA, 351 nt, synthetic construct
  misc_feature 1..351: note = Description of Artificial Sequence: Synthetic coding sequence
  source 1..351: mol_type = other RNA
atgccatccccaggaacagtctgctccctcctgcttttaggaatgctctggctcgacctagccatggctgggtcctcattcctttcccccgagcaccagcgagtccaaaggaaggaaagcaaaaagcctccagctaaactccagcccagggctctagccggttggctgcggccagaagatggtgggcaggccgagggcgccgaagatgagctagaagtgcggttcaacgctccatttgacgtgggaatcaagttaagcggagtgcaatatcagcagcactctcaggcactgggcaaattcctgcaagatattctatgggaagaagctaaagaagctccagccgataaatag

SEQ ID NO: 248227 - RNA, 354 nt, synthetic construct
  misc_feature 1..354: note = Description of Artificial Sequence: Synthetic coding sequence
  source 1..354: mol_type = other RNA
atgccctcaccaggcaccgtgtgttctttactgttgctcgggatgctctggctggatctcgccatggccggaagctctttcctttcccccgagcaccagcgtgtacagcaacgaaaagaaagcaagaaacctccggctaagctgcagccaagagcactggcaggatggctccgaccggaagacggcggacaggctgagggggccgaggatgagctagaagtccgattcaacgccccattcgacgttggaatcaaactcagtggcgtgcagtaccaacagcactcccaagcccttggtaagtttctacaggatatcctatgggaagaggctaaagaggcccccgctgataaatag

SEQ ID NO: 248228 - RNA, 354 nt, synthetic construct
  misc_feature 1..354: note = Description of Artificial Sequence: Synthetic coding sequence
  source 1..354: mol_type = other RNA
atgcccagccccggcaccgtttgctctctgctcttgcttgggatgttgtggctcgacctcgctatggccggatcatcctttctttcccctgaacaccaaagagtacaacagcgtaaagaaagtaaaaagcctccagctaaactacagccgcgcgccctggctgggtggttacggcctgaagacggaggacaagccgagggcgccgaggacgagctggaagtgcggtttaatgcacccttcgatgtgggaatcaaacttagtggggtgcagtaccaacagcactcccaggcgctaggtaaattcttgcaggatatcctttgggaggaggcaaaggaagcacccgccgataaatag

SEQ ID NO: 248229 - RNA, 1350 nt, synthetic construct
  misc_feature 1..1350: note = Description of Artificial Sequence: Synthetic coding sequence
  source 1..1350: mol_type = other RNA
atgtattcttttaataccctgcggctgtatctgtgggaaactatagtttttttctctctcgcagcaagtaaggaggccgaagctgcacggtccgcgcccaaaccaatgtccccatccgacttcctcgataaactgatggggcgcactagcggctacgatgctcggatccgccctaattttaagggacccccagtgaatgtctcctgcaacatcttcataaattcctttgggagcattgctgagaccaccatggattaccgggtcaacatctttctgagacagcagtggaacgaccctagattagcctataacgaataccctgatgacagcctggatctcgaccccagcatgcttgactcaatttggaagcccgacctcttctttgccaatgaaaaaggcgcacactttcatgagattactaccgataacaaactcttgcgaattagtcggaacggaaatgtgctttactcaattaggatcactttaacactcgcctgccccatggatctcaagaattttcctatggacgtccagacctgcattatgcagctggaatcttttggatacacaatgaacgatcttatattcgaatggcaagagcaaggtgccgtgcaggtggccgacggactcacactcccacaatttattttaaaggaagagaaagatctgcgctactgcacaaaacactataacacaggcaaatttacctgtattgaagcaagatttcatctggagagacagatgggctactacttaatccagatgtacatccctagtctgttgatagtcatcttatcctggatatctttttggatcaatatggacgccgccccggccagagtcggcttaggaatcaccacagtcttgaccatgactacccagtcgtccggatcacgcgcctctctgcccaaagtttcgtacgttaaagccatcgatatttggatggccgtctgccttctgttcgtatttagcgcattgctggagtacgctgcagtcaactttgtaagtcgccagcacaaagagctgcttcgatttcggaggaaacgccgccaccataaggaggatgaagcaggcgagggcaggttcaacttctccgcgtacggtatgggccccgcttgtctgcaggctaaagacggcattagtgtcaaaggtgcaaataacagcaacacgacaaatccgcctcccgccccaagtaagtctccagaggaaatgagaaagctgttcattcaacgggcaaagaaaatcgataagatttctcgaatcggctttcctatggcctttctgatcttcaacatgttctattggattatttataaaatagtgcgccgcgaggatgttcataatcaatag

SEQ ID NO: 248230 - RNA, 1374 nt, synthetic construct
  misc_feature 1..1374: note = Description of Artificial Sequence: Synthetic coding sequence
  source 1..1374: mol_type = other RNA
atgtactctttcaataccctgagactatacctgtgggagactatcgtttttttttccctcgcagccagcaaggaggccgaagctgcgagatcagccccaaagcctatgagtccctcagacttcttggacaagctcatgggacgcacctcaggttatgatgcaaggattcgccctaattttaaaggcccaccggttaatgtctcatgtaatattttcatcaactcattcggatctatcgcagaaacgacaatggattatagagtcaacatcttcttacgccaacagtggaacgatcccaggcttgcttacaatgaatatccagacgactctcttgacctagacccttctatgttagattcaatttggaagcccgacttgttttttgctaatgaaaagggtgctcacttccacgaaatcacaaccgataacaagttgttgcgtatatcccgaaatggcaacgtgctctactccattcggatcacattaactctggcctgtcctatggatttgaagaactttccgatggacgtgcaaacttgcatcatgcagttggagagcttcggctacactatgaacgaccttatctttgagtggcaggagcagggggctgtgcaggttgccgatggtttgaccctaccacaatttatactcaaagaagaaaaagatcttaggtactgtacgaagcattacaacaccggcaagttcacttgtatcgaagctagattccatctcgaacgacaaatgggttactatttgatccaaatgtacatcccttcactccttatcgtgattctgtcctggatctcattttggatcaatatggacgccgcacccgcgcgggtgggactgggtatcaccactgttctcacaatgacgacccagagcagcggctcccgtgcttcccttcctaaagtctcctacgtcaaagctatcgatatttggatggctgtatgccttctgtttgtgttctccgccctcctcgagtacgcagccgtgaacttcgtttctaggcaacacaaagagttgctgcgcttcagacgtaagaggaggcaccacaaatcgccaatgctcaatctctttcaggaagacgaggctggagagggccgctttaatttttcagcatacggcatgggacctgcctgcttgcaggcgaaagatggaattagcgtcaaaggcgcaaataacagcaatacaacaaacccgccccccgccccttctaaaagtcccgaggaaatgaggaagttattcatccagcgggcaaaaaagatagataagatctcaagaattgggttccctatggcgtttctgatcttcaatatgttctattggattatttacaaaattgttagaagagaagacgtccacaaccagtag

SEQ ID NO: 248231 - RNA, 1101 nt, synthetic construct
  misc_feature 1..1101: note = Description of Artificial Sequence: Synthetic coding sequence
  source 1..1101: mol_type = other RNA
atggattatcgtgtcaatatctttctccggcagcaatggaacgatcccaggctggcatacaatgagtacccggacgattctctcgacttggatcccagcatgctcgactctatctggaaacccgacttgttttttgcaaacgaaaaaggagctcactttcacgaaatcacaactgacaacaagctgctccgtattagtcgcaacggtaatgtgctgtattccatcaggatcacactcacgctcgcttgtcctatggatctgaagaattttcctatggacgtccagacgtgcataatgcagcttgaaagtttcggatacactatgaacgatttaattttcgagtggcaggagcaaggtgctgtgcaggtcgcagacggattaaccctgccgcagtttatcctgaaagaggaaaaagacctgcgctattgcactaagcactataacacgggtaaatttacctgtatcgaggccagattccacttggaaagacaaatgggctattacctgatacagatgtatattcctagtctcttaattgtgatcttaagctggatatcattctggataaacatggatgccgccccagcgcgcgttggactggggatcacaactgtacttaccatgacgacccaatcaagtggatcccgcgcctctttgcctaaagtgagctatgtcaaagcaatagatatctggatggcagtgtgtctcctcttcgtctttagtgccctcttggaatacgcggccgtaaactttgtgagccggcagcataaggaacttctgagattccggagaaaacggcgccatcataaggaagatgaggccggcgaagggaggtttaatttctctgcttacgggatgggccctgcatgtctgcaagcaaaggacggaatctccgtcaaaggagccaacaactctaacaccacaaatcccccaccagccccctcaaagtccccagaggagatgcgtaagctgttcattcagcgcgcaaagaagatagacaaaatttcaagaatcggctttcccatggcatttctgattttcaacatgttttactggatcatttataaaatagttaggcgcgaggacgtacataatcagtag

SEQ ID NO: 248232 - RNA, 1365 nt, synthetic construct
  misc_feature 1..1365: note = Description of Artificial Sequence: Synthetic coding sequence
  source 1..1365: mol_type = other RNA
atgagtgcgggaggcccttgccccgccgccgccggaggcggccctgggggcgcgtcttgttccgtgggagctccggggggcgtctcaatgttccgctggctggaggtgctcgaaaaggagttcgacaaagcattcgttgatgttgaccttttactgggggaaattgatccagatcaagccgatatcacatatgagggcaggcagaagatgacttctctcagctcctgcttcgctcagctttgccataaggcccaaagtgtgtcccaaattaaccacaaactggaagctcaactggttgacctcaaatcagaactgaccgaaacacaagcggagaaagtcgtgttggaaaaggaggtgcacgaccagcttctgcagcttcactccatccagctacagttgcatgccaagaccggccagagcgccgattctgggacaatcaaagcgaagttggagagagaactcgaagccaacaagaaagagaagatgaaggaggctcagctcgaagccgaagtgaagctcttaaggaaagaaaacgaagcactgcgtagacatatcgccgtgctccaggctgaggtgtacggggcccgccttgccgccaagtatctggataaagagctggcaggaagagttcaacagattcagctcctcggcagagacatgaagggaccagcccatgacaagctatggaaccaattggaggcagagattcacttgcatcggcacaagacggtgataagagcatgtcgaggccgcaatgatctgaaacggcccatgcaggcccctccagggcacgaccaggacagcctcaaaaaaagccagggtgtgggaccgatccggaaagtcctccttctgaaagaggatcatgagggactcgggatctctattactggaggcaaggagcatggcgtgccaatcttaatcagtgagatccaccctggacagcccgccgataggtgcggaggcttacacgtcggagacgctatactcgccgtgaatggagtcaaccttagggatacaaagcacaaagaggctgtgacaattttgagtcagcagcggggagaaatagaattcgaggtcgtttatgtggcaccagaggtagactccgacgatgagaacgttgaatacgaagacgaaagcggccatagatatagactctacctcgacgagctggaaggaggaggtaatcccggggccagttgtaaggacacaagcggggagatcaaagtactgcagggattcaacaaaaaagccgtcaccgacacccatgagaacggcgacctaggaactgctagtgagacgccactggacgatggcgctagcaaactggatgacttgcacacgttgtatcacaaaaagtcttattag

SEQ ID NO: 248233 - RNA, 918 nt, synthetic construct
  misc_feature 1..918: note = Description of Artificial Sequence: Synthetic coding sequence
  source 1..918: mol_type = other RNA
atggccgccggactggcgagattgttactgcttctgggactcagcgccggcggacctgctccagcaggggccgccaagatgaaagttgtagaggaacctaatgccttcggagtaaacaacccatttctcccccaggcaagtcgcctccaggcaaagagggacccgagtcctgtctcaggccccgtgcatctgttccggctcagtggaaaatgcttctctttagtcgaatccacatataagtacgaattttgtccatttcataacgtaactcagcacgagcagacatttaggtggaacgcgtattccgggatactgggcatctggcacgaatgggaaatcgccaataatacgtttaccggcatgtggatgagggatggtgatgcttgtcgcagccgtagtcgacagagcaaagtagagctcgcgtgcgggaagtcaaaccgcttagctcacgtttccgaaccgtccacctgcgtgtacgccctgacgtttgaaacccccttggtctgccaccctcacgctctgctggtgtatcctaccttacctgaggccttacagagacagtgggatcaggtagaacaagacttagcagatgaattaatcacaccacagggacatgaaaagctccttcgcaccctgttcgaggatgctggttatcttaagacccccgaggagaatgaacctacccagctcgagggcggccccgactcgttgggctttgaaacactcgagaattgcagaaaggctcacaaggagctgtctaaagagattaagagattgaaaggattattgacccagcatggaataccctacacaaggcctacggaaacttccaacctggagcacttaggccatgaaacccctagggcaaaaagcccggaacaactacgcggcgaccctggactccggggatctttgtag

SEQ ID NO: 248234 - RNA, 2196 nt, synthetic construct
  misc_feature 1..2196: note = Description of Artificial Sequence: Synthetic coding sequence
  source 1..2196: mol_type = other RNA
atgagctggtttgttgatctggctggcaaagccgaggaccttttaaaccgcgtcgaccaaggcgccgccactgccttatcccgaaaagataacgccagtaatatctactcaaaaaacactgactataccgagcttcaccagcagaacaccgacctcatttaccagacaggacccaaaagcacctacatctcatccgccgctgacaatatccgcaatcagaaagccactatccttgctggaacagcaaacgtgaaggtgggctcccggacacctgtcgaagccagccaccctgtggaaaatgcatcggtcccccggccaagctcccattttgtgaggaggaaaaagtccgaaccagacgacgagctgctcttcgatttcctgaactccagtcagaaggaaccaacagggagggtggaaatccgcaaagaaaaaggtaagacaccagtgtttcaatcaagtcagacttccagtgtttcctccgtcaacccatccgttacaaccatcaaaacaattgaggagaactcatttggatcccagacccatgaagcggctagtaactctgattcatctcacgaaggacaggaagaatcatctaaggagaatgtttcatcaaatgctgcatgtccggatcacacaccgacgcccaacgacgatgggaagtcccatgaactgtctaaccttcggctcgagaatcaactcctgaggaacgaggtacagtctctaaatcaggaaatggcaagtcttttacagaggagcaaggagacacaggaagaactgaacaaagctcgcgcccgcgttgagaaatggaacgcagatcactccaaatcggaccggatgacccggggcctgcgagcccaagtggatgacctgactgaggccgtggccgccaaggacagtcagttagcagtcttaaaggtgcggctgcaagaagccgatcagttgctctcgacaagaacggaagcactggaggccctccagagtgaaaagtctagaatcatgcaggatcagagcgaggggaattcgctccagaatcaggccctgcaaacgtttcaggaaagactgcatgaggccgacgcaacactgaagagggaacaggaatcatataagcaaatgcagtcggagttcgctgccagactgaataaggttgagatggagagacagaacctggccgaagctattaccctggcggagaggaaatactctgatgagaaaaagcgtgtagacgaactgcagcagcaagtgaaactgtataagctgaacctggagtccagcaagcaggaactgatcgactataagcaaaaggctacacggattcttcagagtaaagaaaagctgatcaatagtcttaaggaagggagtgggtttgaaggcttagatagcagtactgcgtcttcaatggagctggaagagctccgccatgaaaaagaaatgcagagagaagaaatccagaagctgatgggccagatacaccagctgcggtccgagttgcaggacatggaagctcaacaggttaatgaagccgaaagcgctagggagcagctgcaggacttacatgaccaaattgccggacagaaggcatcaaagcaggaactggagaccgagctggagagactgaaacaagaattccattacattgaggaggacttgtacagaaccaaaaacaccctgcagagccgaataaaggacagggacgaggagattcagaagctgcggaaccagttgaccaacaaaactctgagcaattcttcccagtcggaactcgaaaataggctccaccagctaacagagacactaattcagaaacagaccatgttagaatctctttctactgaaaagaactccctcgtcttccagctggagaggctggagcagcagatgaactcagcgtcaggctctagtagtaacggatcgtcgatcaacatgtcaggaatcgacaatggtgaaggaactcggctccggaacgtgcctgtgctgttcaacgacaccgagaccaatctcgcaggaatgtacggcaaggtcagaaaagctgcatcctcgatcgaccaattttcaatccgtttaggtatcttcttgcgacgttacccaatcgcgcgggtattcgtcatcatttatatggccctgttgcacctttgggttatgatcgtgttgttgacatacacccctgaaatgcaccacgaccagccctatggcaagtag

SEQ ID NO: 248235 - RNA, 1782 nt, synthetic construct
  misc_feature 1..1782: note = Description of Artificial Sequence: Synthetic coding sequence
  source 1..1782: mol_type = other RNA
atgtggacactagtatcatgggtggctttgacagctggtctggtagcaggcactagatgccctgacggccaattctgccccgtcgcttgctgcctggaccccggaggcgcctcttattcctgttgccgaccgctactcgacaaatggcccacaacactcagccggcacctcggtggaccctgtcaggttgacgctcattgttcagccggccatagctgtatattcacagtatccgggacaagctcttgctgccccttcccagaggccgtcgcttgcggggacggacaccactgttgtccacgggggtttcattgttctgccgatggtaggtcatgtttccagcgatcagggaataattcagttggtgccatccaatgtcccgacagtcaatttgaatgccctgacttctccacatgctgcgtgatggtcgatgggagctggggctgttgtcccatgccacaagcctcctgctgcgaggaccgtgtgcattgctgcccccacggggctttttgcgacctcgtccatacacggtgcataacacccaccggaacacaccctctagcaaagaaactgcctgctcaacgtaccaaccgcgcggtagcattatcatccagtgtcatgtgccccgatgcaaggagccgctgccccgacgggtctacctgttgcgagttgcctagcgggaagtacggctgctgcccgatgcctaatgccacctgctgctccgaccacctgcactgctgcccccaagacaccgtctgcgaccttattcagagtaagtgtctatcaaaggagaatgccacaaccgatcttctcacaaaattgcccgcacacaccgtaggagatgttaaatgtgatatggaagtcagttgtcccgacgggtacacatgctgcagattacagtccggcgcctgggggtgctgcccatttacacaggcggtctgctgcgaagatcatattcattgttgtcctgctggatttacctgcgacacacagaaaggaacgtgcgagcagggcccccaccaagtgccatggatggaaaaggccccggcgcacttaagccttcccgatccacaggccctcaagagagatgtaccatgcgacaatgtgagctcctgccctagttcagatacctgctgtcagctgacaagtggagagtggggatgttgtcctatcccagaagcagtgtgttgcagtgaccaccagcactgctgtccacaggggtacacatgcgtggcagaaggccaatgccagcgtggctcagagattgtggctggattggaaaaaatgcccgccagaagagccagcctgagccatccacgcgatatcgggtgcgaccagcacacgtcatgccccgtcggtcaaacatgttgtccttctttgggaggctcctgggcatgttgccagctgcctcacgcggtctgctgcgaggaccgacagcactgctgcccagccggttacacatgcaacgtgaaagcgcgtagctgtgaaaaagaggtcgtgagtgctcagcccgctacatttcttgctcgctctccacacgtgggagtgaaggatgttgaatgcggcgagggtcacttttgccacgacaatcagacctgctgtcgggacaatcgccagggttgggcttgttgtccataccggcagggagtttgctgcgctgaccgacgacactgttgtccggccggattccgctgcgccgctcgtggaaccaagtgtcttagacgtgaagctcctcggtgggacgcacctcttcgcgatcccgctctccgacagcttctgtag

SEQ ID NO: 248236 - RNA, 1080 nt, synthetic construct
  misc_feature 1..1080: note = Description of Artificial Sequence: Synthetic coding sequence
  source 1..1080: mol_type = other RNA
atgacattggagtctatgatggcatgttgcctcagtgacgaagtgaaagagtccaaaagaatcaatgctgagatagaaaaacagctcagacgcgacaagcgggatgctagaagagaattaaaactgctgctactgggaactggggagtcaggtaaatcaaccttcatcaaacaaatgagaatcattcatggcgccggttacagtgaggaggacaaacgtggctttaccaaattggtgtatcagaacattttcacagctatgcaggcaatgattcgtgcaatggaaacgctcaaaattctttacaagtacgagcaaaacaaagccaatgccttgctgattcgggaagtggatgttgaaaaagtgacaacgttcgagcatcagtacgtgtcagctatcaaaaccttgtgggaagacccgggtatacaggagtgttatgataggaggagggagtatcagttgagcgacagcgcaaagtattacttaactgatgttgacaggatcgctaccctgggataccttcccactcagcaggacgtgcttcgggttagagttccaaccaccgggataatagagtatcccttcgacctggaaaacattatttttagaatggtggacgtaggtggccagaggtctgaacggcgcaagtggattcactgttttgaaaatgtcacctctatcatgttccttgttgctttgtccgagtacgaccaagttctggtagaatcagacaacgaaaatagaatggaagaatctaaggccttgtttaggaccatcataacctacccttggttccagaattcctccgtgattctcttcctgaataaaaaggatctcttagaggacaagattttatattctcatttagttgactacttccctgaattcgacgggccccagagagacgcacaggcagctagggagtttatactgaaaatgtttgttgatctgaaccccgactccgacaagattatttactcgcatttcacatgcgccacagatacagagaatattcgattcgtgttcgccgccgtcaaggatacaatcttgcagctgaaccttaaagagtataacctcgtgtag

SEQ ID NO: 248237 - RNA, 606 nt, synthetic construct
  misc_feature 1..606: note = Description of Artificial Sequence: Synthetic coding sequence
  source 1..606: mol_type = other RNA
atgggtaatgtgatggagggaaagtccgtcgaagaactatccagtaccgaatgccaccagtggtacaagaaatttatgactgagtgcccctcagggcagctgacactctacgaattcaggcagttcttcggcctcaaaaatctatctcccagtgccagtcaatacgtggagcaaatgtttgagacctttgactttaacaaagacggctatattgattttatggagtacgtcgccgcattgtcacttgtccttaaggggaaggtggagcaaaaactacgatggtatttcaaactctacgacgttgatgggaacgggtgtattgaccgtgacgaactcttgaccatcatccaggccatccgagctatcaacccgtgtagtgacaccacaatgaccgcggaagagttcacagatacggtattttccaaaattgacgtgaacggagatggcgaactgtcgttggaagagttcatcgagggtgtgcagaaggaccagatgttacttgacacactgactcgtagcctagacctcacacgtatcgttaggcggttacaaaatggtgagcaggatgaagaaggagctgatgaagccgcggaagctgctggctag

SEQ ID NO: 248238 - RNA, 1482 nt, synthetic construct
  misc_feature 1..1482: note = Description of Artificial Sequence: Synthetic coding sequence
  source 1..1482: mol_type = other RNA
atgtccaagggaccagccgtgggcatcgacctagggaccacctacagttgcgtgggagtcttccagcacggaaaggtagaaatcatcgcgaatgaccaagggaacaggactaccccatcctatgtggcctttaccgataccgaaagactgattggcgatgctgccaagaatcaggtggcaatgaaccctacaaacactgtctttgacgccaagcgcctgattggaagaagattcgacgacgcagtggtgcagtctgacatgaaacactggcccttcatggttgtcaacgatgctgggaggccaaaggtgcaggttgagtataagggggagaccaaatcattttatccagaagaagtctctagtatggtcctcaccaaaatgaaagaaattgctgaggcctatctcggaaagacggttaccaacgcagtggtgacggtgcccgcctactttaatgatagtcaacggcaagccacaaaggatgccggcactattgccgggcttaatgtgcttagaataataaacgaacctaccgccgccgccattgcatatggcctcgataaaaaggtcggcgccgagagaaacgtgttgatcttcgatctgggggggggcactttcgacgtgtctatcctcactatagaggacggaatctttgaggtcaagagtaccgccggagacacacatctgggcggcgaggattttgataatcgaatggtcaaccacttcatagcagagtttaagcggaagcacaagaaggatatctcagagaataaacgcgctgtaaggcgcctgcgaacagcttgtgagagggccaaaaggacattgagtagctctactcaggcatcgatcgagatcgatagtctttatgagggtatagatttctacaccagcatcaccagagccaggttcgaggaacttaatgctgatctatttagaggcaccctggaccctgtcgaaaaggccctgcgcgacgccaaactcgataaatcacagatccatgatatagtgctggttggcgggtctactcgcatcccaaagatccagaaactcctccaggatttctttaacggcaaagaactgaacaagagcattaatccagacgaggcagtggcatacggcgcagccgtgcaggctgcaatcttatccggtgataaaagcgagaatgtccaggacctcctgctgcttgacgtcacacctctgagtcttggtattgaaacagctgggggtgttatgaccgtgctgattaagagaaacactaccatcccgaccaagcagactcagactttcaccacatacagcgacaatcaaccaggagtactgatccaagtatacgaaggggaacgcgctatgacaaaagataacaatctgcttggtaagtttgaactcacaggaatgcccggaggtatgcctggcggatttcccggcgggggtgcgccaccttctggaggagcctctagcggtccaacgattgaggaagtagactag

SEQ ID NO: 248239 - RNA, 1884 nt, synthetic construct
  misc_feature 1..1884: note = Description of Artificial Sequence: Synthetic coding sequence
  source 1..1884: mol_type = other RNA
atgtctaaggggcctgccgtcggcattgatctcgggaccacatactcttgcgttggcgttttccaacacgggaaagtggagatcattgctaatgaccagggaaaccggaccactccctcctacgttgctttcacagacactgaaaggttaattggagatgctgcgaaaaaccaagtggccatgaacccaacaaataccgtctttgacgctaagaggctgatcggtcgcagatttgacgatgcagtggttcagtctgacatgaagcactggccgttcatggtcgtcaacgacgctggtcggcctaaggtgcaggtcgaatacaagggcgaaacgaagagcttttaccctgaggaggtaagttcaatggtgttgacaaagatgaaggaaatcgcagaggcatacctggggaaggctaccaaagacgccgggacaattgctgggcttaacgtgttgcgcattatcaacgaacccacggcagcagccattgcctatggactggacaaaaaggtgggcgccgaacgaaatgtgctcatcttcgaccttggcggagggacctttgatgtctctattttgactatcgaagatgggatctttgaggttaaaagcaccgctggagatacccacttaggtggggaggacttcgataatcgcatggttaatcatttcatagccgaattcaaacggaagcacaaaaaagatatatcagagaataagcgtgcagtgcggcgccttcggactgcgtgcgagcgggctaaaaggacattgtcttcaagcactcaggcaagcatagagatcgactctctttacgagggaattgacttctacacatcaattaccagagcaagattcgaggaactcaatgcagatttgtttcgaggtacattggacccagtcgaaaaagccttgagagatgctaaactggataagagccaaatacacgacattgtcttggttggcggaagtacacgtatcccaaagattcagaagctcctgcaggatttttttaacggaaaagaactgaacaaatcaattaacccagacgaagccgtcgcgtatggtgctgccgtgcaggcagccattctgtccggcgataagagcgaaaacgtgcaggacctgctacttcttgacgtgacaccgttgtctcttggcatcgaaacggccggaggggttatgacagtgttgattaaaaggaacaccaccatccccactaagcagacccagacattcacaacgtactcagacaaccagcctggagtgcttatccaagtctacgaaggcgagcgggctatgaccaaggacaataatctgctgggcaagttcgaactgacagggattccccctgcacccagaggggtaccgcaaatagaagtaactttcgatatcgatgccaacggtatactgaatgtaagcgcagtcgataagtctaccgggaaggagaataaaattaccattacaaatgacaaaggccgattatcaaaggaagacattgaacggatggtgcaggaggctgaaaaatataaggcggaagacgaaaaacagagagacaaggtgagctccaagaacagcctggaatcttacgcatttaatatgaaggctacagttgaagacgagaagcttcagggcaagatcaacgacgaggacaaacagaaaattttggataagtgcaacgagatcataaattggttagataagaaccagaccgcggaaaaggaagaattcgagcatcagcagaaagaactcgagaaggtctgtaatcccattattaccaaactctaccagtccgccggaggtatgcccggagggatgcctggaggatttcctggaggtggggcgccccccagcggcggagcatcaagtgggccgactattgaagaagtggattag

SEQ ID NO: 248240 - RNA, 1941 nt, synthetic construct
  misc_feature 1..1941: note = Description of Artificial Sequence: Synthetic coding sequence
  source 1..1941: mol_type = other RNA
atgagcaagggccctgccgtcgggatcgatctcgggacaacctactcgtgcgtgggtgtgtttcaacacggaaaagttgagatcatagccaatgaccagggaaacagaactacaccctcttatgtggcttttaccgacacagaaagactcattggagatgccgccaaaaaccaagtcgccatgaatcctacaaatacagtgttcgatgctaagagattaatcggacgccggtttgatgatgccgtggtccaatccgacatgaaacactggcctttcatggtggtaaatgatgctggccggcctaaggtccaagtcgaatacaagggggaaaccaagagcttttatccggaggaagtaagtagcatggtactcacgaagatgaaggaaatcgccgaggcctacctggggaaaactgtaaccaacgccgtggtgaccgtgcccgcctatttcaatgatagtcagcggcaagcaaccaaagacgccggcaccatcgccgggctgaacgtcctgaggatcataaacgagcccacagccgcagctattgcttatggccttgacaagaaagttggcgcagagagaaacgttctgatcttcgatctaggtggcggcactttcgacgtatctattctgaccatcgaggacgggatatttgaggttaagagcacagctggcgacacacacctggggggcgaggacttcgacaatcgcatggtaaatcactttattgccgaatttaagagaaagcacaagaaagacatttcggagaacaaacgtgccgttagacgactgcggaccgcctgtgagcgcgctaaacggaccctctcctcctccacccaggctagtatcgagattgattccttgtacgaaggcattgatttttacacctccattacgcgagcaagatttgaagagctgaacgctgacctgttcagaggcacattagatcccgtggaaaaggctttgagggacgccaagctggataagagccagattcacgatatcgtcctagtgggaggctccactagaattcccaagatccaaaagctgttacaggatttttttaatggtaaagagttgaataaaagcattaatcccgatgaggctgtagcctatggagccgccgtgcaagccgccatcttatccggagataaaagcgaaaatgtgcaagatctgctcttgctcgatgtgacccctctcagcttagggatagaaacggccggcggggttatgacagtcttgatcaagagaaacacaacaatacctactaagcagacacagactttcacgacttactctgacaatcagcccggtgtgctgatccaagtatacgaaggggaaagggcaatgactaaagataacaatttactcggtaagttcgaactgacaggcattccccccgccccacgcggcgtgccacagattgaggtcacatttgacattgatgcaaacggtatcttaaacgtgtccgctgtcgacaagtcaaccggcaaggagaacaagatcaccattaccaacgacaaaggccgccttagcaaagaggacatagaaagaatggtacaagaagctgagaagtacaaggcggaggatgaaaagcagagggataaagtttcttctaaaaattctctggaaagctacgcctttaacatgaaggctacagtcgaggacgagaagcttcaggggaagatcaatgatgaagacaagcaaaagatccttgacaagtgtaatgagatcatcaactggctggataagaatcagaccgcggaaaaggaagagttcgagcatcagcagaaggagctggagaaggtttgcaatcctattattacaaagttatatcagtccgccgggggcatgccaggcggtatgcccggaggattcccggggggaggagccccgccttctggaggggccagttcagggcctacgatcgaagaggttgattag

SEQ ID NO: 248241 - RNA, 1503 nt, synthetic construct
  misc_feature 1..1503: note = Description of Artificial Sequence: Synthetic coding sequence
  source 1..1503: mol_type = other RNA
atgtccaagggaccagctgttgggatcgatctagggacaacatacagctgtgttggagttttccagcatggtaaagtggaaatcatcgcaaacgaccagggaaatagaacaacaccaagctacgtggctttcaccgataccgagaggttgatcggagacgccgctaaaaatcaggtagcaatgaaccctacgaatacagtgtttgatgcgaagaggctcattggccgacggttcgatgacgcagtcgtacagagcgatatgaaacattggccctttatggtggtgaatgatgccggtcggcccaaacataagaaggatatcagcgagaataaacgcgcagttagaagactgagaaccgcttgcgaacgggctaaacgcaccctctctagcagcacccaggctagcatcgagatagatagcctttatgaggggatcgacttttacacgagcattacccgtgccagattcgaggagctgaacgctgacctgttccgcggaaccctcgacccggttgagaaggctttgagggacgccaaactggataagagccagatacatgacatagtcctggttggtggatccacaagaatccccaaaattcagaaactgctccaggacttttttaacggcaaagaactcaacaaaagtattaaccccgacgaggctgtcgcttatggcgctgcagttcaggcagccatactgtccggagataaatcagagaacgtgcaggacctcctactgctggacgtgacacctctgagcctgggtattgagaccgctgggggggtgatgactgtacttatcaaacgtaatacaactataccgacaaagcagacacaaacttttaccacatacagtgacaatcagccaggagtactgattcaggtatatgaaggggaacgagctatgactaaggacaataatcttctgggtaaattcgagcttactggcatccccccagcacccagaggtgtgccgcagatcgaggtgactttcgatattgatgctaacggaattctgaacgtctcagcagttgacaagagtactggaaaagagaacaagatcacgataacaaacgataaaggacgactaagcaaagaagacattgaacgtatggtccaagaagcagagaagtacaaggccgaggacgaaaagcaacgcgacaaggtgtccagcaaaaactccctagagtcttacgctttcaacatgaaggcaacagtcgaagatgagaagctgcagggcaagatcaatgatgaggacaagcagaaaatcctggacaagtgtaacgagatcattaattggttggataagaatcagacagctgaaaaggaggagtttgagcatcaacagaaggaactggagaaggtctgcaatcctattattaccaagctgtatcagagtgcaggaggcatgccaggtggcatgcccgggggctttccagggggaggcgctcctccatccggtggtgctagttcagggcccactattgaagaagttgactag

SEQ ID NO: 248242 - RNA, 1233 nt, synthetic construct
  misc_feature 1..1233: note = Description of Artificial Sequence: Synthetic coding sequence
  source 1..1233: mol_type = other RNA
atggtgaaccattttatcgctgaattcaagagaaaacacaaaaaggacatcagtgaaaacaaaagagcagtgcggaggctccgaactgcgtgtgaaagagcgaaacggactctcagttcctcaacacaagcaagtattgaaattgacagtctgtacgagggtattgacttttacacttcaattacccgggcccgattcgaggagctcaatgctgacctgttccgggggacattggatccggtggaaaaggcacttcgagacgccaaactggacaaatctcagatccatgacattgtcctggtgggcgggagcacacgaatccccaagatccagaaattgctacaggacttctttaacggaaaggaactgaataaaagcattaatccagacgaagccgtcgcttacggtgccgcagtgcaagcagccatcctctcgggagacaaatctgaaaacgtccaggatctgctcctcttagacgttactcctctatctttaggtattgagaccgcaggcggagttatgaccgtcttaatcaaacggaataccacaatccctaccaaacagactcagacttttaccacttactctgacaaccagccaggcgttctaatccaggtttacgaaggtgagcgagctatgacaaaggataacaatttactgggtaaattcgaattgacgggaattccacctgccccaaggggggtcccacagattgaggttaccttcgatatcgacgctaacggaatcctcaacgtcagcgctgttgacaaaagcaccgggaaggagaataaaatcacaatcaccaacgacaaaggaaggcttagtaaggaggatattgagagaatggtgcaggaagccgagaaatacaaagccgaagacgaaaaacaaagggataaggtgtcttccaaaaattccttggaatcctacgcattcaatatgaaagccactgttgaggacgagaaactgcagggaaagatcaacgatgaggacaagcagaagatcctcgataagtgcaacgaaataattaactggttggataaaaaccagactgccgaaaaggaagaattcgagcatcaacagaaagaactggagaaagtgtgtaaccctataattacgaagctgtaccagagcgcggggggaatgccaggtggaatgcctggaggttttcctggaggtggggcacccccctcaggcggggcctcctctggccctacaatcgaagaggtggactag

SEQ ID NO: 248243 - RNA, 1941 nt, synthetic construct
  misc_feature 1..1941: note = Description of Artificial Sequence: Synthetic coding sequence
  source 1..1941: mol_type = other RNA
atgtctaaaggaccagccgtggggatcgatttaggaaccacatacagttgcgtgggggtctttcaacatggcaaggttgaaatcatagccaacgaccagggcaataggaccacccccagctacgtggccttcactgacaccgaacgcctgatcggagatgccgctaagaaccaggtagccatgaatccgacaaacaccgtgtttgatgccaaacgtctgatagggcgaaggttcgatgatgctgtggtgcagagcgacatgaagcattggccatttatggtagtgaatgatgccgggaggccaaaagtccaggttgaatataaaggcgaaacgaagtctttttaccccgaggaggtttcttctatggtactaacaaagatgaaggagatcgccgaggcttatctgggcaagacagtaacaaacgccgttgtgacagtgccagcctacttcaacgacagccaacgccaggccacaaaagatgcaggaacaatagcgggtctgaatgtactccggataatcaatgagccgacagccgccgctattgcttacggactggacaagaaggtgggggcggaaagaaatgtcctaatatttgacctcggcggcggcacattcgacgtgagcattctaaccatcgaagacgggatattcgaggttaagtcaacggccggcgatacgcatctgggaggtgaagattttgacaaccgcatggtgaatcattttattgcggaatttaaacgtaagcacaagaaagacatctctgagaataagcgcgctgttcgacggctacggacagcgtgcgaaagggccaagagaaccttgtccagttctacccaggccagtattgaaatcgatagcctttatgagggaatagacttctacacgagtattacccgagccagatttgaggagctcaacgccgacctatttaggggcacactggacccagtcgaaaaggccctacgggacgcaaagctggataagagtcaaattcacgacatcgttctggttggtggctctacacgcataccaaaaatccagaagttactgcaggatttctttaatggcaaggagctcaacaagtcaatcaatccagatgaggctgtggcgtatggagccgctgtgcaggcagctattttgagtggagacaagagtgagaatgttcaagacttattgctcctcgacgtgaccccgctttcgctgggtattgaaacagctggcggcgtgatgactgttcttatcaagcggaataccactatccctacaaagcagacgcagacattcacgacctactctgacaaccagccaggcgtcttgatccaagtctatgagggggagcgtgctatgaccaaggacaataacttgctgggaaagttcgagctgacaggaatccccccagccccaagaggcgtgccccagatagaggtgacttttgatattgacgccaatggcatactgaatgtgtctgccgtcgataaatccacaggtaaagaaaataagataaccatcactaacgataagggtcgattatctaaagaagatattgagagaatggtccaggaggccgaaaaatacaaagcagaagacgaaaagcagcgggacaaggtgtctagtaagaatagtctcgagtcttatgcatttaacatgaaagccaccgtggaggacgaaaagctgcagggcaaaatcaatgatgaagataaacagaaaatccttgataagtgtaatgaaatcatcaactggctggataaaaatcagaccgccgagaaggaggagtttgagcatcagcagaaagaattggagaaggtttgtaatccaatcattacaaaattgtatcaaagtgctggcggaatgccgggaggcatgccaggtgggttcccaggcggtggggcccctccaagtggcggcgcctcttcaggacctaccattgaagaagtcgattag

SEQ ID NO: 248244 - RNA, 483 nt, synthetic construct
  misc_feature 1..483: note = Description of Artificial Sequence: Synthetic coding sequence
  source 1..483: mol_type = other RNA
atggaaatacctgtacccgtccagccgtcttggttacgtagagcaagtgcccctctgcccggcttgagcgcccctggccgactgttcgatcagcggtttggcgagggcctgctcgaggctgagctcgccgcgctctgccctaccacccttgctccatattatttgcgcgccccttctgtggccttacctgtcgcccaagtcccaaccgatcccggacacttttcagtccttctcgatgtcaagcacttctcacccgaggagattgccgtgaaggtcgtgggagaacacgttgaagtccatgcccgccacgaggaacggccagatgaacacggctttgtggctcgagagttccaccgtaggtaccggctgccacctggtgtcgacccagctgcggtaacatctgccctatccccagaaggcgtcctcagtatccaggctgcccctgcatctgcgcaagctccaccccctgctgctgcaaagtag

SEQ ID NO: 248245 - RNA, 570 nt, synthetic construct
  misc_feature 1..570: note = Description of Artificial Sequence: Synthetic coding sequence
  source 1..570: mol_type = other RNA
atgttaggcatgataaagaactcactgttcggaagcgtagagacgtggccttggcaggtgctaagtaaaggtgataaggaagaggtcgcgtacgaagagcgcgcctgtgaaggaggcaaatttgcaaccgtggaagtgaccgacaaaccagttgacgaggcactcagagaagccatgcctaaggtagccaagtatgccggcggcaccaacgataaggggataggaatgggcatgactgtaccaattagcttcgctgtctttccaaacgaggatggatcactgcagaaaaagctgaaggtctggttccggatccccaatcagtttcagagcgacccccccgccccatccgataagagcgtgaagatcgaagaaagagaaggcatcaccgtgtacagtatgcagttcggaggctatgccaaagaggcagattatgtcgctcaagccacacgactgcgcgccgctctggaggggaccgcaacctaccgaggggacatctatttttgtacaggctacgatcctccaatgaaaccctacgggagacgcaacgagatctggctgctgaaaacctag

SEQ ID NO: 248246 - RNA, 477 nt, synthetic construct
  misc_feature 1..477: note = Description of Artificial Sequence: Synthetic coding sequence
  source 1..477: mol_type = other RNA
atgggtaagggcgatccaaaaaagccacgggggaagatgtcgtcctacgcattttttgttcaaacatgccgcgaagagcacaaaaagaagcacccagacgcctccgtgaatttctctgagttcagcaaaaagtgtagtgaaagatggaagacaatgagtgcaaaagagaaagggaagtttgaggatatggccaaggctgacaaggctagatacgagcgcgagatgaaaacatatattcctccaaaaggcgagactaagaaaaagttcaaagatccaaacgcaccaaaaagacccccgtctgcttttttcttgttttgcagtgagtacagaccaaaaatcaagggtgagcatcccggactgtccataggagacgtggcgaaaaagctgggcgaaatgtggaacaatacggccgccgacgacaaacagccctatgagaaaaaagccgccaagctgaaggagaagtacgaaaagttctag

SEQ ID NO: 248247 - RNA, 648 nt, synthetic construct
  misc_feature 1..648: note = Description of Artificial Sequence: Synthetic coding sequence
  source 1..648: mol_type = other RNA
atgggaaagggggaccctaaaaaaccaagagggaagatgtctagttatgccttttttgtccagacttgtcgcgaggaacataaaaaaaaacatcctgacgctagcgtgaatttctcagagttcagcaaaaaatgcagtgagagatggaaaacaatgtctgcaaaggagaaggggaagttcgaagatatggctaaggcggataaagcgcgctatgaaagagagatgaaaacctacatcccacctaagggcgagacgaagaagaaattcaaggaccctaacgcccccaagcgccccccgagtgccttcttcttgttctgctctgagtatcgtcctaagattaaaggagaacacccgggtctgtctatcggtgacgtagccaaaaaactaggggaaatgtggaataacactgctgctgatgacaaacaaccgtatgagaaaaaagcagctaagctgaaggaaaagtacgaaaaagatatagctgcatatagagctaagggaaagcccgatgccgccaaaaaaggtgtcgtaaaggctgaaaagtctaaaaaaaaaaaggaggaagaagaagatgaggaagatgaagaagatgaggaggaagaagaggatgaagaagatgaagatgaggaagaagacgatgatgacgaatag

SEQ ID NO: 248248 - RNA, 648 nt, synthetic construct
  misc_feature 1..648: note = Description of Artificial Sequence: Synthetic coding sequence
  source 1..648: mol_type = other RNA
atggggaagggggatccaaaaaagcccagggggaaaatgtcctcgtatgcattttttgtgcagacatgtagggaagaacataaaaaaaagcatccagatgcctctgttaacttcagcgagttcagtaagaaatgtagcgaaaggtggaaaaccatgagtgcaaaggaaaaaggaaagttcgaggacatggccaaagctgataaggcgcgctatgaaagggaaatgaagacttatataccaccaaagggagagactaaaaagaaatttaaagaccccaatgcccctaaaagaccaccaagcgcattttttcttttttgctctgagtacagacccaaaattaaaggcgagcacccagggctgtctattggtgacgtggctaagaagctgggggagatgtggaacaacaccgccgccgacgacaaacagccctatgagaagaaggccgcaaaattaaaagaaaagtacgagaaagacattgctgcttacagagccaaggggaaacctgatgccgcgaagaagggagtggtcaaggccgagaaaagcaaaaagaagaaggaagaagaggaggatgaggaagatgaagaggatgaagaggaggaagaggacgaggaggacgaagacgaggaggaggatgatgacgatgagtag

SEQ ID NO: 248249 - RNA, 294 nt, synthetic construct
  misc_feature 1..294: note = Description of Artificial Sequence: Synthetic coding sequence
  source 1..294: mol_type = other RNA
atgggcaaaggagatcccaaaaagccccgcggtaaaatgtctagctatgcgttctttgttcagacctgtagagaggagcataagaagaagcaccctgacgcgagtgtgaacttttctgagtttagcaaaaaatgttccgagcgttggaagaccatgagcgctaaggaaaaggggaagttcgaagacatggccaaagctgacaaggctcgttatgagagagagatgaagacctatataccaccaaaaggagaaacaaagaagaaatttaaggaccctaatgcaccaaaacgatag

SEQ ID NO: 248250 - RNA, 477 nt, synthetic construct
  misc_feature 1..477: note = Description of Artificial Sequence: Synthetic coding sequence
  source 1..477: mol_type = other RNA
atgggtaaaggcgatcctaaaaaaccacgcggaaagatgagtagctatgccttctttgtgcagacatgccgggaggaacataaaaagaagcatccagacgcaagcgtgaatttttcagagttctccaagaaatgctccgagcgctggaagactatgtcagctaaggagaaaggaaagtttgaagatatggcaaaggccgataaggcgagatatgaacgtgagatgaagacatacatcccacctaagggcgaaacaaaaaagaaattcaaggaccccaatgctccaaagagacccccgagcgccttctttcttttttgctcagaatacagacctaaaataaaaggtgagcaccccggtcttagcatcggtgacgtggccaaaaagctaggcgaaatgtggaataataccgccgcggatgataaacaaccatatgaaaagaaagcggcgaaactcaaagagaaatacgaaaagttctag

SEQ ID NO: 248251 - RNA, 648 nt, synthetic construct
  misc_feature 1..648: note = Description of Artificial Sequence: Synthetic coding sequence
  source 1..648: mol_type = other RNA
atgggaaagggcgatccaaagaagccgcgcggaaaaatgagtagctacgcgttcttcgtgcagacgtgcagggaagagcacaaaaagaagcaccctgacgcatcagtgaacttcagcgagttttcaaagaagtgcagcgagagatggaaaaccatgagtgcaaaggaaaaaggaaagtttgaggatatggcaaaagctgataaggcacggtacgagcgtgaaatgaagacctacatccctccaaaaggagaaactaaaaagaaatttaaggaccccaatgcaccaaaacgacccccaagcgcgtttttcctgttctgctctgaatacagacccaaaatcaaaggcgaacaccccggcctcagcatcggcgacgttgccaaaaaactgggcgagatgtggaacaatactgccgccgatgacaaacagccatacgagaagaaggcagccaagctcaaagagaaatacgaaaaggatattgccgcttatagggcgaaaggcaagcccgatgctgccaagaaaggagtcgtaaaggccgaaaaatctaagaaaaaaaaagaagaggaagaggatgaggaggacgaggaagatgaagaggaggaagaagatgaggaggatgaggatgaagaagaagatgacgacgatgaatag

SEQ ID NO: 248252 - RNA, 648 nt, synthetic construct
  misc_feature 1..648: note = Description of Artificial Sequence: Synthetic coding sequence
  source 1..648: mol_type = other RNA
atgggcaaaggggacccgaagaagccgcgggggaagatgtctagttacgccttcttcgtacagacttgcagggaagaacacaagaaaaaacatcctgatgcctctgtcaattttagtgaatttagtaaaaagtgcagtgagagatggaagacaatgtccgccaaagagaagggcaagttcgaggatatggctaaagcagacaaggccaggtacgagagagaaatgaagacctatatccctccaaagggcgagactaagaagaaatttaaggatcctaacgctcccaagaggcccccaagtgctttctttctgttctgttccgagtataggccgaaaatcaagggggagcatccagggttatcaattggagatgtggccaaaaaactcggcgagatgtggaacaacaccgccgccgacgataaacaaccgtacgaaaaaaaggccgccaagttaaaagagaagtacgagaaggatatcgcagcctaccgcgctaagggtaagccagacgctgccaagaaaggggtcgtgaaggccgaaaagtcaaaaaaaaaaaaagaggaagaagaggatgaagaggatgaggaagacgaggaggaagaggaggacgaagaggacgaagacgaggaagaggacgatgacgacgagtag

SEQ ID NO: 248253 - RNA, 489 nt, synthetic construct
  misc_feature 1..489: note = Description of Artificial Sequence: Synthetic coding sequence
  source 1..489: mol_type = other RNA
atgggtaaaggtgatcccaaaaagccccgaggaaagatgtcaagttacgctttttttgtgcaaacctgcagagaagaacacaagaaaaagcaccccgacgcctcggtgaatttcagcgagttttcaaaaaagtgctctgaacggtggaagacaatgagcgccaaggagaaagggaagtttgaggatatggctaaagccgataaagcgcgctacgaacgagagatgaagacttacatcccccctaagggagagaccaagaagaagttcaaggaccccaatgcccctaaacgtccaccttctgctttcttcctattttgcagtgaatacagaccgaagataaagggcgagcatcctgggctatctatcggagacgtggcaaagaaacttggggaaatgtggaacaacacagctgcagacgacaagcaaccctatgagaagatcttactgcacatagaactaaaagagtcgctgatgcagcagaagcgatag

SEQ ID NO: 248254 - RNA, 942 nt, synthetic construct
  misc_feature 1..942: note = Description of Artificial Sequence: Synthetic coding sequence
  source 1..942: mol_type = other RNA
atggatttcgatgaacgcggcccatgtagctcgaacatgtaccttcctagctgcacctactatgtgagtggccctgatttctctagcctgccctctttcctgccccagacgcctagctctcggccaatgacctacagctactcatcaaacttacctcaagtgcaacctgtacgagaagttacatttagggaatacgccattgagccagccaccaaatggcaccctaggggcaacctcgcacactgctactcagctgaggaactggttcacagagactgcctccaagccccctccgccgctggtgtccctggcgacgtacttgccaaaagtagtgcaaacgtataccatcatcctactcccgctgtgtcatccaacttttattcaacagtcggccgtaacggcgttttacctcaggccttcgaccagttctttgaaactgcctatggcactcccgagaacctagcaagcagcgattatccaggggacaagagtgccgagaaaggcccccccgcggctaccgcgacttccgccgccgccgctgcagcagctactggagccccagcgacctcctcctctgactcaggtggaggcggcgggtgtagagagaccgcagcagcagctgaagaaaaggaaagaaggcgtaggcccgagagttcctccagccccgagtcgtcatcgggacatacagaggataaggctggaggctccagcggtcagcgaacaagaaaaaagcggtgtccctacactaaatatcagatccgggagctcgagagagagttcttttttagtgtgtacattaacaaagagaaaagactccagctgtcccgaatgctgaatctgacggatcggcaggtgaagatatggttccaaaaccgacggatgaaagaaaagaaaatcaaccgagatcgattacaatattacagtgccaacccattactgtag

SEQ ID NO: 248255 - RNA, 729 nt, synthetic construct
  misc_feature 1..729: note = Description of Artificial Sequence: Synthetic coding sequence
  source 1..729: mol_type = other RNA
atgagcagttacttcgtgaatccgctgttcagtaaatacaaagctggagaaagtttagagcctgcgtattacgattgtagattccctcagagtgttggtcggtctcacgcactggtctacggcccaggtggctctgcccccggcttccagcatgcgagtcaccatgtccaggacttctttcatcatggaacaagtggcatctcaaacagtggctatcagcagaatccttgttcactgtcctgccatggggacgccagcaagttctacggctacgaagccctgccaaggcaatccctgtatggcgctcaacaggaggccagcgtggtgcagtaccccgattgtaagtcatccgcgaacacaaacagctccgagggacaaggtcacctgaaccagaattcgtccccctccctgatgttcccctggatgcgaccccacgcccccggaaggagatccggaagacagacttattctaggtaccagactctggagttagaaaaagaattcctgttcaacccgtatctgactcggaagcggagaatcgaagtctcacacgcgttaggactgacagagcggcaagtgaagatctggtttcagaaccggagaatgaagtggaagaaggagaataacaaagataagcttcccggtgctagggacgaagaaaaagtcgaagaagagggaaacgaagaggaggaaaaagaagaggaagagaaagaggaaaataaagattag

SEQ ID NO: 248256 - RNA, 7341 nt, synthetic construct
  misc_feature 1..7341: note = Description of Artificial Sequence: Synthetic coding sequence
  source 1..7341: mol_type = other RNA
atggacaccggcgatacagcactcgggcagaaagctacgtcacgtagcggtgagactgacaaagcctctgggcggtggagacaggagcagagcgctgtgatcaagatgtccacatttggaagccacgaggggcagcggcagccacagattgaacccgagcagatcggcaatacagccagcgcacagctgttcggctctggaaagttggccagtccaagcgaggttgtacagcaggttgctgagaagcagtatcccccacaccggccttccccctactcttgtcagcacagcttgagcttcccgcagcactcgctacctcagggggtcatgcactcaaccaagccccatcaatcactggaagggccaccctggttattcccaggtcccctgccctccgtcgcctcagaggacctgttccctttccctattcacggccattcaggcgggtacccacgcaagaagatcagcagtctcaacccagcatacagccagtattcccagaagtcaattgagcaggccgaggaagcccataagaaggagcacaaaccaaagaaaccaggaaagtacatctgtccttactgctcgagggcttgtgcgaaaccttcagtgttgaagaaacacatccgatcccacacaggcgagcgaccatacccttgcatcccatgtggtttttcctttaaaaccaagtctaacctctataagcataggaaaagtcatgcacatgcaataaaggccggacttgtgccgtttaccgaaagtgccgttagcaaactggacttggaagccggattcatcgacgtagaagcagaaattcactctgacggcgaacagtcaaccgacaccgatgaggaatcgtccctgtttgcggaggccagtgacaagatgtccccagggcccccaattcctttagacatcgccagcagagggggctaccatgggtcactggaagagtcgctgggagggcccatgaaggtccccatcctgattatccccaaatccgggatacccctcccaaatgaaagctcacagtacattggccccgacatgttacctaaccccagtctgaacaccaaagcggacgattcccacaccgtgaaacagaaacttgcccttcggctctcggagaaaaaaggccaggactctgagcctagtctgaacctgctctctccccatagcaaaggttcaacggatagtggatatttttctagatccgaatccgcggaacaacaaatttcccctccaaataccaatgccaaatcatatgaggagattatattcggcaaatattgtagactgtctccaaggaacgccctcagcgttacaaccacttcccaggaacgggccgccatgggtcgaaaaggcatcatggagcctttaccacacgtgaacaccaggctggacgtgaaaatgttcgaagacccagtgtctcaacttatcccctccaaaggcgacgttgaccctagtcagacgtctatgctaaagagcacgaagtttaatagcgagagccggcagccacagatcatcccttcctctatcaggaacgaggggaagctgtacccagctaatttccagggatcaaatcctgtcctgctcgaagcccctgtggattcttctcctctgattaggtcgaatagcgtgccaacaagctctgctactaacttgacgatcccacccagtttaaggggatcacacagttttgatgaacgaatgacaggtagcgatgacgtgttctatccaggtactgttggcattcctccgcagagaatgttacgtcgacaagccgccttcgagctgcccagcgtgcaggaaggccatgttgaggtcgaacaccacgggcgcatgctgaaagggattagctcatctagcctcaaggaaaagaagttgtcaccaggtgatagggtgggctatgactatgacgtctgccggaagccctataagaagtgggaggatagtgaaacgccaaaacaaaattacagggacatctcgtgcttgagcagccttaaacacggaggagagtatttcatggacccagttgtgccactccagggagtgccctctatgtttggaacaacatgtgagaataggaagaggcgtaaagagaagtctgtcggcgacgaagaggacaccccaatgatctgttcaagcattgtgagcactcctgtcggaatcatggcctcagactacgaccccaaactgcaaatgcaggagggggtgcgcagcgggtttgcaatggcagggcacgagaacttgtctcacggtcacaccgaaaggttcgacccgtgcaggccacagctgcagccgggatcgccaagtcttgtgagcgaggaatcaccttccgccattgatagtgacaagatgtccgacctcggcgggcgaaaaccaccaggcaatgtaattagcgtgattcaacatactaactcgctcagccggcccaacagtttcgagcggtccgaatccgctgaattggtggcctgtacgcaggataaggcaccaagccccagtgaaacatgtgacagcgagatatctgaagccccagtgtctcctgaatgggctccacctggcgacggagcagaatctggtgggaaaccaagtccctcccagcaggtacagcagcaatcctatcacacccagcctcgactcgtccgtcagcataatatccaggtccctgaaataagagtgacagaggagcctgacaaaccagagaaggaaaaagaagcgcaaagcaaggagccagagaagccagtggaagaattccaatggcctcagcggtccgaaacactaagtcagctgcctgctgagaaacttcctcctaagaagaagagattgcgactcgcagatatggagcattcatccggggagtcctcattcgagtcaacaggaactggcctttctaggtctccaagccaagaatccaacctgtcacattcctcctccttctcgatgtcttttgaacgcgaagagacttccaagctgagtgctttacctaaacaggacgaatttgggaaacactccgagtttttaactgtacctgctggatcttactcactcagcgtgcctggacaccaccaccagaaagagatgcgacgctgtagctccgaacagatgccctgcccacaccccgccgaagtgcctgaagttagaagtaaatcattcgactacggtaatctgtcacacgctcccgtgagcggggctgcagccagtacagtgtctccgtcccgcgagagaaagaagtgtttcctggtgcgacaggccagtttctccggatcccccgagatctcacagggagaggtcgggatggaccaaagcgttaagcaggagcagttagagcatcttcatgccggactgcgctcaggctggcatcacggcccccctgccgtcctcccacctctgcagcaggaagaccctggcaaacaggtcgctggaccatgccctcccctgtcttctggccccctgcatctcgcccagccacagattatgcatatggattcccaggagtctctgagaaatcccctgatacagcccacttcgtatatgacgtcaaagcacctgcctgaacagcctcacctctttccccaccaggaaacaattccattttcccctattcagaacgcgctgttccagttccagtacccaaccgtgtgtatggtccaccttcccgctcagcagcccccctggtggcaggcacatttcccccacccctttgcccaacaccctcagaaatcttacggaaagccttccttccaaaccgaaattcactcatcttaccctctggaacacgtcgcagaacatacaggaaagaaacccgccgagtatgcccacaccaaggaacagacctacccatgctactccggcgcaagcggcctgcaccccaaaaaccttctccctaagtttccctccgaccagtcctctaaaagtactgaaaccccatccgagcaggtgctgcaagaggacttcgccagcgctaatgccgggtcccttcagtccctacctgggaccgtggtccctgtgagaatccagacccatgtccctagttatggatctgtgatgtacaccagcatttcacaaatcttagggcagaacagcccggcaattgtaatttgcaaagtggacgagaacatgactcagaggaccttggttactaacgctgcaatgcaagggatcgggtttaatatcgcccaggtgcttggccagcatgcaggactcgagaagtacccaatttggaaagcaccccagacactgcccctcggactagaaagtagtattcctctttgcttgcctagcacatccgacagtgtcgctaccctcggtggctcgaagcgcatgctcagccctgcctcttcccttgagctttttatggaaaccaagcagcagaaacgtgtcaaggaagagaaaatgtacggacagatcgttgaggagctttctgctgtggaactgactaacagcgacataaagaaggacctgtcacgcccacagaaacctcagctcgttaggcagggctgtgcatctgagcctaaggatgggttgcagtccggcagtagctccttctcctcacttagcccaagctctagccaggactacccgtcagtgtccccttccagtagagagcccttcctgccatcaaaggagatgttgtccggatcgcgtgcccctttacccggccagaaatcttccgggcccagtgagtccaaggaatcaagcgatgagttggacatcgacgagacagcatcagacatgtctatgtccccacaatcatcttcactgccagccggcgacggtcagctggaagaagaaggcaaaggacacaaacgccccgtcggaatgctcgtacgcatggcatctgctccgagcggcaacgtcgccgatagtactcttctgcttactgatatggccgactttcaacaaatcctccagtttccctccctccgcactacaaccacggtcagttggtgctttcttaactacaccaagcccaactatgtgcagcaggcgactttcaagagttcagtctatgctagctggtgcattagcagctgcaatccgaacccaagtgggctgaatacgaagactacccttgcgttgctccgctctaagcaaaaaattacagctgagatttacacactggccgcgatgcatagacccggcacaggcaagttaacatcatcaagcgcctggaaacaattcactcagatgaagcccgacgcttcattcctcttcggctcaaagctcgagcgtaaactggtggggaatattttgaaggaacgcggtaagggcgacatccatggtgataaagacatcggatccaagcagaccgagccgatccggattaagatctttgaagggggttataaatccaatgaggactatgtgtacgtgcgaggaagggggcggggcaagtacatctgcgaggaatgtggaatcagatgtaagaagccctccatgttaaaaaaacatatcaggacacatactgacgtccggccatacgtgtgcaaactttgtaattttgcattcaagacaaaaggaaacctgacaaagcatatgaagagcaaggcacatatgaaaaaatgcctggaactcggggtatccatgacttcagtcgatgacaccgagaccgaggaggcagagaatctagaagacttgcacaaggcagctgagaaacattccatgagctctattagtactgaccatcaattttctgacgctgaagagtctgacggggaggatggagacgataacgatgatgacgatgaagatgaggatgattttgatgaccagggggacctcaccccaaaaaccaggagccgaagtacctcgcctcagcctccccgctttagcagtttgcctgtcaatgtgggagccgtcccccacggcgtgcccagcgattcatcactgggccattcttctttaataagctatctcgtgactctgccatccattagagttacccagctcatgacccccagtgatagctgcgaagatacccagatgacagagtaccaacgactgtttcagtccaagagcacagatagcgagcccgacaaagatcgccttgacataccaagctgcatggacgaggagtgcatgctgccatccgagccctccagctcgccccgcgacttctctccttctagccaccatagcagtccagggtatgacagctccccatgtagagataactctccaaagcggtatctaatcccaaagggcgaccttagtcctagaaggcatctgagccctaggcgagacctttcccctatgcgacatttgtctccaaggaaggaagcagctcttcgtcgcgaaatgtctcagagggacgtgtctcctagacgccatctttctccgaggcgccctgtcagccctggcaaggatatcacagctaggcgcgacttatcaccaagaagggaacgtaggtatatgacaactatccgtgcgccaagtcccagaagggctttatatcataacccaccgctctccatgggacaatatcttcaggcagaacctatagtgttaggaccccccaacctacgacgcggactgcctcaagtgccctacttcagcctttatggagaccaggagggtgcatacgaacaccccgggtctagtctgtttccagagggcccgaacgactatgtgtttagtcacctcccgctacatagtcaacagcaggtccgggctccaataccaatggtccctgtgggaggaatccagatggtgcactctatgcctccagctctcagctccctccatccgagcccaacccttcctcttccaatggaaggtttcgaggaaaaaaagggcgccagtggcgaatctttctcaaaagatccttatgtccttagtaagcaacacgagaagagagggccacatgcgcttcagagttcgggccctcctagtacaccctcaagtcctcggctcctaatgaaacaatctacttctgaggattctctgaacgctacggagcgcgagcaagaagagaacatccagacttgcaccaaggcaatcgcaagccttaggatcgccacagaggaggctgccctgctgggcccggatcagcccgcaagagttcaagagccacatcaaaacccgttaggatccgctcacgttagcattcgccacttcagcaggcctgagccaggtcagccctgcacttcagccactcacccagatctccatgacggagaaaaggacaacttcggcacatcccaaaccccgttagcacacagtacattttattccaagagctgcgtcgacgataagcaattggattttcattcctctaaagagttaagttctagcaccgaggaatccaaggatccttcctcagagaagagccagctccactag

SEQ ID NO: 248257 - RNA, 786 nt, synthetic construct
  misc_feature 1..786: note = Description of Artificial Sequence: Synthetic coding sequence
  source 1..786: mol_type = other RNA
atggccgccgcatgtaggtcagtaaagggcctagtcgccgtgattacaggaggtgcaagcggacttggtctcgccacggctgaaaggcttgtaggtcaaggggcttccgctgtcctgctagacctcccgaattctggcggggaggcgcaggctaaaaaactgggaaacaattgtgtcttcgctcctgcagacgtaacatccgaaaaggacgtccaaactgctctcgctttagccaagggcaagtttggaagagtggacgtggccgtgaattgcgccggaatcgcagttgccagtaaaacttataacctgaaaaaaggacagactcacaccctggaggatttccagcgcgttcttgacgtgaatttgatgggcacatttaacgtcatcaggctcgtggcaggagaaatgggtcagaacgaaccggatcagggaggccagaggggggtgatcattaacaccgcttccgttgctgcgttcgaaggacaggtgggccaggccgcttattctgcctctaagggaggtattgtaggaatgaccctcccaattgcacgcgacctggctccgatcggaatcagggtcatgacaatcgctcctggccttttcggtacgcctctcctcacctctttaccagaaaaagtatgtaacttccttgcctcacaagtccccttcccctcccgtctgggagaccctgccgaatacgcccatctggtccaggcaatcattgagaatccatttcttaacggtgaagtgatacgactagatggcgccatcagaatgcagccctag

SEQ ID NO: 248258 - RNA, 792 nt, synthetic construct
  misc_feature 1..792: note = Description of Artificial Sequence: Synthetic coding sequence
  source 1..792: mol_type = other RNA
atgaagggcgggttcaccggcggagacgaataccagaaacatttccttcctcgggactacctcgccacttactactcgtttgacggctccccctcccccgaagcggagatgctgaaattcaatctcgaatgtctccacaagacctttggaccaggaggccttcaaggggatacactcatcgacattggctccggtccaacgatttaccaagtactggcagcctgtgacagtttccaggatatcaccctgtccgatttcacagaccggaatcgtgaagagttggagaaatggctgaaaaaggaacctggcgcatacgactggacacccgccgtgaagtttgcttgcgaactcgagggaaattcgggccgatgggaggaaaaagaagagaagttgcgtgccgccgtgaagagagttcttaagtgtgacgttcatctgggaaatcctctcgcacccgccgtcctcccactagcagattgcgttcttaccctacttgccatggagtgcgcatgctgctcccttgacgcttatcgggccgctctttgtaatcttgcttccttgttaaagcctggcggacatctggtaacaaccgtgaccctgcgtctgccaagctacatggtggggaagagggaattttcatgtgtggccctcgaaaaagaggaagtcgagcaggccgtactggacgcaggatttgatattgaacagctgctgcatagtccccagtcttacagcgttacaaacgcagctaacaacggggtatgtttcatagtcgctcgcaaaaagcccggcccctag

SEQ ID NO: 248259 - RNA, 1386 nt, synthetic construct
  misc_feature 1..1386: note = Description of Artificial Sequence: Synthetic coding sequence
  source 1..1386: mol_type = other RNA
atgtggcaactaacttcattactcctgtttgtcgcaacatggggaatatctggcacccccgcaccactggactcagtcttttcatcttccgagcgtgcgcaccaagttctgaggattagaaaaagagcaaacagtttcctcgaagaactgaggcacagttccctcgaacgggagtgcattgaggagatatgcgattttgaagaggctaaagaaatcttccagaacgttgacgacacacttgctttttggagtaaacacgtcgacggtgaccaatgcttggttctcccattagagcatccctgcgcgtccctgtgttgcggacacggcacctgtatcgacggaataggcagtttctcgtgtgattgccgttcgggttgggaaggccgcttctgtcaacgcgaggtgagctttctaaactgcagcctcgataatggcgggtgtactcactactgcctcgaagaggtcggatggcgacgctgctcttgcgcaccaggctataagcttggcgacgaccttctgcagtgccatccagcggtaaaattcccctgtggacgtccttggaagcgtatggaaaaaaaacggagccacctcaaacgggatacagaggatcaagaagatcaggtggacccacgcttaattgacgggaaaatgaccaggagaggcgactctccttggcaggtggtgttgctggattccaagaagaagctggcttgtggagcggtcctcatccatccatcatgggtgctgacagctgctcactgtatggacgaatcaaagaaacttttggtgaggctgggggaatatgatctgaggagatgggaaaaatgggaactggatctggacattaaagaggtattcgtgcaccccaattatagtaagtctacaacggacaacgacatagctcttttgcacctcgcccagccagctactcttagccaaacgatcgttcctatttgtcttcctgactcaggcctggcggaaagggagctaaaccaagcgggtcaagaaaccttagttaccggatggggctaccattcctctagggaaaaagaagccaagagaaacaggacttttgtgctgaacttcatcaaaatcccagtggtaccccacaacgagtgttctgaggtgatgtcaaatatggtgagtgaaaatatgttgtgtgctggaatcctgggagatagacaagacgcatgcgaaggcgattcagggggacccatggtggcatcattccatgggacctggtttctcgtgggcctggtctcttggggagaaggttgcggcctgctgcataattatggcgtctacaccaaggtgtcacgatacctagactggatccatggccacatacgcgataaagaagcaccgcaaaagagttgggcaccatag

SEQ ID NO: 248260 - RNA, 2934 nt, synthetic construct
  misc_feature 1..2934: note = Description of Artificial Sequence: Synthetic coding sequence
  source 1..2934: mol_type = other RNA
atgactgcccgcgagcattcaccccggcacggcgctagggctcgggcaatgcagcgcgcgtccacaatcgacgtagctgctgacatgctgggcctcagtctggcggggaatattcaggatcccgatgagcccattcttgaattcagcttggcatgcagcgagcttcacacaccttctttggatcggaaaccaaacagtttcgtggccgtctctgtgacgaccccacctcaagctttttggacaaaacacgcccagactgaaatcatagagggtaccaacaaccccatctttctgagtagcattgcattctttcaggactccctcatcaaccagatgacacaggtcaaactgtcagtgtacgatgtcaaggatcgcagccagggaacaatgtacctgctgggcagtggaacctttatagtgaaggacctcctgcaggatcgacaccaccggctccatctcaccctgcggtctgctgagtctgatcgcgttgggaatattacggtgatcggttggcaaatggaagagaagtcagatcagcgccccccagtcacaaggtcagttgataccgttaacgggcgcatggtccttccagtggacgagtcccttaccgaagcactgggcatcaggtctaagtatgcatcactcaggaaagacaccctgttgaagagcgtgttcggcggcgccatctgtaggatgtatcgtttccctacgacggacggcaaccatctccgcatcctcgagcaaatggcagaatctgtgctttccttgcacgtgcctcgccagtttgtaaaattgttgctggaggaagatgcagccagggtctgtgaactcgaggaactgggcgaactgagtccctgctgggaaagcttgagacggcagatagtgacccagtaccaaactatcattttaacctatcaagaaaacctgacggaccttcatcagtatagggggcccagctttaaggccagtagcttaaaggccgacaaaaaattagagtttgtacctacaaatctccatatccaacgtatgagagtgcaggatgacggcggcagcgatcagaactacgatatcgtgactataggtgcacccgccgctcattgtcaaggcttcaaatcggggggacttaggaaaaaactgcacaagtttgaagaaaccaagaagcatttcgaggaatgctgtactagctccggatgtcagagcatcatttatatacctcaagacgtcgtgagagctaaggagattatcgcacaaatcaacaccctcaaaactcaggtctcttattacgctgaaagactgtctagggcagccaaagatagatcagccaccgggctcgaacgtacccttgccatccttgcagataaaactaggcagttagtgaccgtttgcgattgcaagcttcttgcgaactccattcacgggctcaacgctgctaggcccgactacatcgcatccaaagcttcccctacctccacggaggaggaacaggtgatgcttcgcaacgatcaagacaccctcatggcccgctggacaggccgtaacagtcgcagttctctacaagttgactggcacgaagaggaatgggagaaggtttggttaaacgtggacaaatccttggaatgtatcatccagagagtggacaaattactacaaaaggagagattgcacggggaagggtgcgaggatgtgttcccatgtgccggtagttgtacttctaaaaagggcaatcctgatagccatgcatattggatcagacctgaagacccgttctgcgacgtcccatcatctccctgcccctcaacaatgccatcgactgcgtgtcatccacatctgacaactcattgttcgcccccgcctgaggagtcttctcccggagaatggtccgaagcactgtacccccttttaactacactcaccgattgcgttgcgatgatgagcgataaagctaaaaaagcaatggtattcttactcatgcaggactccgctccaacaatcgctacatacctaagtctccagtataggcgggacgtggtgttttgtcagacactgacagctctcatatgtggttttatcattaaattgagaaattgtcttcacgatgatggcttcttgcgccagttgtacacaatcggattgctggcacagttcgaatcactcctgagtacctatggagaggaactggctatgctggaagacatgtcgctgggcataatggaccttagaaatgtcacctttaaagttacccaagcaacctcatcagcttcagccgacatgctgcccgtcattacaggcaaccgggatggcttcaatgttcgagtgcctctgccagggcctttgtttgatgcactgcctcgcgagattcagagcggtatgcttctgcgggtccagccggtgctatttaatgtcggtattaacgagcaacagacattggccgagaggttcggcgacacctcactacaggaggtgatcaatgttgagtccctcgtgagattgaacagttatttcgaacagtttaaggaggtcctgcccgaggattgcctgcctcgaagtcggagtcaaacctgcttgccggagctgctgcgattcctgggacagaacgtacacgctcggaagaataagaatgttgatatactgtggcaggccgccgaaatctgtagaagactgaacggtgtgcggttcacaagctgcaagagtgcaaaagaccggactgccatgtccgtgacactggaacagtgcttgattctacagcatgaacatggcatggcaccccaggttttcacacaggccctcgaatgtatgcgaagcgagggctgcaggcgggaaaacacaatgaaaaatgttggatctcggaaatatgccttcaattcactccagttgaaagcctttcccaaacactatcgacccccagaggggacgtacggcaaggttgaaacatag

SEQ ID NO: 248261 - RNA, 3201 nt, synthetic construct
  misc_feature 1..3201: note = Description of Artificial Sequence: Synthetic coding sequence
  source 1..3201: mol_type = other RNA
atgggccccggccctagtcgtgccccacgggcccccaggctgatgctgtgtgcacttgccctaatggtcgccgcaggaggttgtgtcgtgagcgccttcaacctggacacaagattcctcgtggtgaaggaagccggaaatcctgggtctctgttcggttacagcgtggccctccacagacagacggagcgacaacagcggtatttgctcctcgccggggcgccacgcgagcttgctgtgcccgatgggtacaccaatcgaacaggagctgtttacttatgccctctgacagcgcacaaagacgactgtgaaaggatgaacattaccgttaagaacgacccaggccaccacatcatagaggacatgtggctgggcgttactgtggcttcccagggacctgccgggcgagtgttagtttgtgcacatcggtacactcaggtgctgtggagcggatctgaggaccagaggcgaatggtggggaaatgttacgtgcgtgggaatgatctagagttggatagcagtgatgattggcagacctaccacaatgagatgtgcaatagtaatacagactacctagagaccgggatgtgccagctcggtacttcaggggggtttacacaaaacacggtctactttggggccccgggcgcgtacaattggaaaggtaattcctacatgattcaacggaaagagtgggacctgagtgagtatagctataaggatccagaggaccaagggaacctgtacattggatatacaatgcaggttggttcattcatactacatcccaagaatataacgatcgttaccggtgcacctcgacaccgtcatatgggtgctgtgtttctactgtcgcaggaagctggaggtgacctccggcgacggcaggtactggaggggtcccaggtgggggcctatttcgggtcagctatcgcccttgccgatttaaataacgacggatggcaggatctgcttgtgggagccccatactacttcgaacggaaggaggaagtcggcggcgctatctacgtgttcatgaaccaggcaggcacaagttttccagcccacccctcgctgctgctgcacggaccaagcgggtccgcgttcggattaagcgtggcctccataggtgacattaatcaagatggcttccaagatatcgccgtcggggccccctttgagggcctgggcaaagtctacatctaccacagctcgagcaagggtctcttgcggcaaccacaacaggtaatacacggagagaaactgggattgcccgggctcgccactttcggatacagtttatccgggcagatggacgttgatgagaacttctacccagatctactggtgggttctctgtccgaccatatcgtcctgctgagggcaagacccgtcattaatatagtccataaaactctggtgccccggcctgcagtgctagatcctgctctctgtaccgccacctcatgtgtgcaggtggaattgtgcttcgcctacaaccagtccgcagggaatcctaattatagacggaatatcacattggcctatacccttgaggccgatagagacaggcgaccaccgcgactccgcttcgccggctcagaatcagccgtctttcacggattcttctccatgcctgaaatgcgctgtcagaagctggaacttctgctcatggacaacctacgtgacaagctgagacccataattatatcgatgaattattctcttcctctcaggatgccggaccgtccacggttagggcttagaagcctggacgcctatcccatcctcaaccaagcccaagccctcgaaaatcataccgaagtgcagttccagaaggagtgcggtccagataacaagtgtgaatcaaacttacagatgagggcggcatttgtctccgagcaacagcagaaactgagcagacttcaatacagccgcgacgtgcgcaagctgcttcttagcataaacgtgaccaatacccgcacttccgagcgttctggcgaggatgcccatgaggcgctcctgacactggtcgttccccctgccctacttctgtccagcgtgcgtcccccgggtgcatgtcaggctaacgagaccatattctgtgaactgggcaaccccttcaagcgcaatcagagaatggaactcctaatcgcatttgaagtgataggggtcaccttacacacacgagatctgcaggtccagttgcagctaagtacctcttcacaccaagataatctctggcctatgatcctgacactcttagtcgactataccctccagaccagcttgagcatggtgaaccatagacttcagagtttttttggcggcaccgtcatgggcgaaagcggtatgaagactgtggaggatgtcggcagtcctctcaaatacgagtttcaggtaggacccatgggtgagggattggttggtctcggcaccctcgtgctcgggcttgagtggccctatgaagtgtcaaatggcaagtggttgctgtatcccaccgaaataacagttcacggcaatggatcatggccctgcaggccccccggagacctcatcaaccctctgaatttaaccctgagcgacccaggggaccggccatcttccccacagcgccggcgcaggcaactggatcccgggggggggcagggaccaccacccgtgaccttagccgccgctaaaaaagcgaaaagtgaaaccgttttgacatgtgctactggaagggctcactgcgtttggcttgaatgcccaatccctgatgcccctgttgtgacaaacgttacagtgaaagctagggtgtggaattccacttttattgaggattatcgagatttcgaccgcgtgcgagttaacggatgggctaccctcttcctccgaacaagcatcccaacgattaatatggagaacaagacaacatggtttagcgttgatattgattctgagctggtggaggaattgccggctgagattgaactgtggttagtacttgtggccgtcggagcgggtctgctactattgggacttatcatcttattgctttggaaatgcgacttctttaagcgcacacgctactatcagattatgccaaagtatcatgctgttcgcattcgagaagaagagaggtatccaccccctggatccacactgcccacaaagaaacattgggtgacgtcctggcagactcgggaccagtactactag

SEQ ID NO: 248262 - RNA, 1644 nt, synthetic construct
  misc_feature 1..1644: note = Description of Artificial Sequence: Synthetic coding sequence
  source 1..1644: mol_type = other RNA
atggctaccatggtcccatccgtcctgtggcccagagcctgctggaccctgttagtatgctgcctgctgactcccggagttcagggtcaagaattccttctccgggttgagccccaaaaccctgtcctctcagctggaggctcattgttcgtgaactgttccactgattgcccctcttcagagaaaatcgccctcgaaactagcctcagcaaagagctggtagcctccggaatgggctgggccgcgttcaatttgagtaacgtcactgggaacagcagaattctgtgtagcgtgtactgtaacggcagtcagatcacaggatcgtccaacataaccgtgtaccggctcccagagcgcgtggagcttgctccactgcccccttggcagcctgtagggcaaaatttcacccttcggtgtcaggtggaagatgggtcaccacgcacctctctcactgtggtcctgctgaggtgggaggaggagctttcccgacagccagccgtggaggagcccgccgaggtgaccgcaactgtgctggcttcaagagatgatcacggcgcccccttctcatgtagaacggaactggatatgcaacctcagggtctaggtttgtttgttaatacttccgccccgcgtcagctgagaacattcgtcctacctgttacgccaccgcgccttgtggctccacggtttctagaagtggagacgtcctggcccgtggactgcaccttagacggattgttccccgccagcgaggcacaggtctacctagcattaggagatcagatgttaaacgcaactgtgatgaatcacggcgacactctgactgcaacagctacagccaccgcaagagccgatcaggagggagccagagagattgtctgcaacgttaccctggggggggagaggagagaggcgagagaaaatctgacagtcttttcttttctgggtccaatagtgaacctgtcggagccaacagcacatgagggcagtaccgtaactgtatcctgtatggccggcgcgcgggtgcaggtcactctggatggggtgccagccgccgcccccggccagccagcccaactccaactgaacgccaccgaaagcgacgatggacgatccttcttctgctcagccacattggaggttgatggagaatttctgcacaggaactctagtgtgcagctgcgcgtgctgtatggtcctaagatcgatcgtgctacctgtccccagcatctaaaatggaaggacaaaacccgacacgtgttacagtgtcaagccaggggcaacccctatcctgagcttaggtgccttaaagagggaagcagtagagaagtcccagtgggaattcctttcttcgtgaacgtgactcataacgggacttatcagtgccaggcgtcatcttctcgggggaaatacacactcgtggttgttatggacattgaagcagggagctctcattttgtacctgtatttgtggcggtgttgcttacgttgggggttgtgacaatcgtacttgcactcatgtacgtcttccgggaacatcagcggagtggcagctatcatgttcgagaggaatctacctatctgcctcttactagtatgcagcctacagaggcgatgggggaggagccttccagagccgaatag

SEQ ID NO: 248263 - RNA, 1356 nt, synthetic construct
  misc_feature 1..1356: note = Description of Artificial Sequence: Synthetic coding sequence
  source 1..1356: mol_type = other RNA
atgccaaaaaacaaaaaacggaatacaccccatagaggttctagtgcggggggcggaggctctggggcagctgccgccacggccgccacagccggcgggcagcacagaaacgtccagccgttttctgacgaggacgcatccatagagactatgtcacactgcagtgggtacagcgatccctcctctttcgccgaagacggacctgaggtgctcgacgaagaggggactcaggaagatctggagtacaagctaaagggcttaattgacctgacactggacaagtccgccaagacccgacaggccgcgctggaaggaatcaagaacgcactcgctagtaagatgctgtacgaattcattctcgaacgccggatgactctcacagattctattgaaagatgtctgaagaaaggtaaaagcgacgaacaaagggcagccgcagctcttgcctcagtcctgtgcattcagttaggtcctggcatcgaaagtgaggaaatcttgaagacgctcgggccgatcctgaagaaaattatatgtgatggatccgcatccatgcaggcccgtcagacttgcgccacttgctttggtgtgtgctgctttatagctacggatgatatcactgagttatatagcaccctggagtgcctggagaacatctttaccaaatcttacttaaaggagaaggataccaccgtgatctgttctactccgaatacggtcctccatatctctagccttctcgcctggactctgctgctcacaatatgccccattaacgaggtcaagaaaaaattagaaatgcattttcacaaactaccctctctgctgagctgtgatgatgtcaacatgaggatagccgccggcgagtctctcgcactgctgtttgaattagctcgcggcattgaatctgactttttctatgaggacatggaatctctgacacagatgttgcgagccttggcaaccgacggaaacaagcaccgagctaaagtggataaacggaagcagaggagcgtgtttcgagacgtgcttcgcgcagtggaagaaagggatttccccacagaaacaattaaattcggaccagaaaggatgtacattgattgctgggtcaaaaaacacacatacgatacattcaaagaagtgctgggctccggaatgcagtatcaccttcagtctaacgagtttcttagaaatgttttcgagttaggccctcccgtgatgttggacgctgctacgttaaagacaatgaaaattagcagatttgaacgccatctctacaattctgccgctttcaaagcgaggaccaaggcccgctctaagtgccgggacaagagagccgacgttggcgaattcttttag

SEQ ID NO: 248264 - RNA, 1713 nt, synthetic construct
  misc_feature 1..1713: note = Description of Artificial Sequence: Synthetic coding sequence
  source 1..1713: mol_type = other RNA
atgacgcttctgtggtgtgtggtcagcctgtacttctatggtatcctgcagtctgatgcatcagaacgctgtgacgactggggactggataccatgcgccagatacaggtatttgaagatgaacccgctaggatcaaatgcccattattcgaacactttcttaaatttaattatagcactgctcactcagccggactcactctcatttggtactggacccgacaggatcgcgacctcgaagaaccaataaattttagattgcctgagaacagaatatctaaagagaaggatgtattatggtttaggccaaccctgctcaacgatactggcaattacacttgtatgttacgcaacaccacttattgctctaaagtagccttccccctggaagtggtccaaaaagattcatgctttaattcacccatgaaactccccgtgcacaagctctacatcgaatacgggatacagcgcattacttgcccaaatgtggacgggtactttccctcaagtgtgaaaccaaccatcacatggtatatggggtgctacaaaattcaaaattttaataatgtgatcccggaaggtatgaatctgtcatttctgattgccctgataagcaataacgggaactatacttgcgttgttacttatccggagaatggcaggacttttcatctcactagaacactgacggtgaaagtggtcggatccccaaagaacgctgtccctcccgtaatacatagccccaatgaccacgtggtttacgagaaagagccaggcgaagaactgctgattccttgtactgtgtattttagctttttgatggattcccggaatgaggtatggtggaccatagacggtaaaaaacctgatgacatcacaattgatgtgactatcaacgaatcaatttcccactctcgtacagaagacgagacacgcacccagatcctctcaatcaagaaggtaacctctgaagaccttaagcggagctatgtgtgccatgcaagaagtgctaagggtgaggtcgctaaggctgctaaggtcaaacagaaggtgcctgctccgaggtatacggtagagctcgcctgcggctttggggccacagtgctgttggtcgtgatcttaattgtcgtctaccatgtgtactggcttgaaatggtcttattttatagggctcacttcggcaccgatgaaaccattctcgatggtaaagagtacgacatttatgtaagctacgctcgtaacgctgaggaggaagagtttgtgctactgacgctgaggggcgtgctggagaatgaattcggttataagctttgtatctttgatagagattcacttccagggggaatcgttacagatgaaaccctgtcgtttatccagaagagcagacgacttctggtcgttcttagtcctaattacgtgttgcagggaacacaggccctgctagagctgaaagccggattagagaatatggcaagccgtggcaatatcaatgtcattttggtgcaatacaaagcggtgaaagagactaaggtcaaggagttgaagcgcgccaaaacggtattaactgtgataaaatggaaaggtgagaagtccaagtatcctcaggggaggttctggaagcaactgcaagttgccatgcccgtaaagaaatctcctcgaagatcttcatctgacgagcaagggctttcttattcatcactgaaaaacgtttag

SEQ ID NO: 248265 - RNA, 987 nt, synthetic construct
  misc_feature 1..987: note = Description of Artificial Sequence: Synthetic coding sequence
  source 1..987: mol_type = other RNA
atgggattctggattctggcaatcctgaccattttaatgtatagcaccgccgccaaattctctaagcagtcgtgggggctggaaaacgaggccctaattgtccggtgccctcgacagggcaagccctcctacactgtagactggtattacagccaaacaaacaagagtatacctacacaggaaagaaacagggtgttcgcgtcgggtcagcttctgaagttccttccagccgccgtggccgattctggcatctacacctgcattgttcgctcaccaacattcaaccgtacaggttacgcaaatgtgacaatctataagaaacaaagtgattgcaacgttcccgattatctgatgtatagcactgtctcaggttccgagaaaaactccaaaatatactgtccgaccattgatctctacaactggaccgccccactggaatggttcaaaaactgtcaggctctgcaaggctcacgttatcgagctcataagtcctttctggtaatcgacaacgttatgacagaagacgccggtgattacacgtgcaagtttatccacaatgagaatggtgctaactactccgtaaccgctacaagatccttcaccgtgaaagatgaacagggcttcagtctgttccccgttatcggtgctcctgcccaaaacgaaataaaggaggttgagattggcaaaaacgccaatttaacctgtagcgcctgcttcggtaaagggacacaattcttagctgccgtgctctggcaactcaatgggactaagattaccgattttggcgaacccagaattcaacaagaggaggggcaaaatcagtctttctctaacggtctggcttgcttggacatggtattacggatcgccgatgtgaaagaggaggatctgttactccagtatgactgccttgcccttaatttgcatggactgagacgtcacacggttaggctgtcccgcaagaacccaagcaaagagtgcttttag

SEQ ID NO: 248266 - RNA, 780 nt, synthetic construct
  misc_feature 1..780: note = Description of Artificial Sequence: Synthetic coding sequence
  source 1..780: mol_type = other RNA
atgggcttttggattttggccatactcacaattcttatgtatagcacggccgccaagttctctaagcaaagctggggattggaaaacgaagctctcattgtccgatgcccacgtcagggcaagccctcttacacagtggactggtattattctcagacaaataagtccatccctacgcaagagcgaaatagagtctttgcctccggtcaacttctaaaattcctgccagctgccgtcgccgatagcggaatatacacatgtattgtcaggagccctacatttaaccgtactgggtatgccaacgtaactatctacaagaagcaatccgactgtaacgtgcctgattatctgatgtattctaccgtttcgggttccgagaagaattcaaagatatactgccctactattgatctgtacaattggacagcacctttggaatggtttaagaactgccaagcactgcaagggtcacgttacagggcccacaagtctttcctggtcattgataacgtaatgactgaagatgccggagactatacctgcaagttcatccataatgagaatggtgcaaactactcagttacagccacccgatcattcactgtgaaagtatggtgtcagtcattttgcaaactcaagaagtccttaattttctctaacactcactggatccagagcctgatgagaggattcgtgatggtatactacggcgtgcacaagtgctgcagggtcgtgtttaacctgtgcctgcaatacttccaacaccatcagtggccgtag

SEQ ID NO: 248267 - RNA, 636 nt, synthetic construct
  misc_feature 1..636: note = Description of Artificial Sequence: Synthetic coding sequence
  source 1..636: mol_type = other RNA
atgtacagtacagtatctggctctgagaagaatagcaagatctactgcccaaccatcgatctttataattggacagcgcctcttgaatggtttaagaactgtcaggcattacaagggtctaggtaccgagcccataaatcatttttggtgattgataatgtaatgacggaagacgctggggattatacctgtaagttcatccacaacgaaaacggggccaactattcggtgaccgctaccagatctttcacagtgaaagatgaacagggattctcactgtttcccgtaatcggagcgcccgctcagaatgaaattaaggaggtggaaattggcaaaaatgcaaacctgacctgtagtgcctgcttcggaaaaggcacccaatttttagcagccgttctttggcagttaaatggcacaaaaattactgattttggtgaacctagaattcagcaggaagagggtcaaaaccagtctttcagcaacggtttagcttgcttggatatggtgctgcgcatcgccgatgtaaaagaagaagatttgctcctccaatacgactgcctggccctaaatctgcacggacttcgcagacatactgtgcgacttagcagaaagaatccttccaaagaatgcttctag

SEQ ID NO: 248268 - RNA, 945 nt, synthetic construct
  misc_feature 1..945: note = Description of Artificial Sequence: Synthetic coding sequence
  source 1..945: mol_type = other RNA
atggggttttggatccttgccatcttgacaattcttatgtatagcaccgctgctaaattcagcaaacagtcatggggtttagagaatgaagcactaattgttagatgccctcggcagggcaaaccttcgtatactgtggattggtattactcccagaccaataaatccatccctactcaagagagaaacagagtgttcgcctctggtcagctccttaaattcctcccagctgcagtggccgattctgggatatatacatgtattgttcgttcaccaactttcaatcgaacaggatacgctaacgtgacaatttataagaaacaatccgactgtaacgtgccggactacctgatgtacagcacggtatctggatcagaaaaaaatagcaagatctattgtccaacaattgacctgtataattggacagccccactcgagtggttcaagaattgtcaagccctgcaggggtctcgatatagggcccacaaatctttcctcgtgatcgataatgtgatgaccgaagacgcgggcgactatacatgtaagtttatccataacgagaatggggctaactatagcgtgacagctacccgatcatttactgtaaaagatgagcaaggcttttctctctttcctgtaatcggggcacccgcacaaaacgagattaaggaggtggaaataggtactcagttcttggcagccgtgttgtggcagctgaatggcacaaaaataacagacttcggagaaccgcgaatccagcaagaggagggccagaatcagagtttttccaatgggttggcgtgcctggacatggtgctacgaatcgccgacgtgaaggaagaggatctcctgttacagtacgactgcctggccctcaatttacacggtctacggaggcatacagtgcgtctgagtcggaagaacccttccaaggaatgcttttag

SEQ ID NO: 248269 - RNA, 117 nt, synthetic construct
  misc_feature 1..117: note = Description of Artificial Sequence: Synthetic coding sequence
  source 1..117: mol_type = other RNA
atgggattttggatactcgccatcttaactattcttatgtattctaccgccgctaaattcagtaagcagtcgtggggactcgaaaacgaagccctcatcgtgagatgccctcgctag

SEQ ID NO: 248270 - RNA, 300 nt, synthetic construct
  misc_feature 1..300: note = Description of Artificial Sequence: Synthetic coding sequence
  source 1..300: mol_type = other RNA
atgcaacctagagtactactagtggtggccctgctcgctctcctggcctctgcgcgcgcctccgaagcagaggacgccagcctcttgtctttcatgcaagggtacatgaagcacgcgaccaagacagccaaggatgccctctctagtgtccaagaaagccaagtagcacagcaggccagaggatgggtgacagacgggttttcatcacttaaagactattggtcaactgtaaaagataaattcagcgagttttgggatctcgaccccgaggtgcgcccaactagtgctgtcgccgcctag

SEQ ID NO: 248271 - RNA, 1671 nt, synthetic construct
  misc_feature 1..1671: note = Description of Artificial Sequence: Synthetic coding sequence
  source 1..1671: mol_type = other RNA
atgggattctggatactcgctattctgacaattctgatgtatagcaccgccgctaaattctcgaaacagtcttggggcctggagaatgaagccctaatcgtgcgctgtccaaggcaaggtaagccatcatacaccgtggactggtactacagccaaaccaataaaagcattcctactcaggagcgcaatagagtatttgcatctggccagcttttaaagttcctgccagccgcagtggcagacagcgggatttatacctgtattgtacgatctcctacattcaatcgcacaggatacgccaacgtgacaatctacaagaaacagtctgattgtaacgtccccgattaccttatgtacagtaccgtctccggctccgagaaaaatagtaaaatctattgtccgaccattgatttatataattggacggctccgctagagtggtttaaaaattgccaggcgctgcaaggctctcggtacagagcccataagtcctttctggtgattgacaacgttatgacggaggatgccggcgattatacatgcaagtttattcataatgagaatggggcaaactacagtgtgaccgccaccagatctttcacagttaaagacgagcagggattcagcctgtttccagtgatcggtgctcccgcacagaacgaaatcaaggaagtagaaatcggcaagaacgcaaatctgacctgttccgcctgtttcggcaaagggactcagtttcttgccgctgtgttatggcagctgaacggcacaaagattacagacttcggtgaacccagaattcagcaggaagagggtcagaaccagtcttttagcaacggtctggcgtgccttgacatggtgctgaggatagccgacgtaaaggaggaagacctgctgctccagtatgactgtctggctcttaaccttcatgggctcagacggcacacagttagactttcaagaaagaacccaattgaccatcatagtatttactgcataattgctgtttgctctgtcttcctgatgctaattaatgtccttgtgataattctgaaaatgttttggatcgaagccaccctgctgtggagagatattgctaagccttataagacaagaaatgatgggaagctgtacgatgcctatgttgtgtacccacgcaattacaagagctctaccgatggagcgtctagagtggaacacttcgttcaccagatcctccctgatgtgcttgagaataagtgtggctatacactgtgtatttatgggcgcgatatgttacccggagaggacgtggttacggctgttgaaactaatatccgtaaaagcagacgccatatctttattttgaccccgcaaatcacacataacaaggaattcgcttatgaacaggaggtggccctgcactgcgcactaattcagaatgatgcgaaagtcatcctgattgagatggaggcactcagcgagttggatatgttgcaggctgaggcccttcaggattcgctgcagcacctcatgaaagtccaaggaactatcaagtggcgcgaggaccatatcgctaacaaacgcagtcttaatagcaaattctggaagcacgtgaggtaccaaatgcccgtcccgtctaagatccctaggaaagctagttcactgacccccctcgcggcacagaaacagtag

SEQ ID NO: 248272 - RNA, 741 nt, synthetic construct
  misc_feature 1..741: note = Description of Artificial Sequence: Synthetic coding sequence
  source 1..741: mol_type = other RNA
atgctgtggcggcagttaatctattggcagttactggcactgttctttctgcctttctgtctgtgccaggacgaatacatggagtccccccaaaccggagggctaccccctgattgttcgaagtgctgccacggtgactactcattcagaggctaccagggacctcctggcccaccaggacctccaggtatccctgggaatcatggaaacaatggtaacaatggcgctactggtcacgagggtgcaaagggtgaaaaaggcgataaaggtgatctcggaccccgcggagagagagggcaacacggaccaaagggggaaaaaggttatcccggaattcctccggaattgcagatcgctttcatggcttccctcgccacccacttcagtaaccaaaacagcggcatcatattctcttcagtcgaaactaacatcgggaacttctttgacgttatgacgggcaggtttggggcgcccgtgagcggtgtctatttttttactttctcaatgatgaaacacgaggacgtggaggaggtatacgtgtacctgatgcacaatggcaacactgttttcagcatgtacagctacgagatgaagggcaaaagtgatacatcatcaaaccatgctgtcctgaagctagcaaaaggagacgaagtgtggttacgaatgggcaatggagcactgcatggagatcatcagcggttcagtactttcgcgggctttctactgtttgaaacgaagtag

SEQ ID NO: 248273 - RNA, 666 nt, synthetic construct
  misc_feature 1..666: note = Description of Artificial Sequence: Synthetic coding sequence
  source 1..666: mol_type = other RNA
atggctgccgctaggcctagcctcggcagagttctgcctggcagctctgtgctgttcctatgcgatatgcaggaaaagttcagacataatatagcttactttccccaaatcgtgagtgtggccgcgcggatgttaaaggtggcaagacttctggaagtccctgtgatgttgactgaacagtacccccagggactcggacctaccgttcccgagcttgggaccgaaggactcagacccctggcaaagacttgcttcagtatggtgcctgctctccagcaagaactagattcgcgcccacagctgagaagcgtcttgctctgtggaatcgaggcacaggcttgcatcttggatccgcggtcttatcctggtctggcactcacttccttgtaccctcagaatacaacgcttgacctgcttgacaggggcctccaggtgcacgtcgtggtggatgcgtgctcatcccggtctcaagtcgataggctggttgccctggccagaatgcggcagtccggggcttttctgagtacctcagaaggtctgatattgcagttggtgggtgatgcagtgcatccccagttcaaagagatccaaaaacttatcaaagaacccgcgcctgattctggactcttaggattgttccaaggtcaaaactccctcctccactag

SEQ ID NO: 248274 - RNA, 834 nt, synthetic construct
  misc_feature 1..834: note = Description of Artificial Sequence: Synthetic coding sequence
  source 1..834: mol_type = other RNA
atgtggcctttggcattggtgatagctagccttaccttggccctgtccggcggcgtgtcacaggaatcttccaaagtactcaacaccaacggcacgtctgggtttctgcccggtggttatacctgctttccccattcccagccatggcaggccgccctactagtgcaaggccgccttctatgtgggggtgttctggtgcaccctaagtgggtgttgacagccgcacattgtttaaaggagggcctcaaagtttatctgggtaagcacgccttaggaagagtagaggccggcgaacaggttcgagaagtagtccacagtataccccaccccgagtatcgcagatctccgacccacctaaatcacgaccacgatataatgctcctggagcttcagtctccagtacagctcacaggctatattcagactctccctctgtctcataacaaccgcctgacacccggaacaacgtgtagggtcagcggctggggcaccacgactagtccacaggtaaactacccaaagacactgcaatgcgcaaacatccagctcaggtctgacgaagagtgtagacaggtttacccggggaaaatcaccgataacatgctctgtgctggcacgaaggagggcggaaaggacagttgcgaaggtgactccgggggccctttggtatgtaatcgcaccctctatggcatagtttcttggggtgactttccttgtggacagccggatcgtcctggagtctatactagagtttcccgctatgtgttgtggatacgcgagacaatccgaaagtatgaaacccagcaacaaaaatggcttaaaggtccccaatag

SEQ ID NO: 248275 - RNA, 804 nt, synthetic construct
  misc_feature 1..804: note = Description of Artificial Sequence: Synthetic coding sequence
  source 1..804: mol_type = other RNA
atgagcctcagagttctgggcagcggtacctggccttctgcgcctaaaatgttcttgctcctaacagcactacaggtgctcgctatcgctatgacccagagtcaggaggacgaaaataagataattgggggacatacctgcacaagatccagtcagccctggcaggccgcattactcgctggaccaagaagaagatttctgtgtgggggagcgttgttaagtggccagtgggttattacagccgcccattgtggcagaccgattctccaggttgcgttgggaaaacacaatctgagacgttgggaagcaacccagcaagttcttcgcgtcgttcgacaggtcacacatcctaactataattctcgcacccacgataatgatcttatgctgttacaactgcagcagcctgctcgaatcggtagagcggttagacctattgaggtgacacaggcctgcgcatctccagggacatcctgtagagtcagtgggtggggcaccattagttcccccattgctcggtacccggcaagtctacagtgcgtaaacatcaatatatctcctgatgaggtatgtcagaaagcataccctcggaccataactccaggaatggtgtgcgcaggcgtgccacagggtggcaaagattcttgccagggcgacagtggcggccccctcgtatgtcggggacaacttcaggggttagtgtcctggggcatggaaagatgtgccctgccaggctacccaggcgtctatacaaatctttgtaaatatcggtcttggatcgaggagacaatgcgcgataaatag

SEQ ID NO: 248276 - RNA, 804 nt, synthetic construct
  misc_feature 1..804: note = Description of Artificial Sequence: Synthetic coding sequence
  source 1..804: mol_type = other RNA
atgtcactgagagtgcttggctccggaacctggcctagcgctccaaaaatgtttctgttactgacagctctacaagtactcgccatagcgatgactcagtcccaggaggacgaaaacaagatcattggaggtcatacatgcactcggagcagccaaccttggcaagccgctctgttggccggacctagacggaggttcctctgcggaggcgctctgttaagtgggcagtgggtcatcaccgccgctcattgcggccgcccgatcttgcaagtcgctctcggtaagcacaaccttagacggtgggaagctacccaacaagtgctcagagtggtgcgtcaggttacacacccaaattataattcaaggacacacgacaacgatctaatgttgctgcaactacagcagcccgcgaggataggaagagcggtgcggcccatagaagtgactcaggcatgcgcatcacccggaacctcgtgcagggtgagcgggtggggaaccatctctagtccgatagcccgatatccagcgagtttacagtgcgtcaacatcaatatttcacctgatgaagtttgccagaaagcatacccccgaaccattacccctgggatggtgtgcgccggagtcccgcaaggcggtaaagattcctgccagggagattccggagggccgcttgtttgtagggggcaactgcagggcctggttagctggggcatggagaggtgcgccttgccaggttatcccggggtctacaccaacctctgtaagtaccggtcatggattgaagagacaatgcgcgataagtag

SEQ ID NO: 248277 - RNA, 804 nt, synthetic construct
  misc_feature 1..804: note = Description of Artificial Sequence: Synthetic coding sequence
  source 1..804: mol_type = other RNA
atgagcctcagggttctgggaagcggaacctggccctccgcgccaaaaatgtttctcctgttaaccgcccttcaggtcttagccatcgccatgactcagagccaggaagacgagaacaaaattatcggtggccacacgtgcacgcggagcagccagccttggcaggcagctcttctcgccggtcccagaagaagatttctttgtgggggtgcccttctgagcggtcagtgggtgataacagcagcacactgcggccgtccaatcttacaagtggccctcggcaaacataaccttagacgctgggaggctacgcaacaagtgcttcgggtggttaggcaggtaacgcacccgaactataacagccgcacacatgataacgacctcatgctcctgcagctgcagcagccagctcgtatcggccgggccgtaagaccgatcgaggtaacccaggcctgcgcgagccctggcacctcgtgtagagtgtccggctgggggacaatttcaagcccaatcgctagatatccggcctctttacaatgcgtaaacattaatatctctccggacgaggtttgtcagaaggcttatcctcgcacgatcactcctggtatggtttgtgccggcgtgccgcagggaggtaaggatagctgtcagggcgattcaggcggtccactagtctgtagaggacagctccagggcttagtgagttggggaatggagagatgcgctttgccaggctaccccggggtctatacaaatttgtgcaaataccgttcctggatagaagagactatgcgggacaaatag

SEQ ID NO: 248278 - RNA, 1068 nt, synthetic construct
  misc_feature 1..1068: note = Description of Artificial Sequence: Synthetic coding sequence
  source 1..1068: mol_type = other RNA
atgagtctccgtcttcagtctagctccgctagctatgggggtgggtttggaggcggcagctgccaacttggagggggaagaggcgtgtccacctgcagcacaagattcgtttctggtgggtctgccggcggctatggtggcggagtatcatgcgggtttggcggcggagctggaagcggattcggtggcgggctgggggggggttttggtggagggtttgcaggtggatttgtggacttcggagcctgcgatgggggtcttttaactggcaatgaaaaaatcacaatgcagaatcttaatgaccggctggccagttatttggagaaagtgcgggcgctcgaagaggccaacgctgacctcgaagtgaaaattagagattggcacctgaaacagagcccagcttccccggaaagggattatagtccatactacaagacaatagaagagctcagggataagatactcaccgctaccattgagaataaccgagtgatcctcgagattgataatgcaaggctcgctgccgatgattttcgactgaaatatgaaaatgagttggcccttaggcaatctgttgaggcagacatcaacgggctccggagggtgcttgatgaactaacactgtctaaaaccgacttggagatgcagatcgagtccctcaacgaggagctggcgtatatgaaaaaaaaccacgaggaggaaatgaaagaattcagcaaccaggtcgtgggtcaagtgaatgtggaaatggatgcgacacccgggatcgatctaacacgggtgttggccgagatgcgcgagcagtacgaagccatggccgagcgcaataggagagatgccgaagagtggttccacaccaagtcagccgaactgaataaagaagtctctactaatactgctatgatccagacatccaagaccgagattactgaactgagacgcaccttacagggcttagagattgaattgcagtcacagcttagtatgaaagcaggactggaaaacaccgcagcagaccctgggacccatcaacagcatagaggtccagctgagcgggcgcctcagtag

SEQ ID NO: 248279 - RNA, 1275 nt, synthetic construct
  misc_feature 1..1275: note = Description of Artificial Sequence: Synthetic coding sequence
  source 1..1275: mol_type = other RNA
atggacttcagccggagatcgtttcacagatcactatccagctctctgcaagcccccgttgtcagcacagtgggtatgcagcggctgggcacaacaccctccgtatatggtggggccggcggacgcgggatccgaattagtaactctcgacacacagtcaattatgggtccgacctgaccggagggggagacttatttgtgggcaatgaaaagatggcaatgcaaaatctcaatgaccgattagcctcctatctggagaaagtgagaaccctcgagcagtccaactccaaactcgaagtacagataaaacagtggtatgagactaatgccccacgggcaggcagggattactcagcgtattaccgccagatcgaggaactgcgctcccagattaaagatgcacagctgcagaatgcccggtgcgtgctccagattgacaatgctaaattggccgccgaagatttccgccttaagtacgagacagagaggggtataaggctgaccgtggaagccgatttgcaggggttaaataaggtctttgacgaccttaccctccacaaaacagacctggagattcagatcgaagaacttaataaagatcttgcccttttgaagaaagaacaccaagaagaagtcgacgggcttcacaaacaccttggaaataccgtgaacgtagaggtggacgccgctccagggttgaaccttggtgttatcatgaacgagatgagacagaagtacgaagtgatggcccagaaaaacttacaggaggctaaagaacagtttgagagacagacagctgtgctccagcagcaggtgaccgttaatacagaagaactgaaaggcaccgaggtacagctgaccgaactgagacgaacttcgcagagcttagaaatagaattgcagagccatctgagcatgaaagagtccttggagcacaccctggaggaaacaaaagcacgctattcatcccagctcgccaacctacaatctctcctcagcagtttggaggcgcaattaatgcagattagaagcaacatggaacgtcaaaacaacgagtaccacattttgctcgatatcaaaacgcggctggagcaggaaatagcgacctaccgccggctgctcgaaggggaagatgttaaaacaaccgagtatcagctgtccactttagaggaaagagatatcaagaaaacccggaagataaaaaccgtggtgcaagaagtagttgacggaaaggtcgtgtcctctgaggtaaaggaagtggaggaaaatatctag

SEQ ID NO: 248280 - RNA, 1215 nt, synthetic construct
  misc_feature 1..1215: note = Description of Artificial Sequence: Synthetic coding sequence
  source 1..1215: mol_type = other RNA
atgtcatatagctgcgggttgccatccttatcttgccgtactagttgctcatcaagaccatgcgtccctcccagttgtcatggatgtaccctgcctggagcatgcaacattccagcaaatgtgtcaaattgtaactggttttgtgagggttcattcaacggctccgagaaagaaacgatgcagtttttaaatgataggctggcatcttatcttgaaaaagtcagacagcttgaacgggacaatgcggagctggagaatctcattcgggaacgctcacaacagcaggagccgctggtctgcgccagctaccaatcttatttcaagactatagaagagctccaacagaagatcctctgcagtaagtcagaaaacgcaagactcgtggtgcagatcgataatgccaagctggcttcagatgattttcgaacaaagtacgagaccgaactgtcccttaggcagttggttgagagtgatattaacggcctaagacgtattctggatgagctgacactatgcaggagtgatttagaggcccaggttgaaagtttaaaagaggaactcttatgcctaaagcagaatcacgagcaagaggttaataccctaaggtgccagctgggcgatagactgaacgtggaggtggacgccgcccccaccgtcgacctgaatcaggtccttaatgagaccaggagtcagtacgaggctttggtagaaaccaatagacgagaagtcgagcaatggtttgcgacacaaaccgaagagctgaataaacaggtcgttagcagtagcgagcaactacaaagctatcaggctgaaataatagagctcagaaggaccgtgaatgcattggaaattgaactccaggctcagcacaacttacgggactccttggaaaacacgctgacggaaagtgaagcacgctattcatctcagctgagtcaggtgcagagactcataacaaatgtggaatcccagctagctgaaatcagatctgatctggaaaggcagaatcaggagtaccaggtcctgctggacgtgcgtgcaagattagaatgcgagattaacacctacagatctttgctggaatccgaagattgcaaacttccgagtaacccctgcgctactacaaatgcttgtgacaagtctactgggccatgtatttccaatccttgtggactgagagcccggtgcggtccgtgtaataccttcggttattag

SEQ ID NO: 248281 - RNA, 738 nt, synthetic construct
  misc_feature 1..738: note = Description of Artificial Sequence: Synthetic coding sequence
  source 1..738: mol_type = other RNA
atggcagtgatcatcggcgtcgccgtgggtgccggcgtggcttttttagttctcatggccacaatcgtcgctttttgttgcgctcggtcacagcgaaaccttaagggggtcgtttctgccaagaacgacatcagggtcgagatagtacacaaggaacccgccagtgggcgcgaaggagaagaacactccactatcaagcagctcatgatggaccgtggagagttccaacaggactctgtactcaaacaactagaggtgcttaaagaggaggagaaggagttccagaaccttaaagatcccactaatggctattactccgtgaacaccttcaaggagcaccactccacccctaccatctccctctcctcttgccaacccgacctgaggccggctgggaaacaacgcgtcccaactggcatgtcttttacaaacatctacagtacacttagcggtcaagggcggctttatgactacggccaaagatttgtgctcggcatgggctcttccagcatcgaactgtgcgagagagaattccagcggggttcgttaagcgactcgagtagctttcttgatacacagtgtgattcttcggtctcctcctcaggaaaacaagacggatacgtgcaatttgataaagcaagcaaggccagtgcgtcgagcagtcaccactcacaatccagcagccagaatagcgacccctccaggcccctccagagacgaatgcagacccatgtttag

SEQ ID NO: 248282 - RNA, 2337 nt, synthetic construct
  misc_feature 1..2337: note = Description of Artificial Sequence: Synthetic coding sequence
  source 1..2337: mol_type = other RNA
atgaagccatttcaactagacctccttttcgtgtgcttttttctgttttctcaagagcttggactgcaaaaacggggatgctgcctggtcttaggatacatggccaaggacaagttccggcgcatgaacgaaggacaagtgtactcatttagccaacagccgcaagatcaagtcgtcgttagtggccagcctgttacgttgctctgcgctatccccgagtacgatggatttgtgctttggattaaagacggcctcgctctgggggttgggcgggatctctcatcctatcctcagtacctagtcgtcggaaatcatctatccggggaacatcacctgaaaattctccgcgcggaactgcaggacgatgccgtgtacgaatgtcaggctattcaggccgcaattaggtctagacccgctcggctgactgtgctcgtgcctcccgacgatccagtgatacttgggggccctgtcattagcctgagagcgggggacccactcaatttgacgtgccatgccgataacgctaaacccgcagccagcatcatctggttaaggaagggggaggttatcaacggtgcgacctactcaaagacactgctcagagacgggaagagggagagtatcgtttctactctgtttatcagccctggagatgtcgagaatggtcagagcatcgtctgccgggccacaaataaagctattcccggcggcaaggagacctccgtcactatcgacatccaacacccaccactggtcaatctgagcgtcgagcctcagccagttctagaagataatgtggtaaccttccactgtagcgcaaaggccaaccccgcagtaacgcagtatcgttgggccaaacgcgggcagattatcaaagaagctagcggcgaagtctaccgcacaacagttgactacacttactttagcgagcctgtaagctgcgaagtcactaacgcgttgggctcgaccaatctgagcagaactgtggacgtttatttcggacctcgcatgaccaccgagccacaaagcttactcgttgatcttggcagcgatgcaatcttctcttgcgcatggacaggcaacccctctcttactatagtatggatgaagcgcggatccggggtggtactctccaacgagaagacgcttactctcaaaagcgtgaggcaggaagatgcaggaaagtatgtctgtcgggccgtcgtccctagggtaggcgccggcgaaagagaggtcacccttacagtaaacggaccaccaattattagctcaacgcaaactcaacatgcactccatggcgaaaaaggacagatcaaatgtttcattcgctcaacacctccaccagataggattgcatggtcctggaaggagaatgtcctcgagtcgggcacctctggccgctacacggtggagacaatcagtactgaggaaggcgttatttccacactgacaatttctaatatagtgcgggcggacttccaaaccatttacaattgcactgcctggaattcttttggttccgataccgaaattattcgtctgaaggaacaggggtcggagatgaaatctggggctgggttggaagcagaatcagtacccatggcagttataattggtgttgccgttggcgcaggtgtggctttcctcgttcttatggccactatcgtcgccttctgttgcgcacgttcacaaagaaacctcaagggcgtggttagcgccaagaacgatatccgcgtggagattgtgcataaagaaccggcttctggaagagagggcgaggagcattctaccataaagcaactgatgatggaccgtggggaattccagcaagactcagtgttgaagcaacttgaggtgctcaaggaggaagagaaggagtttcaaaatttgaaagatcccacaaatggatattatagtgtcaataccttcaaagagcatcatagcacgcctaccatttctctctcttcatgtcagcctgatttgagaccagcgggcaagcagagagtacctactggaatgtcgttcactaacatctattctaccctatccggccagggccgcctttatgattacggacaacgttttgtgcttgggatggggagcagctccatagaactctgtgaacgggagtttcagcgaggctcgctgagtgatagtagcagcttcctggacacccagtgcgacagtagtgtcagctccagcggcaagcaggatggctatgtccagttcgacaaggcttctaaggccagcgcttcttctagccatcacagccagtcttcttctcaaaactcagatccatcacgaccgctccaaaggagaatgcagacccatgtttag

SEQ ID NO: 248283 - RNA, 1803 nt, synthetic construct
  misc_feature 1..1803: note = Description of Artificial Sequence: Synthetic coding sequence
  source 1..1803: mol_type = other RNA
atgaagccttttcagctggacctgctctttgtgtgtttctttctgtttagtcaggagctgggtctgcagaaacgcggatgctgcttagtgctcggctacatggccaaggataagttcagacgcatgaatgaaggacaggtctactcctttagtcaacaaccacaggaccaggtcgtcgtcagcggtcagcccgtcaccctgctgtgcgccatcccagagtacgatgggtttgtcctgtggattaaggatggcctcgccctgggtgtgggtagagacctttcaagctaccctcagtaccttgtggtcggaaatcacctgtctggagaacatcacctaaagattctgcgggctgaactccaggacgacgcagtctatgagtgtcaagccatccaggccgctattcgtagccgaccagcacgcttaactgtgttagtgccccctgatgaccccgtaattctgggaggaccggtcatttccttacgtgctggggaccctttgaatctcacatgtcatgctgataacgcaaaacctgccgcttccattatctggctgaggaagggagaagttatcaatggagcaacatatagcaagacgctcctgagggatggaaagagggaaagcattgtatcaacactgttcatttcccctggcgatgtagaaaacggccagtctatcgtctgcagggctacaaacaaagcaatcccaggtggaaaagagacatccgtcaccatcgacattcaacaccctccacttgtgaatctgagcgtcgagccccaacccgtgctggaggacaacgtcgtgacattccattgtagcgcaaaggctaatcccgcagttacccagtaccgatgggccaagaggggccagatcatcaaggaagcctccggagaggtgtaccgtactacggtcgattatacatatttctccgagcctgtctcatgtgaagtcactaacgctcttggatcaaccaatctatccagaacagtggacgtgtattttgggcctcgcatgactactgagcctcagagtttgctggttgacctcggaagcgatgctatcttctcctgtgcatggacaggtaatccatcccttaccatcgtgtggatgaagcgaggaagcggggtcgtcctgtctaacgaaaaaacactcacactgaaaagtgttcgacaggaggacgcaggcaagtatgtgtgtcgggctgtggtaccacgtgtgggggcaggggagagagaagtaactttaacagtcaatggccctccaattattagcagtacacagactcagcatgccttacacggcgaaaaagggcaaatcaaatgtttcattagaagtactcccccccctgaccgtattgcctggagttggaaagaaaatgttctcgagtctggtaccagcggacgatatactgttgagactataagtactgaagaaggagtgatcagtacgctgactattagtaacatcgtgagagcggacttccaaaccatttacaactgtacagcatggaacagcttcggaagcgatactgaaatcatcagactcaaggaacagggcagcgaaatgaagagcggggctggtctggaggccgaaagcgttcccatggcggttatcattggggttgctgttggcgctggggtcgcctttttggtactgatggccactatcgttgccttctgctgcgcgcgaagccagcgcagtacaggcggtcgctcgggtatcagcgggcgtggaaccgaaaagaaagctagacttaggcttccccggcgcgcaagcaaacaggagtgtaacgagcagggaagttag

SEQ ID NO: 248284 - RNA, 2301 nt, synthetic construct
  misc_feature 1..2301: note = Description of Artificial Sequence: Synthetic coding sequence
  source 1..2301: mol_type = other RNA
atgaagcccttccagctagatcttctgttcgtatgcttcttcctcttctctcaggaactggggctgcagaaacgggggtgttgcctcgtcttaggatacatggctaaagacaagtttcgacggatgaatgaaggtcaggtatacagtttttcccaacaaccacaggaccaggtggtcgtgtcaggacagcccgttaccctgctctgcgccatcccagagtacgacggttttgtactgtggattaaggacggtttagcactaggggtggggagggacctctcatcctaccctcaatatctggtcgtaggaaaccacctatctggagagcatcacctaaagatcctccgggcagagcttcaggatgatgccgtatatgaatgccaggccatccaggccgctatccggtctcgacccgctaggttgactgtgctcgtgccacccgacgatcccgttattctcggcggccctgttataagtctccgcgccggggacccactgaacctaacctgccatgcggataatgccaagccggccgctagtattatctggttacgaaagggagaagtgattaacggagctacgtactctaaaaccttgctcagggatggaaagagggagtctatcgtcagtacactttttatctcccctggtgacgtcgagaatggtcagagcattgtttgccgcgccaccaataaagcaattccgggaggcaaggaaacttcggttactatcgacatccaacatccaccactcgtgaatctgtctgtagaaccacagcccgtgcttgaagacaacgttgtgactttccattgttctgccaaagcaaaccccgctgtaacccagtacagatgggcaaagaggggacagattataaaagaagcttctggtgaggtctacaggacaacagtggattacacatatttttctgaacccgtgtcgtgcgaagtgactaatgcgctcggtagcactaatttatctaggaccgtggacgtttattttggtcctagaatgacaaccgagccgcagtccctccttgtggatctgggaagtgatgctatattcagttgcgcctggactggtaatcctagcctcaccattgtttggatgaagcgaggaagcggcgtagttctctctaacgaaaaaactctgactctgaagtctgtgaggcaggaagacgcaggcaaatatgtttgtcgcgcagtggtccctcgtgtgggtgcaggagagagagaagttaccctgaccgtgaatgggccgcccattatcagcagtacccaaacccaacatgcgctgcatggtgagaaaggtcagattaagtgcttcattaggtcaaccccgccccccgacaggattgcttggagctggaaagagaacgtgctggaatccggaacgagtgggaggtacaccgttgagaccattagtacggaagagggtgtcatcagtaccctcaccatttccaacatagtcagggctgatttccagaccatctacaactgcacggcttggaattctttcggctcagacacagaaatcataagactcaaggagcaggaaagtgtccccatggccgttatcattggcgtggctgtaggcgctggggtggccttcttagtgttgatggcgaccatagtggccttctgttgcgcgcggtcacaacggaatctgaagggagtggtgtcagcgaaaaacgatatcagagtggaaatcgtgcacaaggagccagcttctgggagagagggtgaggaacattctacaatcaagcaactgatgatggatcgcggtgagttccagcaagacagcgtgcttaagcaactggaagtgttaaaagaagaggagaaagagttccagaatttgaaagacccgactaacggctattattctgtaaacaccttcaaggaacaccattcgacacctacgatctctctgagtagctgtcagccagatctgaggccggctggaaagcagcgagtgccaacgggaatgtccttcaccaatatctacagtacactgtccgggcaaggtagactctatgactatgggcaaagattcgtgcttggcatgggcagttcatctattgagttatgcgaacgcgagttccagcgaggcagtttgagcgatagcagttctttcctggacacgcagtgtgattcctccgtttccagttctggtaaacaagatgggtatgttcagttcgataaagccagcaaggcctcagcctcctcttctcatcacagccagtcaagcagtcagaattctgaccccagccgacctcttcaacggcggatgcagacacatgtgtag

SEQ ID NO: 248285 - RNA, 1998 nt, synthetic construct
  misc_feature 1..1998: note = Description of Artificial Sequence: Synthetic coding sequence
  source 1..1998: mol_type = other RNA
atggccgcaggtgggtctacccagcagagaagacgagaaatggccgctgcttctgcagccgcaatttccggcgcagggcgctgccgactgtcaaaaatcggagccacgcgaaggcccccccctgcccgtgtgcgagtagcggtcaggttacgccccttcgtggacggaaccgcaggggccagtgatccgccttgtgtgagaggcatggactcatgctcattagagatcgctaattggcgaaaccaccaggagaccctgaagtaccagttcgatgcattttacggcgaacgtagcacacagcaggatatctacgctggaagcgttcagccaattctgcgtcatttgcttgagggccagaatgcaagcgttcttgcttacggccccacaggagcagggaagacacacaccatgctgggaagccccgagcagccaggggtaatccctcgggccctcatggatttgctgcagctcactcgcgaggaaggtgccgaaggtcgcccatgggcgttgtctgtgaccatgagctacctggagatctatcaagaaaaggtccttgacctgctagaccccgcgagcggcgatcttgtgatcagggaggactgcaggggcaacatattgattcctggcctttcccagaagccgatttcctctttcgctgattttgaacgacattttctgcccgcctctaggaatcgcaccgtaggcgccactcggctgaatcagcgctcgtcccgatctcacgccgttctgttagtgaaagtggatcagcgcgaacgcttagcgccattccggcagcgcgagggaaagctgtaccttatcgacctggctggatctgaggacaaccggagaactgggaataaaggccttaggcttaaagaaagcggagcaataaatacctccctgttcgtgctgggcaaagtggtcgacgccctaaatcagggacttcctcgcgtaccatacagagatagcaaactaacaaggctgctgcaggactctctcggtggcagcgcgcactccatcctcatcgccaacatcgcaccagagagacggttttacctcgatacagtctctgcacttaatttcgccgcccggtccaaggaggtaatcaatcgacccttcactaacgagtccctgcagccacacgcactcggtccagtcaagctgagtcagaaggagctgctgggaccgcccgaagcgaaaagagcccgaggcccagaggaagaagaaattggctctcctgaacctatggccgcccccgccagcgcatcacagaagctgtcacccctccagaaactttccagcatggatcctgcgatgctggagcgcctgctctcactagacaggttgctcgcctcacaagggtcccagggagcccctttgctgtcaactcccaagagggagcgcatggtactcatgaaaacagttgaggagaaggaccttgagatcgagcggctgaagacaaagcagaaagaattagaggcaaaaatgcttgcccagaaggctgaagaaaaagaaaatcactgcccaacaatgcttagacccctgagtcatcgcaccgttaccggagcaaaacccctgaagaaagcggtggtgatgcctctgcagctgatccaggagcaggccgcaagtccgaacgctgagattcacattctaaaaaataagggccgcaagaggaagttggaatctctcgatgccttagaacctgaagagaaagctgaggattgctgggagctgcagatatcccctgaacttttagcccacgggcggcaaaagattttggatctactgaacgaaggctcagccagagatctgcggtcacttcaaagaattggacccaaaaaggcccagttaatcgttggttggcgagaactccacggcccgttttcgcaggtggaagacctcgaacgggtggaaggaatcacaggcaaacagatggaatcgttccttaaggctaacattctgggccttgcggccggccagcgttgcggggcgtcgtag

SEQ ID NO: 248286 - RNA, 1065 nt, synthetic construct
  misc_feature 1..1065: note = Description of Artificial Sequence: Synthetic coding sequence
  source 1..1065: mol_type = other RNA
atgcaagggctgctgttcagcacacttctccttgccggtctggctcagttctgttgccgtgtccagggcaccggaccactagatacgacacctgaaggacggcccggggaggtgtccgacgcacctcaaagaaagcaattttgtcattggccgtgcaaatgcccccagcagaagccccgttgcccccctggtgtgtcccttgttagagacggctgtggatgctgtaagatttgtgcaaagcagcccggcgagatctgcaatgaagctgacctatgcgatcctcacaagggcctgtattgtgactattctgttgataggccacggtacgagaccggtgtctgtgcctatctggtagcggtcggctgcgaattcaaccaggtgcattatcataatggacaggtgtttcagccaaatcccttattcagctgcctttgcgtgagtggcgctataggatgtactccactgtttatcccaaaactggccggatctcactgtagcggtgccaagggaggaaagaaaagcgatcagtccaactgttctttagagcctctactccagcagctgagtacttcgtacaaaacaatgcccgcttacaggaacttacctctgatctggaaaaagaagtgtctcgtccaggccactaaatggactccctgtagcaggacctgtggcatgggaatatctaacagggtgacaaacgaaaattcaaactgtgaaatgcggaaggaaaagcgcctatgctatatacaaccgtgtgactcaaacattctcaagacaatcaagattcccaaaggcaagacctgtcagccaacctttcaattaagcaaggccgaaaaatttgtgttctcgggttgctctagtacacagtcctacaagcccacattctgcgggatttgcctcgacaagcggtgctgcatccctaacaaaagtaaaatgattacaatccagtttgactgtcccaatgaaggcagttttaaatggaaaatgttgtggatcacgtcatgcgtgtgccaaaggaactgccgggaacctggcgacatttttagcgagctgaaaatactatag

SEQ ID NO: 248287 - RNA, 267 nt, synthetic construct
  misc_feature 1..267: note = Description of Artificial Sequence: Synthetic coding sequence
  source 1..267: mol_type = other RNA
atggcgctcagttctgcttggcgcagtgtattacccctgtggcttttgtggagcgcagcatgtagtagagcggcgagtggtgacgacaatgcatttcccttcgatatagaggggtcttccgcagtcggccggcaggatccacccgaaacatcagagccgagggtcgcgttgggccggctacccccggcagcagagaaatgtaatgctggcttctttcacactctatccggcgagtgcgtgccttgtgactgtaacggaaactcctag

SEQ ID NO: 248288 - RNA, 363 nt, synthetic construct
  misc_feature 1..363: note = Description of Artificial Sequence: Synthetic coding sequence
  source 1..363: mol_type = other RNA
atggctctatcgtcagcttggagatccgtccttcccctatggctcttgtggtccgcagcatgttcacgcgccgcttcaggcgacgacaacgcctttccttttgacattgagggatcgagtgccgttggccggcaggacccccctgagacatctgaaccacgtgtagccctgggtagattaccccccgccgccgaagtccagtgcccctgccactgccaccccgctggggcaccagcaccccctcgggcagtcccccactcttctttctccttatcaccacccctttccagcccgcaatgtctggaaagctttacctgggcccggtcagtacgaaaactggagataaaatcttttccattgtag

SEQ ID NO: 248289 - RNA, 549 nt, synthetic construct
  misc_feature 1..549: note = Description of Artificial Sequence: Synthetic coding sequence
  source 1..549: mol_type = other RNA
atggccttgtcctccgcctggagatccgtgctccctctctggctcctttggagtgctgcttgcagccgcgctgcgtctggagacgataacgcttttcccttcgacatagagggatcttctgctgtcgggcgacaagatcctcccgaaacatccgagcctcgcgtcgcactgggtcgtcttcctcctgccgccgagaaatgtaacgccggcttctttcacaccttgtccggggagtgtgtgccatgtgactgcaacgggaatagcaatgaatgcctagatggctcagggtattgtgttcattgccagcgaaataccaccggggaacattgcgagaagtgtcttgatgggtacatcggcgactcaattaggggcgctcctcagttctgtcaaccctgcccatgtccactccctcatctggcaaatttcgccgaatcttgctacaggaagaatggcgctgtcaggtgcatttgtaatgaaaattatgctggaccgaattgcgaaaggccctctccacagagcacgaggggctttcccttaaacgactcttag

SEQ ID NO: 248290 - RNA, 537 nt, synthetic construct
  misc_feature 1..537: note = Description of Artificial Sequence: Synthetic coding sequence
  source 1..537: mol_type = other RNA
tgaattttcgaggattgtgacgaggtgacgggccagtgtagaaattgccttagaaatactacagggttcaagtgtgaacgatgcgcccccggctactacggagacgcgcgcatcgccaagaactgtgctgtgtgtaactgtggaggaggcccttgcgattcagtaaccggggagtgcctggaggaaggattcgaaccacctaccggcatggattgccctaccatttcttgcgataaatgtgtgtgggatttgacggatgcattacggttggccgccttaagcatagaggaggggaaatctggggtgctgagcgtttcctctggagctgccgcacaccggcacgtaaacgagatcaacgccacaatctatctactgaaaacaaaactgtccgagagggaaaatcagtacgccttgaggaagatccagatcaacaatgccgagaatactatgaagagcctactgagcgatgttgaagagttagtcgagaaacactggaacaaacctaggaggaggttggaactgcaggagggcgtgtag

SEQ ID NO: 248291 - RNA, 5451 nt, synthetic construct
  misc_feature 1..5451: note = Description of Artificial Sequence: Synthetic coding sequence
  source 1..5451: mol_type = other RNA
atggcactgagcagcgcatggcggtctgtgctcccactgtggcttttatggtccgccgcatgctcacgtgcggcatcaggcgacgataacgcatttcccttcgacatcgagggaagcagcgcagtaggacgtcaggacccccccgagacctccgagccccgcgtggcacttggacgcttgccccccgcagccgaaaaatgcaacgccggctttttccacaccttgagcggggagtgtgtcccttgtgattgcaatgggaactcgaatgaatgcctggacgggtccggctattgcgtacattgtcaacgcaataccaccggtgagcactgcgagaagtgcctcgatggttatatcggcgattcaatccgaggggcacctcaattttgtcaaccttgcccttgtcctttaccccacttagccaacttcgctgagagttgctacaggaagaacggcgccgtccgctgcatttgcaatgagaattacgctgggcccaattgcgaacggtgtgccccaggctattatggaaatccacttctcatcggcagcacttgcaagaagtgcgattgtagcggcaattcggaccccaacttaatatttgaggactgcgacgaggtgacagggcaatgtcggaactgtctgcgcaacactacaggcttcaagtgcgaacggtgtgcacctggatactacggcgacgctagaatcgctaaaaattgcgccgtctgcaactgcggaggcggaccttgcgactctgtgacgggtgagtgcctggaagaagggttcgaaccacccacgggttgtgacaaatgcgtttgggatctcaccgacgccttaaggcttgcagcactgagcatcgaggaaggcaagtccggcgttttatcggtgagtagtggagcggccgcacacagacacgtcaacgagatcaatgccaccatttacctgttgaaaaccaaattgtccgagagggagaaccaatatgcgctcagaaaaattcagatcaataatgctgaaaacaccatgaagtcactgctttctgacgtggaggagctcgtggaaaaagaaaatcaagcctcgagaaaaggacagttagtgcagaaagaaagcatggacacaatcaaccacgctagtcaacttgtggagcaagcccacgacatgcgggacaagatccaggagattaataataaaatgctttactacggggaggagcatgaattgtcccccaaagagataagcgaaaagctggtcctggcacaaaaaatgcttgaggaaattaggtcacggcagcctttcttcacacagagagaacttgtggacgaagaagctgacgaagcttacgaactgctgtctcaggcggaaagctggcagagacttcacaatgaaacacgcactttattccctgttgtgctggaacagctggatgactataatgcaaaactgtccgacctgcaggaggccctggatcaagccctcaactacgtgagagatgccgaggacatgaaccgagctacagccgctcggcaaagggaccacgagaaacagcaggagcgcgtgcgcgaacagatggaagtcgtcaatatgagcctgtcaacatccgctgattctctgactacacctaggctaaccctgtcagagctcgatgatatcataaagaacgcctccggcatttatgctgaaattgatggtgctaaatctgagctccaggtgaagttaagcaatctatccaacttgtcccatgacctggtgcaggaggcaatcgatcacgctcaggatttgcagcaagaagcaaacgagctgtccagaaagctgcattcctctgatatgaacggtcttgtacaaaaagcccttgatgcgtcaaacgtttacgaaaatattgtgaattacgtctcagaggcaaacgagaccgcagaattcgcactgaataccaccgacagaatttacgatgctgtgagtgggattgacacacagattatttatcacaaggatgaatccgagaatcttttaaaccaggctagagagttacaggccaaagccgagagctctagtgacgaggccgtagccgacacatccaggcgggtgggaggagcattagcgcggaaaagcgctttaaagacacgactgtctgacgctgtgaagcaactacaggccgctgagagaggcgacgcgcagcagcggctcggacaaagccgactgattaccgaggaagcaaatagaaccaccatggaagtgcagcaggccaccgccccaatggccaataacctgacaaattggagccagaacctgcagcatttcgactctagcgcttataacaccgcggtgaactcagcacgcgacgctgtgagaaacctgactgaggttgtgccacaattgctagatcagcttcgcaccgtagaacaaaaacgccccgcctctaacgtaagtgcctccatacagcgcatcagagaattgatcgcacaaactaggtccgtggcctctaaaattcaggtttcaatgatgttcgacgggcaatcagcggtcgaggtgcactcacgcacgagtatggatgatctcaaagctttcactagcctctcattatacatgaagcctccagtgaaaagacccgagttgactgagacagcagaccaattcatcctttacctcggttccaagaacgcaaaaaaggagtatatgggtctagcaatcaaaaacgataatttggtttacgtctacaatttggggaccaaagacgttgaaatccctctcgattcaaagccagtgtcatcttggcccgcctacttttctatcgtcaaaatcgagcgggttggcaaacacgggaaagtatttctcaccgtgcctagcctatccagtacggcagaggaaaaattcattaagaaaggcgaatttagtggcgacgattcccttttggacctggaccccgaggatactgtcttctacgtgggcggcgttccttctaatttcaagctacccacttcccttaacctcccaggatttgtaggctgcttggagctggccacattaaacaatgatgttatcagcctctataacttcaagcacatatacaatatggacccttcgacctctgtgccctgtgctagggataagctggcgtttacacagtctagggcggcaagctacttttttgacggcagcggatatgctgtggtccgtgacatcacacgacggggtaagtttggtcaagtaacgcgattcgatatagaagtccgaactcccgctgacaacggtctcatacttctcatggtgaatggatcaatgttcttccgactggagatgcgcaatggttacctccatgttttttatgacttcgggtttagcggcgggcccgtgcacctagaagatacacttaagaaggcccagatcaacgacgctaaatatcatgagataagtatcatttatcacaatgataaaaagatgatcctggtggtggataggagacatgtgaagtccatggacaatgagaagatgaaaattccattcacggacatctatattggcggcgccccacccgagatcctacaaagccgggcactgagggctcatctgcctttagatatcaatttccgcggctgcatgaagggttttcaattccagaaaaaggactttaacctattggagcaaactgagaccctcggagtggggtacggctgcccggaggacagcctaatcagtagacgagcatattttaatggccagagtttcatagccagcatccagaaaattagcttcttcgacggatttgaggggggctttaacttccgcaccctccaaccaaacggcctgctcttttattatgcatctggatctgacgtgtttagcattagtctggacaacggcactgttattatggatgtgaaaggaattaaggtccagagcgtcgataagcagtacaacgatggactgtctcattttgtgatctcgtcagtgtcacccacacggtacgaactgatcgttgacaagagccgagtcggatctaagaatccaacaaaaggtaagattgaacagactcaggctagcgagaagaagttctacttcgggggctccccaatctcagcgcaatacgccaacttcaccggatgcatttcaaacgcatattttacaagagtcgaccgcgacgttgaagtggaggatttccaacggtatactgaaaaggtccataccagcctgtacgaatgtcccatcgagagctctccactgttcctacttcataagaaaggtaaaaatctttctaaacctaaggcttctcagaacaagaagggtggaaaatctaaggacgccccgagctgggatcccgttgccctcaagcttcccgagagaaacacaccaaggaactcccattgccatctgagcaattccccccgcgcaatcgaacacgcttaccaatacggaggcacagccaatagtcgccaggagtttgaacatttgaaaggagattttggtgctaaatctcagttctccatcaggctgaggacacgctcctcacatgggatgattttttatgtaagcgatcaggaggaaaacgatttcatgacgttgttcctggctcacggacggctggtatacatgttcaacgtcggtcacaagaagctcaagatccgatctcaggaaaagtacaatgatgggttatggcacgacgtgatattcattcgcgagcgatctagtggacgcctggtgatcgatggcctgcgggtgctcgaagagtctctacctcctactgaagccacttggaaaataaagggaccgatttacttggggggtgtagcaccagggaaagctgtcaaaaacgttcagattaactccatatactctttttctgggtgtttaagcaatctccagctcaatggtgcatctattacctccgccagccagacgttctccgtgacaccttgctttgagggccccatggagacggggacatatttctcaaccgaaggggggtatgttgtgctagacgagtcatttaatattggccttaagttcgagattgcatttgaagtacgccccagatcctccagcggcaccctggttcatggacactcagtcaacggcgagtatctgaacgtgcatatgaaaaatgggcaggtgatcgtgaaggtgaataatggaattcgagactttagcacaagcgtcacaccaaaacaaagtttgtgtgatggccgctggcacagaatcaccgtcattagagactccaatgtggtgcagctcgatgtcgactccgaggtgaaccacgtggtcggacccctcaatccaaagcccatcgatcatcgcgagccagtttttgtcggcggggtgcctgagagcctgctcacaccgcgcctagcaccctcaaaacctttcactggatgcatccgccattttgttattgatggacacccggttagcttttccaaggccgcccttgtgagcggggccgtgagcattaactcatgccccgccgcttag

SEQ ID NO: 248292 - RNA, 5451 nt, synthetic construct
  misc_feature 1..5451: note = Description of Artificial Sequence: Synthetic coding sequence
  source 1..5451: mol_type = other RNA
atggccctgtcaagcgcctggagatcggttcttccactttggctgttgtggagtgccgcctgctcaagggctgcctctggtgacgacaatgcatttcctttcgatatagaaggatcatcagctgtaggcaggcaggatcctcccgagactagtgagcccagggtagcgcttggccggctgcctcctgctgctgagaagtgcaatgccgggtttttccatacactgagtggtgagtgtgtgccatgcgactgcaatgggaattcaaatgaatgcctggacggaagcggctattgcgtccattgtcaacggaacacgactggtgaacactgtgaaaaatgtctggacgggtacatcggagacagcatacgcggggcaccccagttctgtcaaccttgcccttgcccccttccccaccttgcgaatttcgctgagagctgttacagaaaaaatggcgccgtgcgctgtatttgtaatgaaaattacgcaggcccaaattgcgagcgttgcgcccctggatattacggcaaccccctgctgatcggaagcacgtgtaaaaaatgcgattgcagcggtaatagtgatcctaacttgattttcgaggactgtgatgaggtcacaggccagtgccgaaactgtctgaggaacaccaccggctttaaatgcgagcgttgtgcccctggctactacggagatgcgcgaatcgctaagaactgcgctgtgtgtaattgtgggggcgggccatgtgatagtgtaacaggggaatgccttgaggaaggctttgagcccccaactgggtgcgacaagtgtgtttgggatctgaccgatgccttgcggctcgctgctctatctatcgaagaaggaaagagcggtgttctgagcgtcagctctggtgccgctgcacatagacacgtcaacgagatcaatgcaaccatctacctgctgaagacaaagctgtccgagcgagagaaccaatacgcactgaggaagatccaaatcaataacgcagaaaatactatgaaatcactgctcagcgatgttgaggaactggtagagaaggagaaccaggcaagccgtaaaggccaactagtgcaaaaggaaagcatggacacgattaatcatgcttctcaactggtcgaacaggcgcacgacatgcgcgataagatccaagaaataaataataagatgctctattacggtgaagaacatgaactgagcccaaaagagatctccgaaaagcttgtcctggcccagaagatgctggaggaaattaggagcaggcagccctttttcacccaacgggaactagtagatgaggaggccgacgaggcctatgagctgctcagtcaggctgagagctggcagaggttgcacaacgaaacccgaaccctgttccctgttgtcctagaacagctggacgactacaatgccaagctttccgacctgcaggaggcgctcgaccaggccctcaactatgtgagagatgccgaggatatgaacagggcgactgccgctcgccagcgagaccatgagaagcagcaagagcgggttagagaacagatggaggttgtgaacatgtccctcagtacaagtgccgacagcttgacaaccccacgtctgaccctctctgaactggacgacataatcaaaaatgcttcaggcatctacgccgaaatcgatggtgctaagtcagaactgcaggtgaaactctccaacctgagcaatctctcccatgacctggttcaggaagcgattgatcatgcacaggacttacaacaggaagcaaacgagctgtcacgcaagttgcactcctccgatatgaatggtctggtccagaaggccctagatgccagcaacgtgtatgagaatattgtgaactatgtttcagaggcaaatgagacagctgagttcgctctgaacacaactgaccgcatctatgacgccgtttctggaatcgatactcaaatcatctaccataaagacgaatctgaaaacctcctgaaccaggcgagagaactacaggctaaggccgagtccagtagcgacgaggccgtggcagataccagtaggagagttggcggagccctggccaggaaatccgcgctcaagacacggcttagtgacgcagtgaaacaactacaggcagctgagcgaggcgatgctcagcagcggctcggacagtcgcggttgattacagaagaagctaacaggaccactatggaagtccagcaggccaccgctcccatggcgaacaatcttacaaattggagtcagaatcttcaacacttcgactcttctgcctacaataccgccgtgaattccgcaagggacgcagtgcgaaacctgacggaggtcgttccacaattgttggaccagcttagaaccgtcgagcaaaaaagacctgcttctaatgtgtctgcttcaatccaaagaatcagggaattgatcgcgcagacccgcagtgtggcatcaaagattcaggtcagcatgatgtttgatggtcagtctgcggtagaagtgcactcaagaactagcatggatgatttaaaggccttcaccagcttgagcctgtacatgaaaccacccgttaaaaggccagagctaacagagacggctgatcagtttatactgtacctgggctccaagaacgcaaagaaagagtacatgggtttagctatcaagaacgacaacctggtgtacgtgtataacttagggactaaagacgtggagatccctctagacagtaaacccgtgtcgtcttggcctgcatatttctcaattgtcaaaatcgaaagagttggcaaacacgggaaagtttttttgaccgttccctcattaagcagcactgccgaggagaaatttattaaaaagggcgaattttctggtgacgattccctactggatcttgaccctgaagacacagtattttacgttggtggcgttccttctaacttcaaactgcccacctctctgaacctgcctggatttgttggctgtctcgaactcgccaccctgaacaacgatgtgataagcctctacaactttaaacatatctacaatatggaccctagcaccagcgtcccatgcgcccgcgacaagctcgcctttacccagtctagagccgcctcctattttttcgatgggtctggctatgccgtggtcagagatattacacggcgaggcaagttcggacaggttacccggtttgatatcgaagtaagaacaccagccgacaacggactgatcctgcttatggttaacggaagtatgttctttaggctggaaatgcggaatggatacctccatgtattttacgacttcggcttctctggaggccccgtccaccttgaagacacactaaaaaaagcccagatcaacgacgctaagtatcacgagataagtataatttatcacaatgacaagaaaatgatcttggtggtggatcggcggcatgtaaagagcatggacaacgagaaaatgaaaattcctttcacagacatttatattgggggagccccgccagagatcctccagagtagagctctgagagctcatctgcctctagacataaactttcgcggctgtatgaaaggatttcaattccagaagaaagactttaatcttcttgagcagaccgaaactctcggtgtggggtacggttgtccagaagatagtctgatctctcgacgggcatactttaatggacaatcattcatagcctcaatccaaaaaatttctttctttgatggatttgagggcggattcaacttccggacactccaacctaatggattactgttctattatgcgtcaggatcagacgtgttcagcatttcactggataatgggaccgtcataatggacgttaagggaataaaggtgcaatctgtggacaaacaatataatgatggtctgtcccacttcgttatctcttcagtgtctccaacccgttatgaactcatcgtagacaagtctcgtgtcggtagcaagaatccgacaaaaggcaagatagagcagactcaggctagcgagaaaaaattctatttcggtgggtctccaatctccgcccaatacgccaacttcactggatgtataagcaacgcctatttcacccgtgtggaccgtgatgttgaggttgaagatttccagagatatactgaaaaggtccacaccagcctgtacgaatgcccaattgagtcatcaccactctttctgttacacaaaaaaggtaaaaatctgagtaagcctaaggcttcccaaaataaaaaaggcggaaaatctaaggatgctccgagctgggatcctgtggctctgaaattgccggagcgaaatacacctcggaactctcactgtcacctgtccaactctcccagggctattgagcatgcctaccagtatggagggacagcgaattcgaggcaagaattcgaacatttgaaaggagacttcggagctaagagccaattctccatcagactacgtacgcggagcagccacgggatgatcttttacgtgagcgatcaggaggaaaatgacttcatgacgctattcctggctcatggcagactggtgtatatgtttaacgtgggtcataagaagctgaagatcagatctcaggaaaaatacaatgacggcttatggcatgatgtcatattcattcgcgaaagaagttcaggacgcctggttatcgatggtttgcgggtgctggaggaaagtctcccaccaaccgaggctacatggaagattaagggccccatttacttgggaggagtggcccctgggaaggccgtgaaaaacgtccaaattaatagcatctacagcttttcaggctgcctaagtaacttacagctcaacggagccagtattaccagcgctagtcagacattctccgtcacgccttgttttgaggggcctatggagacaggcacatacttcagcaccgaaggggggtacgtggtcttagacgaatcctttaatatcggactgaagtttgagatagcattcgaagtaagacctcggagttcgagtgggacactggttcacggacacagcgtgaatggtgaatacttgaacgtgcacatgaaaaatggccaagttatcgtgaaagtgaataacggtatccgggacttcagcacttccgtgactcctaagcagagcctatgtgatggccggtggcataggattaccgtcatccgagatagcaacgtcgtccagctcgacgttgactccgaagtcaaccacgtggtaggccctcttaacccgaagcctatcgaccaccgggaacctgtgtttgtcggtggcgtgccagagagccttcttactccgaggctcgcaccctccaagccatttaccgggtgcatccgccactttgttatcgacggacaccccgtgtctttcagcaaggccgcgctggtcagcggcgccgtgagcattaactcttgccctgctgcctag

SEQ ID NO: 248293 - RNA, 390 nt, synthetic construct
  misc_feature 1..390: note = Description of Artificial Sequence: Synthetic coding sequence
  source 1..390: mol_type = other RNA
atggccttaagtagtgcctggcggtcggtcttaccactctggcttttgtggagtgctgcgtgttcacgggctgcctccggcgacgataacgcttttccctttgatatcgaaggctcatctgcagtcgggcgacaggatcccccagaaacaagtgaacctagagtggccttggggcggctaccccccgcagcagaaaaatgtaacgccggattcttccatacactctcaggggaatgcgtcccgtgtgactgcaatggcaatagtaatgaatgccttgacggtagtggctattgtgtaactaccgacggcgaggaccctgggtttagcgccagtgcactctcatttatcctctcttcacaaggcgcacgggaagctcgcgctccaacatag

SEQ ID NO: 248294 - RNA, 363 nt, synthetic construct
  misc_feature 1..363: note = Description of Artificial Sequence: Synthetic coding sequence
  source 1..363: mol_type = other RNA
atggccttatctagtgcttggcgttcggttctgcccctgtggctactgtggtccgcagcatgttctcgggccgcatcaggtgatgacaatgcctttccatttgacatcgagggttcctccgctgttggcaggcaagatcctcctgaaacttcagaaccacgggtggccttgggcaggctcccaccagccgcagaggtacagtgtccctgccattgccaccccgccggagctcccgctcccccccgtgccgtgccccattctagtttttctctaagtccacccctcagctcaccacagtgtctcgagtctttcacctgggcccgctccgtgcgcaaattggagatcaagtcattcccactttag

SEQ ID NO: 248295 - RNA, 1125 nt, synthetic construct
  misc_feature 1..1125: note = Description of Artificial Sequence: Synthetic coding sequence
  source 1..1125: mol_type = other RNA
atggcgctgtcaagtgcatggcggtcagtgctacccctgtggctgctatggtcagctgcctgtagcagagctgcttctggcgacgataatgccttcccctttgacatcgagggatcctccgccgtggggaggcaggacccaccagagacttctgaacctcgggtcgctctaggacggctgcccccagctgcagaaaaatgcaatgctggctttttccacacactttccggggagtgcgtgccctgtgattgtaacgggaattccaacgaatgccttgacggttctgggtactgtgttcattgtcagcggaatacaaccggtgagcactgcgaaaaatgtctggacggctacataggtgactctatcagaggtgcccctcagttttgtcaaccctgtccttgtccacttccccacctggccaactttgctgaaagctgttatagaaaaaatggggccgtaaggtgcatttgcaacgagaactacgcaggccccaactgcgaaaggtgtgcccccgggtattacggaaatccgctacttattggctcaacctgtaaaaagtgcgattgttctggcaactcagaccctaacctaatcttcgaggactgtgacgaggtgacagggcaatgtcggaattgtctccggaatactactggatttaagtgtgagaggtgcgcacctggttactatggggatgctagaatcgcaaagaactgtgccgtttgcaactgcggcggaggcccatgtgacagcgtgactggagaatgcctggaggaggggttcgagccaccgactggtatggattgtcctacaatttcttgtgataaatgtgtctgggatttgactgatgcattgaggctagccgccctgagcattgaagagggaaagtctggcgtcctgagtgttagttcaggggcggcagctcacagacatgtgaacgaaatcaacgcaaccatctacctgctgaagactaagctctccgagagagaaaaccagtacgcactcagaaagattcagataaacaatgcagagaacactatgaaaagtctcctgtctgacgttgaggaactcgttgagaaacattggaataagccgagacgccgcctggaacttcaggaaggcgtttag

SEQ ID NO: 248296 - RNA, 363 nt, synthetic construct
  misc_feature 1..363: note = Description of Artificial Sequence: Synthetic coding sequence
  source 1..363: mol_type = other RNA
atggctttgagctcagcttggcggtcagtactgcccttatggctactttggtccgccgcttgctcacgggccgcctcaggagacgacaatgcctttccttttgatatagagggttcctcagccgtaggcaggcaagatccacctgaaacctccgaaccccgcgtggctctgggaagactgccgcccgctgctgaagttcagtgtccttgccactgccatcctgctggcgcccctgcccccccacgcgctgtgccacattcatctttctccttaagtccaccgctctccagcccccagtgtcttgaatctttcacctgggccagatcagtccggaaactggaaattaaatcgtttcctttatag

SEQ ID NO: 248297 - RNA, 324 nt, synthetic construct
  misc_feature 1..324: note = Description of Artificial Sequence: Synthetic coding sequence
  source 1..324: mol_type = other RNA
atggctttgtcttccgcatggagaagtgtgttgcctctgtggttactgtggagtgctgcctgttcccgcgccgcatccggagacgataacgccttcccatttgatatcgaagggtcctctgctgtaggccgacaggatccacctgaaacaagcgagccacgagttgctctgggccgcctgcctccagccgccgagaagtgcaatgcaggtttcttccatactctgtcgggcgagtgtgttccctgcgattgcaatggcaatagcaacgagtgtcttgacggttcgggatactgcgtccactgccagagaaacactactgggtag

SEQ ID NO: 248298 - RNA, 996 nt, synthetic construct
  misc_feature 1..996: note = Description of Artificial Sequence: Synthetic coding sequence
  source 1..996: mol_type = other RNA
atggcccttagtagtgcttggcggtcagtactgcccctgtggctgttgtggtccgccgcatgctcacgtgctgcgagcggcgacgataatgcctttccctttgacattgaaggtagtagtgccgtcggaaggcaagatccacccgagacatctgagccaagagtagcactagggcgcctcccaccagcagctgaaaagtgtaacgcaggcttttttcacacattaagcggagaatgcgttccttgtgattgtaacggtaattcaaacgagtgtttagatggctcggggtactgcgttcactgtcaaaggaacactaccggcgaacattgcgaaaagtgtctggatggttatatcggcgattccattagaggggccccacagttttgccagccttgcccgtgtcctttaccccacctggctaattttgcagaaagttgctatagaaagaatggcgctgtgcgctgcatttgcaacgaaaactacgccggtcccaattgcgagaggtgcgctccgggctattatggcaatcccctcctgattggatctacttgtaaaaagtgcgactgcagtggcaattcagacccaaatctgatcttcgaggattgtgacgaggtgactggacagtgccgcaactgtctcagaaacacaacaggtttcaaatgtgaacggtgcgctccaggctattacggagacgcgagaatcgccaaaaattgtgctgtgtgcaattgtggaggcggcccatgtgattctgttaccggggaatgcctggaggaaggatttgaacctcccaccggcatggactgtcctacaatcagctgtgataaatgcgtatgggatctaactgacgctctgcggttagccgccctttctattgaagagggcaaatcaggagtgctgagtgtgtcttccggggctgccgcccaccgccatgttaatgaaatcaatgccaccatctacctcttgaaaaccaaattgagcgagcgcgaaaatcagtag

SEQ ID NO: 248299 - RNA, 246 nt, synthetic construct
  misc_feature 1..246: note = Description of Artificial Sequence: Synthetic coding sequence
  source 1..246: mol_type = other RNA
atggctctttcctccgcttggcgttctgttctgcccctctggttgctgtggtcagcagcatgctcaagggctgcgtcgggagatgacaacgcttttccgttcgatattgaagggtcttcagcagtaggacggcaggatcctccagaaacctcagagccccgcgtagcattaggacgcttaccccctgcagcggaaaaatgcaacgccgggttcttccacacattgtccggtgagtgcgtaccctag

SEQ ID NO: 248300 - RNA, 5451 nt, synthetic construct
  misc_feature 1..5451: note = Description of Artificial Sequence: Synthetic coding sequence
  source 1..5451: mol_type = other RNA
atggctctgtcgtcagcgtggaggtccgttcttcctctgtggttgttatggtcggctgcctgctcaagagccgcatcaggggacgacaatgcctttccttttgatatcgaaggatcatccgcagtagggaggcaggatccccctgagacaagcgagccccgggtggcgctaggtcgcttaccccctgctgcagaaaaatgcaacgccggattcttccacaccctgtctggggagtgtgtaccctgcgactgtaatggcaactccaacgagtgtttagacggctcaggatattgcgtccattgccaacgaaacactacgggagagcactgcgaaaagtgcctggacggatatatcggtgattctatcaggggagcccctcaattttgccagccgtgcccatgtccactgccacatttagctaatttcgccgaatcatgttatagaaaaaacggagccgtccgctgcatttgtaatgagaactatgccggccctaactgtgaacgatgtgcccctggttactatggaaaccccctgttaattggttctacttgcaagaaatgtgattgcagtgggaactccgatcccaatctcattttcgaagattgcgatgaagtcaccggccaatgtcggaattgcctgcgtaacaccaccggattcaagtgcgagcgctgcgctccaggttattacggagacgccagaatagccaaaaactgtgctgtgtgtaattgcggtggcggcccctgcgatagtgtcactggtgagtgtctggaggaagggttcgaaccccccacagggtgcgacaagtgtgtctgggacctgactgatgcattgcgactggcggcattgtcaattgaagaaggaaagtcgggcgtcctttcggtatcaagcggggccgccgcccacaggcatgttaacgagatcaacgcaacaatttacctactgaaaacaaaactgtccgaacgggaaaaccaatacgccctcagaaaaattcagatcaataacgctgaaaacacaatgaaaagcctcctgagcgatgtggaagaactggtcgaaaaagaaaatcaggcgagcagaaagggccagctggtacaaaaagaatcaatggataccatcaaccatgcctcacagctggtcgagcaggcgcatgacatgcgcgataaaatccaggagatcaataacaagatgctgtattacggagaggaacacgaactaagcccgaaggaaatctcggagaaacttgtacttgcccagaagatgttggaagagattcggagcaggcaaccattttttacacaaagagaactcgtcgacgaggaggcagacgaagcttatgagctgctttcccaggctgagagctggcagcgcctgcacaatgagactagaactctgttccctgtggtgctcgaacagctggacgattataacgcaaaactctcagatctccaggaggcgctggatcaggctctgaactatgtgagggatgctgaggatatgaatcgcgccactgcagcccgccagagagatcacgaaaagcagcaggagagggttagggagcagatggaagtagtgaacatgtctttatctactagcgcagactctctcacaacccctaggctaaccctgagtgaactcgacgacatcattaagaatgcgtctggtatttacgccgagattgatggtgccaaatctgagcttcaggtcaaacttagcaacctttcaaacctttcccatgacctggttcaggaagctatcgaccacgcccaggacctccaacaggaagcaaacgaactgagccgcaaactgcatagctctgatatgaatggtctggtgcagaaagctttggatgcttcaaacgtgtatgagaatatcgtgaactacgtaagcgaggccaatgaaaccgcagagtttgcactgaacacaaccgatcgcatctacgatgctgtgtccggtatagacactcagataatataccacaaggacgagtccgagaacctgctcaaccaggcacgcgagctccaggcaaaggccgagagttccagcgacgaggccgtagcagacacaagccggcgcgtgggaggagccctggcccggaaatcggcactcaagacccgcttgtccgatgccgtgaagcagctgcaagctgcggagagaggtgatgcacagcagagactaggtcagtccaggctgattaccgaggaggctaataggacgactatggaagttcagcaggcgacagcacccatggccaataatctaactaactggagccagaacttacaacactttgacagttctgcttataacacggccgtcaactcagccagagacgctgtacgaaatctgacagaagtggtaccccagctgttggaccagctgcgcactgtggagcagaaacgccccgcaagcaacgtctctgcttcgatccaaaggattagggagctgatagcacagacgaggtctgtggccagcaaaatccaggtatcaatgatgttcgacggacaatctgcggtagaggttcatagcagaacatcaatggatgatttaaaagcgtttacttccctgtcgctctacatgaagccgcctgtgaaaaggcccgaattgaccgagaccgcagatcagttcatactttacctggggtccaagaatgccaagaaggaatatatgggccttgctatcaaaaacgataatttggtgtacgtttacaatcttggaactaaagacgtggagatccccctggacagcaaaccggttagttcatggcccgcttacttctctatcgttaaaatagaaagggtcggcaaacacggaaaagtgttcctaacagtgccaagcctctctagcacagccgaagagaaattcattaaaaaaggggagtttagtggtgacgattctcttcttgaccttgaccccgaggacactgttttttacgtgggaggggtcccctcaaatttcaagctgcccaccagcttgaatcttcctggctttgtcggctgtcttgagctcgcaactctaaataatgacgtgatatctctgtacaactttaagcatatctataacatggaccctagcacctctgtcccatgcgctcgagataagctggccttcacacagtcacgcgctgcatcttatttcttcgatggcagcggttacgctgttgtgagagatattaccaggagaggtaagtttggacaagtgaccagattcgacatcgaggtgaggacgcccgccgacaatggcctgatactactaatggtgaatggatccatgttctttcggcttgagatgagaaacggatacctgcacgtgttttatgactttgggttcagcggagggcccgtacacctggaggacactctgaaaaaagcacagatcaacgatgctaaatatcacgagatttctattatctaccacaatgataaaaagatgatactggttgttgatcggcggcatgttaaaagcatggataacgagaagatgaaaatacccttcacagatatttatataggaggtgcgccacctgaaatcctgcagtctcgggctctcagagcgcacctccctttagacattaattttcgcgggtgtatgaaaggcttccaatttcagaagaaggatttcaatctactcgagcagacagagacgctgggagtcggatacggctgccccgaagactccctcatttcacggagggcttatttcaatggacagagttttattgcaagcattcaaaagatttcttttttcgacggattcgaaggcggctttaattttcggacactgcaacccaacggacttcttttctattacgcatcagggagtgacgtgttctcgattagccttgataatggaacggtgatcatggatgtcaagggaattaaagtccagtccgtagataagcagtataatgacgggctgagccatttcgtcattagttctgtatcacctacgcggtatgagctgattgtagataaatccagggtggggtcgaagaacccaacgaagggaaagattgaacagacccaagcatccgaaaaaaaattctattttggcggcagcccgatatccgcgcaatatgcaaacttcacaggatgcatcagcaacgcatatttcaccagggtagacagggacgtggaagtggaggattttcagcgctatactgaaaaggttcacacctcactgtacgagtgtcccatcgagagtagcccactatttctgctgcataagaagggtaagaaccttagtaagcccaaagctagccaaaacaagaagggcggcaaatcgaaagacgcaccaagctgggaccccgtggctttaaagcttcctgagcggaatacgcctcgtaacagccactgccatctgagcaattcaccacgggccatcgaacatgcataccagtacggagggaccgccaattcccggcaggagtttgagcatctcaagggagatttcggagccaaatcgcagttttccatccgcctcaggacaagatcttcacatggcatgatcttctatgtgtccgaccaggaagagaatgactttatgacactcttcttagcacacggccggttggtgtacatgttcaacgtgggtcacaaaaaactcaaaatcagaagccaggaaaagtataacgacggactgtggcatgacgtgatcttcataagagaaaggtcaagcggcaggttggttattgatggactgcgcgtgttggaagagagcctaccaccgacagaggcgacctggaaaattaaagggccaatctacctgggcggcgtggcccctgggaaagccgtgaaaaacgtgcagataaattccatttatagcttttctgggtgcctgtccaacctgcagctcaatggcgcaagcatcacctctgcatctcagaccttctccgtgacaccctgttttgaaggccctatggaaacaggcacttacttttctacggagggaggatatgtcgttctggacgagagcttcaacatcggattaaagtttgagatcgcattcgaagttcgccctcggtcctctagcggcactcttgtgcacggacactcagtgaacggagaatacctgaatgtgcacatgaagaatggacaagttattgtgaaggtcaacaacggcatccgggacttctcaacaagcgtcacacccaagcagtccctatgtgatgggcggtggcatcggatcacggtcatacgggattccaatgtggtgcagctagatgtagactccgaagtgaatcacgtggtgggtcctttgaatcctaagcctatcgatcatcgcgaaccggtttttgtggggggcgttcccgaaagccttttaactccacgtctggccccatctaaaccattcaccggctgtatacgccatttcgtgatcgacggccatcccgtgtcgttttccaaggccgctctcgtctctggcgccgtgtcgatcaattcttgtccggccgcttag

SEQ ID NO: 248301 - RNA, 975 nt, synthetic construct
  misc_feature 1..975: note = Description of Artificial Sequence: Synthetic coding sequence
  source 1..975: mol_type = other RNA
atggccctatcgagtgcttggagatctgtgctgcccttatggctgctgtggtcagccgcctgcagtagggcagcatctggtgacgacaatgctttcccttttgacattgaaggatctagcgctgttggaagacaggacccaccggagacatctgaaccgagagtggcgctagggagactgccacccgccgccgaaaaatgcaatgccggattctttcataccctgtcaggagaatgtgtcccttgtgactgtaacgggaactctaacgagtgtttggacggttccggctactgtgtccactgccaacggaatactaccggagaacattgcgagaaatgtttggatggatatatcggcgatagtattcgcggcgccccacagttctgccagccgtgcccctgccctctgccgcatttggctaacttcgccgagtcatgttacaggaaaaacggagccgtacgctgcatatgcaatgaaaattacgctggccccaattgcgaacgttgcgctccaggctattatggcaatcctctcttgatcggctctacgtgtaagaagtgcgactgttcaggtaactccgatcctaacttgatctttgaagactgtgatgaagtgactggacagtgccgaaattgtctgagaaacacaaccgggttcaagtgtgagaggtgtgccccaggttactacggagacgctaggattgctaagaactgcgccgtttgtaactgcggcggggggccatgcgattccgttactggagaatgcctggaagagggctttgagcccccgaccggttgcgacaaatgcgtttgggacttaacagatgccctccgcctcgccgccctgtctatagaagaaggaaaatctggggtgttgagtgtctcaagcggcgcagcagctcatcgacatgttaacgagataaatgctactatatatctactcaaaaaaacgaaacagaagaataacaagaagtag

SEQ ID NO: 248302 - RNA, 276 nt, synthetic construct
  misc_feature 1..276: note = Description of Artificial Sequence: Synthetic coding sequence
  source 1..276: mol_type = other RNA
atgggtctgctccaactgctggccttctcatttcttgctttgtgcagagctcgcgttcgcgcccaggagcccgagttctcctacggttgtgccgagggctcttgttatcctgctacaggtgatctgttaatcggccgcgcccagaaacttagtgtcaccagcacatgcggattacacaaaccagaaccttattgcattgtgtctcacttacaagaggataaaaagtgcttcatctgcaactcccaggacccttaccatgagacactgaacccttag

SEQ ID NO: 248303 - RNA, 2553 nt, synthetic construct
  misc_feature 1..2553: note = Description of Artificial Sequence: Synthetic coding sequence
  source 1..2553: mol_type = other RNA
atgggactgctacaactgctagccttttctttcctggccctatgtcgggcccgtgtcagagcgcaggaaccggaattttcctatgggtgcgccgaagggagctgttacccagcaaccggagatttactgatcggccgggcacagaaactcagcgtcactagcacctgcggtctccataagcctgagccatactgtatagtatctcatctgcaagaagacaagaagtgcttcatctgcaattcccaggatccctatcacgagacactcaatcctgacagccatctcatcgaaaacgttgttaccacctttgctccaaacaggttgaaaatctggtggcagtccgagaacggtgttgagaacgtcactatccagttagatttggaggctgagtttcacttcacccatcttattatgaccttcaagactttcaggccagcagctatgcttatcgaaagaagttcagacttcggcaagacttggggtgtgtataggtattttgcttatgattgtgaggcgtcgttccctgggatatccactggacctatgaaaaaagttgatgatattatctgcgactctcggtactccgacattgagccttccactgaaggcgaggttattttccgggcactggaccccgcattcaaaatagaggatccttattctcctaggattcaaaacctgctgaaaatcactaatctcagaattaagttcgtgaaactccacacactgggggataacttgctggattcaagaatggaaattcgtgagaaatattactacgctgtatatgacatggtggttcgagggaattgcttctgttacggtcacgcctctgagtgcgcacccgttgacggttttaacgaggaagtagaggggatggtccatggccactgcatgtgtcgccacaacacaaagggcttgaattgcgagctatgtatggatttttaccatgacttgccctggagacccgcagaaggccgcaacagtaatgcctgcaagaagtgtaattgcaacgaacatagcattagttgccacttcgatatggccgtgtacctggccactggcaatgtctctggtggtgtctgtgacgattgccagcataataccatgggccggaattgcgagcagtgcaaacccttctactatcagcaccccgaaagagatattcgggaccctaatttctgtgagcggtgcacttgcgatcctgccggctcccagaacgaaggaatatgtgactcctacaccgattttagtactggtcttatcgctggacagtgccggtgcaaattgaacgtggagggggagcactgtgatgtatgtaaggaaggattttatgatttatcatctgaggacccattcggctgcaaatcctgcgcctgtaatccactgggaacaatacctggtggcaacccctgcgacagcgagaccgggcattgttattgcaagcgactggtcacgggtcagcattgtgaccagtgcctacctgagcattgggggctgtccaacgatttggacggttgtagaccctgcgattgcgatcttggaggggccctcaataacagttgctttgccgagagcggacagtgttcatgccggcctcatatgatcgggcggcagtgcaacgaggtcgaacctggctactactttgccactttggaccactacctttacgaggctgaggaggcaaacctcggtccaggtgtgagtatcgtggaaaggcagtacattcaggataggatcccctcctggactggagccggattcgtcagggtgccagaaggtgcctatctggagtttttcattgataacatcccttatagcatggaatacgacatcctcataagatacgagcctcagctacccgatcactgggagaaagcagttataaccgtgcagcggcccggaaggatccctacgtcatcccggtgcggcaacactatccctgacgatgacaaccaagtcgtgtccctgtcaccaggcagccgctacgttgtattgcctagaccagtatgcttcgagaaaggtaccaattatacggtcaggttagagttgccccagtatacatccagtgacagcgacgtagaaagtccttatactctcatcgattcactggtcctgatgccatactgtaagagcttagatatttttactgtggggggttcaggcgatggtgtagttactaattccgcctgggaaacctttcagcggtacagatgccttgagaactctcgctctgtcgtgaaaacaccaatgactgacgtatgcagaaacatcatctttagtatctctgctctgcttcaccagaccggactggcctgtgagtgcgatccccagggatctctgtcttctgtctgtgatcccaatggaggacagtgtcaatgtagaccgaatgtggtcgggcgcacctgcaatcggtgtgctccgggtaccttcggctttggcccctccggctgtaaaaggcggtttctgaagtcaatagtcatgcactctttcagactcacgcagccgctgtggcagggctccattgctgcagaaccaatgcttcctagttag

SEQ ID NO: 248304 - RNA, 3912 nt, synthetic construct
  misc_feature 1..3912: note = Description of Artificial Sequence: Synthetic coding sequence
  source 1..3912: mol_type = other RNA
atgccagggccgagaggggcggccggaggccttgctccagagatgcggggtgccggcgccgctgggcttctcgctctgcttcttctgttgcttttgctgttactcggtcttggtggacgggtggagggagggcccgcaggcgagcgcggagccggcggtggcggtgcactcgctcgagaaaggttcaaggtggttttcgctccggtgatttgtaagcggacttgcttaaagggacaatgtagagattcatgccagcagggatcaaacatgaccctgattggcgagaacgggcattctacggatacgctaacaggctcggggttccgcgtggtggtttgccccctgccatgcatgaacgggggacagtgctccagcaggaatcagtgtctctgtcctcctgactttacaggaagattttgtcaggttcccgcaggtggcgccgggggagggactgggggatctgggccaggattgtccagaaccggagccctcagcactggggcccttccaccccttgcacctgaaggagattcggtcgccagtaaacatgctatctacgccgtgcaagtgatcgccgaccctccaggtccaggtgaaggaccacccgcccagcacgctgctttccttgttccccttggacccggacagatttccgcagaagtgcaagcacctcctccagtggtgaatgtgcgagtgcaccatccacctgaggcttctgtgcaagttcaccggattgaatcctcgaatgctgaatctgcagctcctagccaacaccttctgcctcaccctaaacctagccatccccggcccccaactcagaaacctctgggcagatgtttccaagatacactaccgaaacaaccttgcggcagtaacccattgccaggtctcacgaaacaggaggactgctgtggatccatcggcaccgcctgggggcaatccaaatgtcacaagtgcccgcagctgcaatataccggcgtgcagaaacccggcccagttagaggagaagtcggcgccgactgtcctcagggctacaagagactgaactccacgcactgccaagatatcaacgaatgcgccatgcccggagtgtgccgacacggcgattgcctcaacaaccctggcagttaccgctgcgtgtgtcctcccggtcattccttgggtccttcgcggacacagtgcatcgctgataaacctgaagaaaagtccctgtgttttaggctggttagtccggaacatcagtgtcagcaccctctaactacgcgtttaacaagacagctgtgctgttgctctgttggtaaggcttggggcgcccgatgtcagcgttgcccaaccgacgggacagccgcctttaaagagatttgtcctgcaggaaaaggctaccatattttaaccagccaccagactctgaccattcagggagaatctgattttagccttttcttacacccagatggtccaccaaaacctcagcaattgccagaatcaccatcacaggcgcctccccccgaggacacggaggaggagagaggtgtcactaccgacagccctgttagcgaggagcgcagtgttcagcaatcccatccaactgcaaccacgactccggcccgcccttaccccgaattaatcagtaggcccagccctcctacgatgcggtggttcctacctgaccttcctcccagtcgaagcgctgtcgaaatcgcccccacccaggtcacagagactgatgagtgtcggctgaaccaaaacatctgtgggcacggggaatgtgtcccaggtccgcccgactatagttgtcattgtaatccaggatatcgatctcatcctcaacaccgctactgcgtggacgtgaacgagtgcgaagccgagccatgcggccccggccgggggatctgcatgaacacaggcggatcctacaactgccattgcaacagaggctacaggttacatgtaggggcgggcggcaggtcttgcgtggatctcaatgagtgcgctaagccacatctttgcggagacggaggattctgcattaattttcccggacactacaagtgcaactgctaccccggatacaggctgaaagcttctagacctcctgtctgcgaggacattgatgaatgcagagacccatcctcctgtccagatggaaaatgcgaaaataagcctggatcctttaagtgtatagcttgtcagcccggctaccgctctcaaggagggggggcctgtagggatgtaaatgagtgtgcagagggaagcccttgctcgcctggttggtgtgagaaccttcctggttcctttagatgtacatgtgctcagggttatgctcccgctccggatggcagaagctgtctggatgtggacgagtgcgaagccggcgatgtgtgtgacaacggcatctgcagtaacacaccggggtccttccaatgtcagtgcctgtctggctatcacttaagccgggatcgttcacattgtgaagatattgacgaatgcgactttcccgcagcctgcattggcggcgactgcattaataccaatgggtcctaccgctgcttatgccctcagggtcaccgcctggttggcggccggaagtgtcaggatatcgatgagtgttcacaagacccttccctgtgcctgcctcatggcgcatgcaagaacctgcagggctcctacgtttgcgtgtgtgatgagggctttacgcctacccaggaccagcacggatgtgaggaagtcgaacagcctcaccataaaaaggagtgttatctgaatttcgacgacacggtcttctgtgactccgtcctggcaacaaatgtaacgcaacaagagtgttgctgctctctgggtgcgggatggggcgaccactgtgagatctacccctgcccagtatattctagcgcagagttccattccctgtgtccagatggcaaagggtatacccaggataataatattgttaattatggcatccccgcccaccgtgatatcgatgaatgtatgctattcggatcggagatctgcaaggaaggcaagtgcgtcaatacacaacccggctatgagtgttactgtaagcaggggttctattacgacggcaacttgcttgagtgcgttgacgtagacgaatgtctggacgagtctaactgccgcaacggggtctgtgagaatacccgagggggttatcgttgcgcctgcactccaccggccgaatattcacccgcccaacgtcaatgcctttctccggaagagatggatgtggacgagtgtcaggatcctgcagcatgtcgccccggcaggtgcgtcaacctgcctggatcataccgctgtgaatgcaggcctccgtgggtgccgggcccgtcgggacgtgattgccagctacccgaaagcccagctgaaagggctccagagcgtcgggatgtgtgttggagtcagcgaggtgaggacggtatgtgcgcaggccccctagcaggaccagccctaactttcgatgattgctgctgtcgccagggcaggggttggggagcccagtgccgtccctgcccgcctcgaggcgctggaagccactgccccacaagccagtcagagagcaattccttttgggacacttcccccttactccttggtaagccacctagggatgaggactcaagcgaagaagactcagacgaatgccggtgtgtgtccggccgctgcgtccctcggccgggaggagccgtgtgcgaatgtccggggggtttccaactggacgctagccgtgctcggtgcgttgatattgatgaatgcagagagcttaaccagagagggctcctgtgcaagtctgagaggtgcgtgaacacatctggcagtttccggtgtgtgtgcaaagctggatttgcaagaagccgtcctcatggggcatgtgttcctcagagaaggcggtag

SEQ ID NO: 248305 - RNA, 792 nt, synthetic construct
  misc_feature 1..792: note = Description of Artificial Sequence: Synthetic coding sequence
  source 1..792: mol_type = other RNA
atgttgttcggaagcgagatctgtaaggaagggaagtgtgtgaacacccaacctgggtatgagtgctactgtaagcagggtttttactacgacggaaatctccttgaatgcgtggatgttgacgaatgccttgatgagtccaattgccgcaatggcgtatgtgagaatacacgtggcggttacagatgcgcctgcacccctcctgccgagtattccccagcacaacgccagtgcctatcacctgaagaaatggacgtagacgagtgtcaggatccggcagcatgccgccccggccgctgcgtcaatctgcctggctcatatcgctgtgaatgccggccgccctgggtccctggaccatcaggccgtgattgccaactgccggaatcccccgccgagagagcccctgagcgaagggacgtctgttggtcccaacggggcgaagacgggatgtgcgccggtcctctggcagggcctgccctcacttttgacgactgctgctgtagacaaggccgtggttggggcgcccaatgtagaccgtgtccaccacgaggggcaggaagccattgtccaacaagtcaaagtgaatctaattctttctgggacacaagtcctctgctcctgggaaagccgccaagggacgaagactccagtgaggaggatagcgatgaatgtagatgcgtgtctgccgcggcttgtcggggtcgagccgctccttgcgcctccgtccccgccgcaagcagctcgactccgccagccccagccgcctggattagcacttctgccgagagctag

SEQ ID NO: 248306 - RNA, 3771 nt, synthetic construct
  misc_feature 1..3771: note = Description of Artificial Sequence: Synthetic coding sequence
  source 1..3771: mol_type = other RNA
atgccgggcccaaggggagctgccggaggtctcgcacctgagatgcggggagcaggagcggccggactcctcgcactcctgcttctgcttcttctcctacttttgggcttgggcggccgggttgaaggcgggcctgcaggtgaacggggcgccggcggcggcggcgcactcgctagagaaaggttcaaagttgtgttcgcaccagtcatatgcaagaggacttgtctcaagggtcagtgtcgtgactcttgccagcagggcagcaacatgacactgattggagagaatggacattcaacagataccctaacaggctcaggctttcgtgtcgtcgtgtgcccattaccatgcatgaatggtggtcaatgtagctctcggaatcagtgtttgtgcccaccagacttcacaggccgcttctgccaggtacctgccgggggtgcaggtggcggcacaggaggaagcggcccagggctcagccggaccggcgcactctccacaggggctctgccccctctggctcccgaaggggacagtgttgcctccaaacacgcaatctatgcagtgcaggtaattgccgatccccctggcccaggcgaaggacctcccgcacaacacgctgcatttctggtgcccctcggtcctggccagataagcgccgaggtccaagctccccccccagtggtgaacgttcgcgtacatcatccacccgaggcttcagttcaggtgcatagaattgagtcttcgaatgctgaaagcgcagccccaagccagcacctgctcccacacccaaagccctcccatcccaggccgcctacccaaaaaccgctcggacgctgttttcaggacacactcccaaagcagccttgtggttcaaaccccctccctggcctaactaaacaggaggactgttgtgggtctattgggacagcctggggccagagtaagtgtcataaatgtccccaattgcagtataccggtgtccagaaacccggccctgtgagaggagaggtaggggcggattgcccacaggggtataaaagactcaacagcacacactgtcaggacatcaatgagtgtgctatgcccggggtctgtaggcacggagactgtttgaataaccccgggtcatacaggtgcgtgtgccctcccggacattccctgggtccatctcggactcaatgtatagccgataagcccgaggagaagagcctgtgtttccgattggtcagtcctgagcatcaatgccagcatcccctgactactcggctaactcgtcagttatgctgctgttccgtggggaaggcctggggagctcgctgccagaggtgtcccacagatgggacagccgcattcaaagaaatttgtcctgcagggaaaggttaccatattctcacctcccatcaaactcttaccatccagggcgagtccgacttcagcttgttcttgcaccctgatggaccccctaagccccagcagctgcccgaatctccatcccaagcgcctccccccgaagacaccgaggaagagagaggagtcaccacagacagccctgtcagtgaagagagatctgtacagcagagtcatcctaccgcgacaaccacacctgccagaccgtaccctgagttaatcagcagaccctctccccctaccatgaggtggtttctaccagacctacccccttctcgctcagcagtggagatcgctcctacacaggttacagaaacggacgagtgcaggctgaatcagaatatctgcggccacggcgagtgtgttcccggccctccagactatagctgccactgcaacccaggctaccggtcgcacccacaacaccggtactgcgttgacgtgaacgagtgtgaggcagagccctgcgggcctgggagaggaatctgtatgaatacaggaggaagctataattgccattgtaaccggggataccggctgcacgtcggagctgggggacgatcctgtgtggacctgaacgaatgcgctaaacctcacctctgtggcgacggtggtttttgtataaacttccccggacattacaaatgcaactgttatcctggttaccgactaaaggcctcaagacctcctgtgtgcgaagatattgacgagtgcagagacccgagcagttgccccgacggtaagtgtgagaataaaccggggtcctttaagtgcatcgcgtgtcagccaggctaccgaagtcaaggggggggcgcctgccgtgacgtcaatgagtgtgcagagggcagtccttgcagtccgggatggtgtgagaacttaccgggctccttcagatgtacctgtgcccaaggctacgcgcccgctcctgacggaagatcatgcttagatgtcgatgaatgtgaggcaggcgacgtgtgcgacaacggtatctgctccaatacgcctgggtctttccaatgccagtgcttgagtggttaccacctgtcaagagatcggtcccattgcgaagacatcgacgaatgtgacttcccggcagcatgcatcggcggagactgtattaataccaatggcagctatcggtgcctctgcccccagggacaccggctagtggggggccggaagtgccaggatatagatgaatgttctcaggacccctcactttgcctcccgcacggggcatgtaagaacctgcagggcagctacgtttgcgtgtgcgacgaggggttcacccctacccaagatcagcatggctgcgaggaagttgagcagccacaccacaaaaaggagtgttacctgaactttgatgataccgtgttttgtgactctgtcctcgccacaaacgtgactcaacaggagtgttgttgctcattaggtgctggatggggcgaccactgtgagatatatccatgtcccgtctattcctctgccgaatttcactccctgtgtcccgatggcaaggggtacacacaggacaataacatcgtgaactacggaattcccgcccatcgcgacatcgatgaatgtatgctgtttgggagcgagatttgtaaggagggcaaatgtgtaaatactcagccaggttatgagtgctactgcaagcaagggttttattacgacggaaatctccttgaatgcgttgacgtcgacgagtgcctggacgagtccaactgccgaaatggggtttgtgaaaacactaggggaggctatagatgcgcatgcacaccacctgccgagtattcccccgcccaaaggcaatgtcttagcccagaggagatggaaagggcccccgaacgcagagacgtgtgttggagccagcgtggcgaggacggaatgtgtgcggggcccctggctggacctgcactgaccttcgacgactgctgctgccggcagggcaggggctggggggctcagtgtagaccatgcccacccaggggtgccggttcccactgtccaacaagtcagtctgaatccaactcgttctgggacactagccctcttcttctgggtaaacctccgcgtgacgaggactcatctgaagaagatagcgatgaatgccgctgtgtgagtggccggtgtgtccccagacccggtggtgccgtatgcgaatgtcccggcgggttccagttggatgcctcacgagcaaggtgtgtggacatcgacgaatgcagagagctaaaccagagggggcttctctgtaaaagtgagagatgcgtcaacacttccggctccttcaggtgtgtctgtaaagccgggttcgccaggagtcggcctcatggagcttgcgtcccacagcggagacggtag

SEQ ID NO: 248307 - RNA, 921 nt, synthetic construct
  misc_feature 1..921: note = Description of Artificial Sequence: Synthetic coding sequence
  source 1..921: mol_type = other RNA
atgctctttgggtccgaaatttgcaaagaaggcaagtgtgttaatacacagccaggttacgagtgttactgcaaacagggcttttactatgatggaaatttgttggaatgtgttgatgtggacgagtgcctcgatgagtccaactgccgcaatggggtttgcgagaacacccgaggcggttacaggtgcgcatgcacaccacctgctgaatacagcccagcccagcggcaatgccttagtcccgaggagatggacgtcgatgagtgccaagacccagcagcctgccgccccgggagatgcgtcaacctaccaggatcttacagatgcgagtgccggccaccttgggtacctggccccagcggccgtgattgccaactgcctgagagtcctgctgagcgcgcccccgaacgcagggacgtgtgctggtcccagagaggggaagatggaatgtgcgcaggtcctctggcagggcctgccttaaccttcgacgactgttgctgtcgccagggtcgcggctggggagcacagtgcagaccatgccctccgcgcggcgctggctcccactgcccaacttcccagtccgaatctaattccttttgggatacatcccctttactgctcggcaaacctccgcgtgatgaagacagttcagaggaagatagtgatgaatgtcgctgcgtatctggacgatgtgtgccacggccaggtggggctgtatgcgaatgccccggcggcttccaactggatgccagtagggcccgatgcgttgacatagatgaatgtcgtgagctgaatcagagaggccttctgtgcaagtctgagcgatgcgtcaacacttctgggagctttcgatgcgtctgtaaagctggattcgcccggagtcggccacatggtgcatgtgtcccccaacgaagacggtag

SEQ ID NO: 248308 - RNA, 3414 nt, synthetic construct
  misc_feature 1..3414: note = Description of Artificial Sequence: Synthetic coding sequence
  source 1..3414: mol_type = other RNA
atgacgctgataggagagaacggccactcaacagacaccctgaccggcagcgggtttagagtcgtggtctgccctcttccatgtatgaatggggggcagtgctcatccagaaaccagtgtctgtgcccgcccgactttacgggccgcttttgtcaggtccccgctggcggtgcagggggtggtacagggggaagcggccccgggcttagccggaccggcgccctgtctaccggcgccctacctcccctagctcctgaaggcgattcagtcgcaagcaagcacgctatttatgccgtccaggtaatagcggacccgccagggcccggcgaggggccccctgcacagcatgccgcatttctggtgccgctgggccccggccaaatctctgccgaagtacaagcccctcctccagttgtcaatgtccgcgtgcatcaccccccagaggcctctgtccaggtgcatcgcattgaaagttctaacgcagagtccgctgccccctcccagcacttgctgccacatcctaagccatcccatcctcgcccccccacccagaagccccttggaaggtgtttccaagatactttgccaaagcagccttgtggatcaaaccccttgccaggactgactaaacaggaagattgctgcggctccattggaaccgcttggggtcagagtaagtgccacaagtgtccacaactccagtacaccggggtccaaaaaccgggcccggtcaggggcgaggtgggggccgattgtcctcagggctacaaaagacttaattcgacgcactgccaagacatcaatgaatgcgccatgcccggcgtgtgccgtcacggtgactgcctgaacaacccaggtagctatcgatgcgtttgccctcctggacactctctcggcccatcaagaacccagtgcatcgccgataagcccgaagaaaaatctctgtgtttcagactggtgtcacctgaacatcagtgccagcatccactcacaacaagacttacccgacagctgtgctgttgcagtgtgggcaaggcgtggggcgctcggtgtcagagatgtcctacagatggcaccgcagctttcaaagagatatgcccagcaggaaagggctaccatatcctcacatcacaccagaccctgactatacaaggagaatcagatttttcattgtttctccatccagacggtcccccaaagccgcagcaactgccagagtccccatctcaagctcctcccccagaagacaccgaagaagagagaggggtgacgactgattccccagtttcagaagaaagatcggttcagcagtctcatcccacagctacgactactcctgcacggccataccctgagttgatttctaggccttcaccaccaactatgcgctggttcttacccgacctgcccccctctagaagtgctgtggaaatagcccctacccaggttaccgagacagacgagtgccgactgaaccagaacatttgcgggcacggggaatgcgttcccggaccacccgactactcctgtcactgtaacccgggctacagatcacaccctcaacatcggtactgtgtagacgtgaacgaatgcgaggccgagccctgtggacctggtcgcggaatctgcatgaatactggcggcagctacaactgtcactgtaatcggggatatagactacacgtaggagccggtgggcggagctgcgttgatctaaacgagtgtgctaaaccccacctctgcggcgacgggggcttttgtatcaacttcccagggcattacaagtgtaactgctacccgggttataggttaaaggcttcaagaccacctgtatgtgaagacatcgatgagtgtagagatccatccagctgtcctgatggcaagtgcgaaaacaaacctggatcctttaaatgcatcgcctgccagccgggctaccgttcccaaggggggggcgcatgtcgggacgtgaatgagtgcgcagaaggttctccatgcagtcccggctggtgcgagaacctgccaggtagctttcgctgcacttgcgctcaggggtacgctcccgcacctgacggtagatcatgcctcgatgttgacgaatgtgaagccggagacgtttgtgataacggaatttgcagcaatacgcctgggagcttccagtgccagtgcctatccgggtatcacttaagccgcgatcggagccattgcgaggatatcgacgagtgcgactttcccgcagcatgtatcggaggcgattgcatcaacacaaacggatcctaccgatgtctgtgtccccagggtcatcgactggtgggcggacgaaagtgccaagacatagatgagtgcagtcaggacccctcgctctgcctgcctcacggtgcatgtaagaatttacaagggtcttacgtgtgcgtgtgcgatgagggatttacccctacacaggatcagcatggatgtgaggaagtagagcagcctcatcacaagaaggaatgctatcttaacttcgacgacactgtgttctgtgatagcgtgctggccaccaatgtgacacaacaggaatgttgctgtagcttaggcgcgggttggggcgatcattgcgaaatatatccttgtcccgtgtactctagcgccgaattccattcactatgccccgacggaaaaggatatacccaggacaacaacatagttaactacggcatccccgcccatcgcgacatcgatgagtgtatgttgtttggtagtgaaatctgtaaagaagggaaatgcgtgaatacccagcctgggtacgagtgttactgtaagcagggattctattacgacggaaatcttctggagtgcgtagacgtcgatgaatgtctggatgaatctaactgccgaaacggcgtgtgcgaaaatacccgcgggggctaccggtgcgcctgcacccccccagccgaatatagccccgcccagagacagtgtctgtccccagaggaaatggacgtggatgagtgccaagatccagcagcatgtaggcccggccgatgcgtcaacctacccggatcttaccgatgcgagtgtcgcccaccctgggtccctgggccttcaggcagagattgccaactcccagagagtccagctgaaagggctccagaacgcagggatgtatgttggagtcaacggggggaagacggcatgtgtgctggcccgctcgctggaccagccctgaccttcgacgactgttgctgtaggcagggccgcggttggggtgcccagtgcagaccttgtccacccaggggtgccggcagccactgccccacaagccaatctgagagcaatagcttttgggatacctcacctctgctgctgggcaaacctccaagggacgaggactctagcgaagaggatagcgatgaatgtaggtgcgtgagtggatag

SEQ ID NO: 248309 - RNA, 2202 nt, synthetic construct
  misc_feature 1..2202: note = Description of Artificial Sequence: Synthetic coding sequence
  source 1..2202: mol_type = other RNA
atgcctgccgaaactgatgagtgccggttgaaccagaacatttgcggccacggagagtgtgtacctggcccgccagactacagctgtcactgtaatccaggatacaggtctcacccacagcatcgctattgcgtggatgtcaatgagtgtgaagcagaaccttgcggtcccggacgcggtatatgtatgaacaccggcgggagctataactgccactgtaatagagggtacagattacacgttggagcgggcgggagatcatgcgtggacctaaacgagtgtgctaagcctcacctctgcggagatggggggttttgcattaactttcctgggcattacaagtgcaattgttatcctggatataggcttaaggcatccagaccccccgtgtgtgaggacattgacgaatgccgagacccttcttcctgtcctgacggcaagtgcgagaacaagcctgggagcttcaagtgtatcgcttgtcagccagggtacaggtcccaggggggcggcgcatgccgggatgttaacgagtgcgctgaaggtagcccttgttcaccagggtggtgtgagaaccttcctggaagcttccggtgtacctgtgcacaagggtatgctccagccccagatggtcggagctgcctggacgttgatgaatgcgaggccggagacgtctgcgataacggaatttgctcaaacacacctggctccttccagtgccagtgtttgtcggggtatcatttgagtagagatagaagccactgcgaagacatcgatgaatgcgacttcccagccgcttgtatcggtggggactgtatcaacacaaatgggagttacaggtgtttgtgtccgcaaggtcatcggctagtgggcggtagaaagtgccaggatatcgatgagtgtagtcaagaccccagtctttgcctgccgcacggagcctgcaagaatttacagggatcctacgtgtgtgtttgcgatgagggattcactcctacacaggaccagcacgggtgcgaggaagtggagcagcctcaccacaagaaggaatgctacttaaactttgatgacacagtgttttgcgatagtgttctggccaccaatgtcacccagcaagagtgttgctgcagcctcggcgcaggttggggggaccattgcgaaatttacccatgccctgtctactcttctgctgaattccactctctgtgccccgacggaaaggggtacacgcaagataacaacatcgtgaattatggaatcccggcccatagagacatagatgagtgcatgttgttcggcagtgaaatctgtaaagagggaaaatgtgtgaatactcagcccggttacgaatgctattgcaaacaaggtttctactatgacgggaacctacttgagtgcgtggacgtggacgaatgtttggatgagtctaattgccggaacggtgtgtgcgagaacaccagagggggataccggtgcgcttgcaccccgcctgctgaatatagtcccgcccagcggcagtgcctcagcccagaggaaatggacgtcgacgaatgtcaggaccctgccgcttgtcgcccaggacgctgcgttaacctacccggatcctatcggtgtgaatgccggccaccatgggttccaggcccttccggcagggactgccagctgcctgagtcccctgccgagcgtgcccctgaacggagggatgtgtgttggagccagcggggcgaggatgggatgtgtgcaggacctctcgcgggccccgctcttaccttcgatgattgctgttgccggcagggcagagggtggggcgcacaatgcagaccttgtcccccccggggagcaggatctcactgtccaacctcacagtcggaaagcaattcattttgggacacttcaccactgttactgggcaagcctcctcgtgacgaagactcctcggaggaagatagcgacgagtgcagatgcgtgagcggccggtgcgtacctaggcccgggggcgccgtttgcgaatgccctggcggttttcagctggacgcgtctcgggcccgatgtgtggatattgatgagtgtcgggaactcaatcagcggggactgctctgcaagtctgaacgttgtgttaacacttctggatccttcagatgcgtttgcaaagccggatttgcccgttcacgaccacacggcgcttgcgtaccacagcggcggagatag

SEQ ID NO: 248310 - RNA, 2649 nt, synthetic construct
  misc_feature 1..2649: note = Description of Artificial Sequence: Synthetic coding sequence
  source 1..2649: mol_type = other RNA
atgaccctcattggtgagaatgggcacagcactgacacgctcaccggaagcggtttccgcgtggcagacaaacctgaggaaaagagcctgtgcttcagactcgtgtctcccgaacatcagtgtcagcatcccttaactacaagactgacgcgacaactctgctgctgttctgtggggaaagcatggggagcgaggtgccagcggtgtcctaccgacggcacagccgcattcaaggagatctgtcctgctggaaaaggctaccacattcttacctcgcaccagaccctcaccattcagggggagagtgactttagcctctttttgcatcccgacggaccgcctaagccacaacaactgccagaatcacccagccaggctcctccgccggaagacaccgaggaggagcgaggagtcacaacggatagccctgtatctgaggaaaggtccgtccagcaaagccacccaacagccactacgaccccagccagaccttacccagaactgatcagtaggcctagcccacccactatgcgatggttcctccctgatctccccccctccagatccgctgtggagatcgctcccactcaggtgactgaaaccgacgagtgccgtcttaatcagaacatctgtggccatggcgagtgcgttcccggccctcccgactacagctgccactgcaatcctggataccggtcacacccccagcaccgctattgtgtagatgtcaacgagtgcgaagctgagccctgcggtcccggcaggggcatttgtatgaataccggcgggtcctacaactgtcattgcaaccgcgggtaccgactgcacgttggtgctggcggacggtcttgtgtggatctgaatgaatgtgccaaacctcacctctgcggagacggtggattttgcattaatttccctggccactacaaatgcaactgttaccccggctatcggctgaaagcaagccgacctccggtatgtgaagacatcgatgagtgtagagacccaagcagctgccccgatggaaaatgcgaaaacaagcctgggagttttaaatgcatcgcctgtcagcccggttaccgaagccagggagggggcgcttgccgcgacgtgaatgagtgcgccgagggatcaccttgctcccccggttggtgcgagaacctacctgggtccttcaggtgcacctgtgcccagggctatgcgcctgcacccgacgggaggagctgcctcgatgttgacgaatgcgaagccggagatgtttgcgacaacgggatatgctccaatacaccgggttcctttcaatgccagtgtttatctggatatcatttatcccgggaccgatcccactgcgaggacatcgacgagtgtgatttccccgcggcctgtattggcggtgactgcattaataccaatggatcctatcgctgtttgtgccctcaaggacaccggttagtgggaggtcgcaaatgccaggatatagatgaatgctcacaggatccatccctatgcctgccacatggtgcttgtaagaatctacaggggagctatgtttgcgtctgcgatgaaggcttcaccccaacacaggatcaacacgggtgcgaagaagtggaacagcctcatcataaaaaggagtgctacctaaatttcgacgataccgttttctgtgactcggtactggctacaaatgtgactcaacaagagtgctgttgtagtctgggcgctgggtggggagaccactgcgaaatctatccctgtcctgtttattcatccgccgaattccacagcctctgtcccgatgggaagggctacacccaggataacaatatcgtaaactacggcatcccagcccacagggatatcgacgaatgcatgctcttcggatctgagatatgcaaagagggaaagtgcgtgaatacccagcctggctacgaatgttattgcaaacaggggttttactatgatgggaacttgctcgaatgtgtagacgtggatgaatgtctggatgaaagtaactgtagaaacggagtgtgcgagaatacacggggaggctacaggtgtgcttgcaccccgccagccgaatatagtccagcacagaggcaatgtctgtcacccgaagagatggagagagcaccagagagacgggacgtgtgctggtcacagcgcggagaagacgggatgtgcgccggacctctggccggtcctgccctcacatttgatgactgctgttgtcgccagggccgtggatggggagcgcagtgccggccttgccctccgaggggcgccgggagccattgcccaacgtcccaaagcgagtctaactctttctgggacacatcccccctgctgctcggcaaacccccccgggacgaggactccagtgaggaagactctgacgagtgtagatgcgtgtccggcagatgcgtccccagaccgggcggtgcggtatgcgaatgcccaggaggattccagttagacgcttcacgagcccgttgtgtggatatcgatgagtgcagggagctgaaccagagaggattgctgtgtaaatcggagaggtgtgtaaatacttctggaagcttcagatgcgtgtgtaaagctggatttgcacgatctcggccacacggtgcttgtgtaccacaaagaagacgttag

SEQ ID NO: 248311 - RNA, 2127 nt, synthetic construct
  misc_feature 1..2127: note = Description of Artificial Sequence: Synthetic coding sequence
  source 1..2127: mol_type = other RNA
atgcgcgagcgtatctgggcaccccccctcctgctcctcctccccctcctcctgcctccacccctatggggagggccaccagatagtcctcgtagggaactggagctggaacccggcccactgcagccatttgatcttctgtatgcctctggggcggccgcatactactccggggactatgagagagctgtaagggatctagaagcagcactgaggagccatagaagattgcgtgagatcagaacccgttgtgctcggcattgtgctgctagacaccccctgccccccccgccccctggcgaaggccctggagcagagctgccattattccgctcattactgggccgcgcaaggtgctacaggtcctgtgagactcagaggttgggaggacccgcgagtagacacagagtgagtgaagacgtcaggagcgattttcagcgcagagtgccatataattacctgcagcgcgcgtatattaagctgaatcaactggaaaaagcggtggaagccgctcatacattttttgtagccaaccccgaacatatggaaatgcaacagaatatagaaaactatagagctacagcaggagtggaagccttgcagctcgtcgacagggaagccaagccgcacatggagagttacaatgcaggtgtaaaacattacgaggcagatgatttcgagatggccattcgacattttgaacaggccctgagagagtactttgtcgaggatactgaatgcaggacactctgcgaaggcccacagaggtttgaggaatatgagtatctggggtacaaggcaggcctgtacgaagcaatcgccgaccactacatgcaggtgcttgtctgccagcacgagtgcgtcagagaactggccacacgccccggaagactgtccccgatcgaaaatttcctgcctctgcactatgattatctccagttcgcctactaccgcgttggtgagtatgttaaggcccttgaatgcgctaaggcttatctgctctgccaccctgacgacgaagacgtgctggataacgtcgactattacgaatcactcttagatgattctatcgaccccgcaagcattgaagccagggaggacctgactatgttcgtcaaaaggcacaaactcgagtccgagctgataaagagtgcggccgaaggacttggtttttcttatacagagcccaactactggattaggtatggtgggcgccaagatgagaaccgggtaccatctggggtgaatgtagagggcgccgaagttcacgggttcagcatgggcaagaaactgtcccctaaaatagaccgcgatctccgcgaaggggggccgctgctttatgagaatattacatttgtctataactccgaacaattgaacggcacccaacgtgtcttgctggataacgtcctgagcgaagaacagtgcagagaactgcatagtgttgctagcggcattatgctcgttggtgacgggtatcgggggaagacctctccccacacgcccaacgagaagttcgaaggtgctacggtgcttaaagccctgaaaagtggatatgaaggccgagttcccctgaaatctgctcggctcttttacgacatcagcgagaaagcgcgacggatcgtggagtcctacttcatgcttaactctaccctctatttttcctatacccatatggtgtgtcgcactgctcttagtggccaacaggaccgccgaaacgatttgtctcaccccatacatgcggacaactgtcttctggatcccgaagccaacgaatgctggaaggagcctcccgcctacacattcagggattactcggccttactctatatgaacgacgatttcgaaggaggggagtttattttcactgagatggatgccaagactgtaacggcctctatcaaaccaaaatgcgggcgcatgatctccttttccagcggaggagagaaccctcacggggtcaaagcagtgaccaagggcaagagatgcgcggtagcactatggttcactttggatcccctgtacagagaactggagcggattcaggccgatgaggtgatcgccatattggaccaagaacagcagggaaagcacgaactgaatatcaacccaaaggacgagctatag

SEQ ID NO: 248312 - RNA, 1584 nt, synthetic construct
  misc_feature 1..1584: note = Description of Artificial Sequence: Synthetic coding sequence
  source 1..1584: mol_type = other RNA
atggagatgcaacagaatatcgagaattatagggccacagccggggtcgaggctctgcagttggtagatcgcgaggccaaacctcatatggaatcctacaacgcaggggtgaagcactacgaggctgacgactttgagatggctattagacacttcgaacaggctcttagagaatatttcgtggaggatacggagtgcagaactctctgtgagggccctcaacgttttgaggaatatgagtatcttggctacaaggcaggactttacgaagccatagccgatcattatatgcaggtgctcgtgtgtcagcatgaatgcgttcgggaactggccactaggcccggtcggttgagtccaattgaaaacttcctgcctctccattatgattatctgcagttcgcgtattaccgtgtaggagagtatgtcaaagcacttgagtgcgccaaagcctacctgttgtgccacccagatgatgaagacgtactggacaacgttgattattatgagtccctgctagatgatagcattgaccctgcaagcattgaagccagggaagatctgactatgttcgtcaagagacataaattggagtctgagctcattaagtccgctgcggagggattaggcttctcttatacggagccaaattattggatcaggtatgggggacgccaggacgaaaaccgcgtgccatctggcgtcaacgtggaaggagccgaggttcatggcttctctatgggcaagaaactgagcccgaagatagacagagatctgcgggaaggtggtcccctcctgtacgaaaatatcacctttgtgtacaactctgagcagctaaacggaactcaacgggttctgcttgacaacgttttgagcgaggagcagtgtagagaacttcatagtgtggctagcggcatcatgctggtaggcgacggatacagaggcaagaccagtcctcacacccccaatgaaaagttcgaaggtgccactgtgctgaaagcgctcaaatctgggtatgaggggcgggtaccacttaaatccgcaagactgttctatgacattagcgaaaaagcccggcgtatagtggaatcctactttatgctgaactcaacactatacttttcctacacccatatggtgtgccggaccgcgctctcaggtcagcaggacagacgaaatgacctatcacatcctatccacgctgacaactgtctgttagacccggaggctaatgaatgctggaaagagccacccgcgtatactttccgtgattattctgccctgctgtatatgaatgacgattttgagggcggagagttcatctttaccgagatggatgcgaaaacagtgactgcttcgattaagcccaaatgcggccgcatgatatctttcagctcagggggggaaaatccacacggcgtgaaggcggtgactaaggggaagcgttgtgcagtcgctctgtggtttaccctggatccactttaccgggagttggagcgtatacaagccgatgaagtcatagcaattctggaccaggaacagcagggcaagcacgagctgaatatcaatcctaaggacgaactgtag

SEQ ID NO: 248313 - RNA, 4614 nt, synthetic construct
  misc_feature 1..4614: note = Description of Artificial Sequence: Synthetic coding sequence
  source 1..4614: mol_type = other RNA
atgaccaccaaaagaaagataattggcagactggtgccctgccggtgctttcgaggcgaagaggaaatcatatccgttcttgactactcacattgtagtcttcagcaggtgcccaaggaagtgttcaacttcgagcgcactctggaagaactttacctggatgccaaccaaatcgaagagcttcccaaacagttattcaattgccaagccctgcgcaagctgtcaattcccgacaacgacctgagcaacctgccaacaaccatagcatcactggttaacctgaaggagctcgatatttcaaagaacggggtgcaggaattcccggaaaacatcaagtgttgtaagtgtttaacaattattgaagcctcggtaaacccgatttccaagctgccagatggtttcactcagctgctcaatcttacacagctgtacctgaacgatgctttcctagaatttcttccagccaactttgggcgtcttgtgaaactaaggatcctggaactgcgggagaaccacctgaagactctccccaaatcaatgcataagttagcccaactggagcgactagaccttggcaataacgaattcggagaactgcccgaagttctcgaccagattcagaaccttcgggaactgtggatggacaataacgcactccaggtgctgccaggtagcatcgggaaactcaaaatgctggtttacctcgacatgtcaaaaaatcggatcgagaccgtagacatggatatctctggatgtgaggcactcgaggatcttctgctgagctccaacatgctccagcaactgcccgactccattggtctgctaaagaaactgactaccctgaaggttgacgacaaccaacttacaatgttgccaaatactatcggcaacttgagtctgctagaagaattcgactgtagttgcaacgaactggagtccctgccctcaacgattggttatctacattctctcaggacgctggccgtcgatgagaattttttaccagaacttccccgcgaaattgggtcttgtaagaacgtgactgtaatgagcctgaggtctaataagttagagttcctccccgaggagatcggccagatgcagaagctgagagttctgaacctttctgataacagactgaaaaatctcccatttagtttcaccaaactgaaggagctggcagcactctggctttctgataatcagtcaaaggctctgatccctctgcagactgaggcacacccagagaccaaacaaagggttctaacaaactacatgtttccacaacagccccgcggggacgaagatttccaatctgattccgattcatttaaccccaccctatgggaggagcaacggcaacagcggatgactgttgcctttgaattcgaagacaagaaagaagacgacgagaacgccggcaaggtgaaggacctgagctgtcaggccccctgggaacggggacaacgggggataactctgcaaccagctagactgtctggagattgctgtaccccctgggctcggtgcgatcagcaaatccaggacatgcctgttccccagaacgacccacaactcgcctggggttgtattagcgggttgcagcaggagagaagcatgtgtacaccactgccagtggccgcccagtccaccactctgccatcactgtccgggcgccaggtggagataaacctcaagcgctaccctacaccctatccagaagacctgaagaatatggtaaagtccgtgcagaacctagtgggcaagcctagccacggtgtgagagtggagaactcgaacccaaccgctaatactgagcagacagtcaaagaaaagtacgagcacaagtggcccgttgccccaaaagagatcaccgtggaggatagctttgttcaccctgccaatgagatgaggattggagagctacaccccagcctcgccgagacccctttgtacccaccaaagctcgttttacttggaaaggataagaaggagtcaaccgacgaaagtgaggtggataagacacactgtctgaacaactctgtctcaagcggcacctactccgactatagcccatcccaagcatcctcaggttcttcaaatactagagtcaaggtaggcagtctacagactactgcgaaggatgccgtgcacaatagcttatggggcaatcgcatcgcaccatctttccctcaacctctggactctaaaccccttttatcacagcgtgaagcagtgccccccggaaatatccctcagagacctgaccggctgcctatgagcgatacattcactgacaactggacggatggaagccactacgacaatacagggtttgtggccgaggaaactacggctgaaaatgccaacagcaacccactcctgagcagcaaatcgcgcagtacttcttcacacgggcggcggccattaatccggcaggacagaattgtgggggtccctctggaactggagcagtccacacatagacacacacccgagactgaggtgcctcccagtaatccatggcaaaactggactagaaccccttctcctttcgaggaccgtactgctttcccttccaagctcgagacgactcccactacctccccactacctgagcgtaaagaacacatcaaagagagtaccgagataccctcacctttttcaccaggcgtcccctgggagtaccacgacagcaaccctaatcgcagtctctccaacgtcttctctcagatccactgtcgcccagaatcgagcaaaggggtaatctcaatttctaagtcgaccgaacgactttctcctctgatgaaagacattaaatctaacaagtttaagaagtcacaaagcattgacgagatagacatcgggacctacaaggtgtacaacatcccccttgaaaactacgcttccgggtccgaccacttaggctcacacgaaagacctgacaaaatgctcgggcccgagcacggaatgagtagtatgtccagaagccagagcgtcccgatgctggacgacgagatgctgacctatggaagctctaagggcccccagcagcagaaggcatctatgaccaagaaggtctatcagtttgatcagtcatttaacccacagggcagcgtagaggtcaaagccgaaaaacgcattccccctccattccagcataatcccgagtatgtgcagcaggctagcaagaatatcgctaaagacttgattagcccaagggcgtatcgtggatatcctcccatggaacagatgttttctttcagccagccttccgtaaatgaggatgctgttgtgaatgcgcagttcgccagtcagggtgcacgggccggcttcttgagacgcgctgatagtctcgtgtctgccacggagatggcaatgtttcggagggtgaacgaaccacacgaattgccccctacagaccgctatggcagacctccctataggggaggcctggaccgacagtcctccgtgacagtaactgagagccaatttttgaaaagaaacgggagatacgaggatgagcatccttcataccaggaagtgaaggcccaagctgggtcatttcccgtgaagaatctgacacagaggaggccgctatcagccaggtcttatagcaccgagagctatggggcatcgcaaacacgacctgtgtctgctagaccaaccatggccgccctgttggaaaagattcctagcgactacaatctggggaactatggagacaagccatctgataattctgacctgaagaccaggcctactcctgtgaagggagaagagtcatgcggaaagatgccagctgactggagacagcaactgctgcgacatatcgaggcccgaaggctcgacaggaatgctgcctataagcacaataccgtcaacctgggcatgctcccctacggcggcatatctgcaatgcatgccggaagaagcatgacactcaacctgcaaaccaaatcaaaattcgatcaccaggaattgcctctgcagaaaacaccgtctcagcaaagtaatattctggataatggccaggaagacgtgtccccctcaggccagtggaatccataccccttaggccggagagacgtccctccggatactatcacgaagaaggccggttcacacatccagacccttatggggtctcaatccctccagcataggagcagagagcagcaaccttacgaaggtaatattaataaagtcaccattcagcaattccagagcccgttacctattcagattccttcgtcacaagcaacgcgcggtcctcagcctggacggtgcctaatccagacgaagggtcagagatcaatggatggatacccggagcagttttgcgtccggatcgaaaaaaacccaggattagggttcagcatctccggagggatctcaggccaaggaaatccctttaaaccaagcgataagggcattttcgtcactcgcgtccaacccgatggtccagcctcaaatctgctgcagcccggagacaaaatcctccaggccaatgggcattcattcgtgcacatggaacatgaaaaagctgtacttctattgaaatcattccaaaatactgtagacctcgtcattcagagggaactcaccgtctag

SEQ ID NO: 248314 - RNA, 1320 nt, synthetic construct
  misc_feature 1..1320: note = Description of Artificial Sequence: Synthetic coding sequence
  source 1..1320: mol_type = other RNA
atgacccctattttgaccgttttgatttgcctcggtctgtctctcgatcccaggacacacgtgcaggcgggcccacttcccaaacccacgctatgggcggaacccggctccgtgatcacccagggctcacccgtcacacttcgctgtcagggttctttagagacacaggagtaccacctttacagagaaaaaaaaaccgcactgtggatcactcgaatccctcaggaattagtcaagaaaggccagtttcccatactcagcatcacctgggaacatgccgggcggtactgctgcatttatggaagccacaccgccggactgagcgagagcagcgacccactcgaattggtagtgaccggagcctattctaaacctactctttcagccttgccaagtccagttgtaacctcaggaggcaatgtcacaatccagtgcgattcccaagtggccttcgacggctttattttgtgcaaagagggagaggatgagcacccccagtgcttgaactcccattcccacgctcgaggcagtagccgagccattttcagcgtcggtccagtgtctccttctcggcggtggtcctatcgatgttacggctacgattcccgggccccatacgtctggtccctacctagcgatctgctgggcctgttggtccccggtgtctctaaaaagcctagcctctctgtccagcccgggccagtggttgcccccggagagaagttgacatttcagtgtggttccgacgcgggatacgaccgttttgtgttgtataaggaatggggacgtgacttccttcagcgccccggccggcagcctcaggctggactgagtcaggccaattttaccctgggccccgtgagtcgatcctacgggggccagtatacctgtagcggagcctataatctctcgtcggagtggtctgcccctagcgatccattggatatactaattaccggccagattagagcacgcccttttctatccgtcagacccggccccacagtggctagtggagaaaatgtaactttactatgccagtcacagggaggaatgcatacttttctgctgactaaggagggggcggccgatagccctctgagactcaagtccaaacgccagagccacaagtaccaggccgaatttcccatgagcccagtgacatccgcccacgcggggacctacagatgttatggctccttatctagcaatccctatctccttacgcatccctctgacccactcgagctggtcgtctcaggggccgccgagactcttagcccaccccagaacaaatcggattcaaaagcaggcgaatag

SEQ ID NO: 248315 - RNA, 1371 nt, synthetic construct
  misc_feature 1..1371: note = Description of Artificial Sequence: Synthetic coding sequence
  source 1..1371: mol_type = other RNA
atgcaccgcgggctgattcacccacaatcaagtgccgtaggcggggatgctatgaccccaatactgaccgtcctcatctgccttggactgtccctcgacccaagaacacatgttcaggcggggcccttaccaaaacccacgctctgggccgagcctggctctgtaatcacacagggctcacccgtgaccctacggtgtcaaggaagtttagaaacccaggaataccacctgtaccgcgaaaaaaaaactgctctctggatcacgcgaataccacaggaattggtgaaaaagggacagtttcctattctgagcatcacatgggagcatgctggaagatattgttgcatctacggcagtcacacagcggggctttcggaatcctcagatcccctggagctggtggtgacaggtgcctattcaaaaccaacactcagcgccttgccatcacccgtggtcacctcaggaggtaatgtcacgattcaatgtgacagtcaagtcgcctttgacggcttcatcctctgtaaggagggagaagatgagcatcctcaatgtctgaatagccacagtcatgccagaggctcctctcgggcaatcttcagcgttggccccgtgagtcccagccggaggtggagttacagatgctacggttacgactcaagggcaccatatgtctggagtctcccatctgatcttttaggactgctagtccctggcgtctctaagaaaccatcgctttccgtccagcccggacccgtcgtggcaccaggcgagaagctgacatttcagtgcgggtccgacgcgggttatgatcgatttgtgttgtataaagaatgggggcgcgacttcctccagcgcccaggaaggcaaccccaagccggtctatcccaagcaaatttcacccttggcccagtgtcccgctcctatggagggcagtacacttgttccggtgcctacaacctatctagcgagtggtcggctccttctgacccactagacatactgattaccgggcagatacgcgcccgccccttcctgtcggttcggccggggcctacagtggcttccggtgaaaacgttacactcctctgccaaagtcagggggggatgcacacctttttgttaaccaaggaaggcgcagccgactcaccactgagattgaagtcaaaaaggcagtcacataaatatcaagcggagttccctatgtcacctgtaacatctgctcatgcgggcacgtatagatgttacggcagcctgtcgtccaacccttatctgttgacccatccatcagatcccctggaactggttgttagcggagccgccgagactctgtctccgccccagaacaagtccgactcaaaggccggtgagtag

SEQ ID NO: 248316 - RNA, 1098 nt, synthetic construct
  misc_feature 1..1098: note = Description of Artificial Sequence: Synthetic coding sequence
  source 1..1098: mol_type = other RNA
atggctaaggtcgcaaaagatttgaatcctggcgtcaagaagatgtcactgggacagttacagagtgctagaggagtagcctgtctaggctgcaagggcacgtgttctggctttgaaccacattcttggcggaagatctgcaagtcatgcaaatgttcccaagaagaccattgtttgacgtctgacttagaggacgatagaaaaatcggaaggctgcttatggattcaaagtatagtacactcaccgctcgagttaaaggcggagacggaataagaatctacaaaagaaacagaatgattatgactaatcccatcgcaactggtaaagatcccacttttgacaccattacctacgaatgggcccccccaggggtgacccagaagctgggtctacaatacatggaactcatccctaaagagaaacaaccagtcaccggcacggaaggcgctttctatcgccgccggcagctaatgcatcaattgccgatttacgatcaggatcccagtcgatgccggggcttgttggagaatgaactgaaactgatggaagagttcgtgaaacagtataaaagtgaggctctgggagtgggcgaggtggcactccccggacagggcggattgccaaaggaagagggaaagcaacaggaaaagcccgaaggcgctgagacaacggctgcgacaactaatggaagcctgtcagatccgtctaaagaagtcgagtatgtgtgtgagctttgtaagggtgccgcaccccctgactctcccgtagtttacagcgacagggcaggctacaataagcaatggcatccgacgtgcttcgtgtgcgcaaaatgtagcgaacccctcgtagacctcatatacttctggaaggacggtgcgccctggtgtggacggcactattgcgagagtctgcgccccagatgctcagggtgcgatgagattatctttgctgaggattatcagcgcgtcgaggacctcgcctggcaccgcaagcatttcgtctgtgagggatgtgaacaactgttgagtggccgggcatatattgtcactaaaggccaactactgtgccctacctgctcaaagtcaaaacgctcctag

SEQ ID NO: 248317 - RNA, 1602 nt, synthetic construct
  misc_feature 1..1602: note = Description of Artificial Sequence: Synthetic coding sequence
  source 1..1602: mol_type = other RNA
atggccctgagaaatgtgccgttcagaagtgaggtgctgggatgggatcctgactctttggcggattacttcaaaaaacttaactataaagattgtgaaaaagccgttaaaaagtatcacatcgacggtgctaggttcctgaatctgactgaaaatgacatccagaaatttccaaaactccgggttcccatcttatcaaagcttagccaggaaatcaacaaaaacgaggaaaggcgctccatctttacacgtaagcctcaagtcccccggttccctgaggaaaccgagtctcacgaagaggataacggaggttggagctcttttgaagaagacgattacgaatcccctaacgatgaccaggacggtgaggatgacggggactatgaaagtccgaacgaggaagaagaagcaccagtagaagatgacgcagactatgagcctcccccgtcgaacgatgaggaggctctgcaaaactcaatcttgcccgccaagccattcccaaactccaacagcatgtatatcgaccggcctcccagtggaaagactccccagcagccacccgtccctccgcaacggccgatggctgctctcccacccccacccgcaggtcgtaatcattccccactcccccccccacaaactaaccatgaagagcctagtagatcacgcaatcacaagaccgctaaactccccgccccatctattgaccgaagcactaaacctcccttagatagatctctggctccattcgacagggaaccttttaccctcggtaaaaaaccgccattttccgacaaaccctcaattcccgctgggcggagcctgggagaacatttgcccaaaatacagaaaccaccccttccaccgacaactgagcggcacgagcgtagcagccccctgcccggaaagaaaccccccgtgcctaaacatgggtggggccctgatcgcagagagaatgatgaggatgatgtgcaccaaaggcccctgcctcaaccagccctcctgcctatgtcttctaacacgttccctagtcgctcaaccaaaccctctccgatgaacccactacctagttcccacatgcccggagctttcagcgagtccaattcctcattcccacagtccgcttctcttcccccctatttctcacaaggtccaagtaacaggcctcccatccgagcagagggacggaattttccactgccccttccaaataagcctaggccaccatcgccagctgaagaggaaaattccttgaatgaggaatggtatgtgagctacatcacccggcctgaggcagaggctgccctacgcaaaattaaccaggatggtaccttcctagtacgtgacagctccaaaaagaccaccaccaatccttacgtacttatggtgctgtataaggataaagtgtataacatacagatcagatatcagaaagagagccaggtgtacctgcttggaacaggcctgagaggcaaagaggatttcctgtctgtaagcgacattatcgactacttccgcaaaatgccgctactgcttatcgacgggaaaaacaggggctcgcgctaccaatgtactttgacacacgcggctggctacccatag

SEQ ID NO: 248318 - RNA, 1356 nt, synthetic construct
  misc_feature 1..1356: note = Description of Artificial Sequence: Synthetic coding sequence
  source 1..1356: mol_type = other RNA
atggaacagtgggaccactttcataatcaacaggaggatacagattcctgcagcgagtcagttaagtttgacgccagaagcatgactgcactccttcctcccaacccgaagaattcaccatccctccaggaaaaactgaagtcatttaaggctgctctgatcgccttatatctacttgttttcgcagttctcattcctctaattggaattgtcgccgcccagctcctgaaatgggaaactaaaaactgtagcgtctcttcaactaatgctaatgatatcacacagtccttgactgggaaagggaatgactccgaagaggaaatgagattccaagaagtatttatggagcatatgtctaacatggaaaagcgcattcaacacattcttgatatggaggccaatcttatggacacagagcattttcagaatttttccatgaccacagatcaaagatttaatgacatcctgctgcaactgagcaccctgttttcttcagtgcaaggccacggcaacgctattgacgagatctctaagagtctgataagtttaaacacaaccttgttggatctccaactaaatatcgagaacctgaatggtaaaatccaggagaatacatttaagcagcaggaagaaattagcaagttagaggaaagagtttacaatgttagtgcggagataatggccatgaaggaggagcaagtgcacttggaacaggaaattaaaggtgaggttaaagtattgaataacatcacaaatgacctgcggttgaaggactgggaacattcacagacgcttcggaacattacactaattcaagggccccctggcccacccggtgagaaaggcgaccgcggcccgactggggaatccggaccacgcggttttcctggacctattggcccccctggactgaagggcgatagaggcgctatcggctttccagggagtagaggcctcccaggatatgctggtagaccgggaaattccggcccaaaaggtcagaagggagagaagggatccggtaacaccctcacaccttttaccaaagtgcgcctcgtgggtggcagcgggccacatgaaggccgcgttgagatactacattctgggcaatggggcacaatctgcgacgaccgatgggaagtccgagtagggcaggtcgtgtgcaggtcccttggctatcccggcgttcaggctgttcataaagcagcacatttcggccagggtactggccccatctggcttaacgaagtgttctgcttcggtcgggagtctagtatcgaggaatgtaagattaggcaatggggcacccgcgcatgttcccactctgaggatgctggcgtgacctgtaccctctag

SEQ ID NO: 248319 - RNA, 1167 nt, synthetic construct
  misc_feature 1..1167: note = Description of Artificial Sequence: Synthetic coding sequence
  source 1..1167: mol_type = other RNA
atggagcaatgggaccacttccacaaccagcaagaagacaccgacagctgttcagagtctgtcaaatttgacgctagatcaatgactgcattgctccctccgaacccgaagaactctccctctttgcaagaaaagctgaaatctttcaaagctgcactgatcgctctttatttactggtgttcgcagtgctgattcctcttattggcattgtggctgcccaactgcttaagtgggagaccaaaaactgttcggtgagctccaccaacgccaacgatataacccagtctcttaccggaaagggtaatgattcagaggaggaaatgcgcttccaagaagtattcatggaacacatgtcgaatatggaaaagagaatacagcatatactggacatggaggcaaacctcatggacacagagcacttccaaaacttcagtatgactacagatcaaagattcaatgacatcctgctgcagctgtcaacactgtttagctcagtgcagggacacggtaatgccatcgatgagatttctaaaagcctgatatccctcaacactactctgctggacctccaattgaatattgaaaacctgaatggaaagatacaggaaaataccttcaagcagcaggaagaaatatctaaacttgaggagcgggtgtacaacgtaagcgccgagattatggcgatgaaggaagagcaagtccatctagagcaggagattaagggcgaggtgaaagtactcaacaatatcaccaacgacctgaggttgaaagactgggaacactcacaaactctcaggaacattacattgatccagggccctcccggcccgccgggcgaaaaaggcgaccgcggtcccacgggtgagtctggtcctagggggtttcccggacccatcgggccgcccggcctcaagggagacaggggtgcgataggattcccgggcagtagggggctgcccggatacgccggcagacccggcaatagtggtcctaaaggtcagaagggagaaaaaggaagcggcaataccctgagcactgggccaatttggcttaatgaagtcttctgttttggacgcgagtcatcaattgaagaatgcaagatccgccagtgggggacccgtgcctgttcccattcagaagacgctggggtcacgtgcacactgtag

SEQ ID NO: 248320 - RNA, 1167 nt, synthetic construct
  misc_feature 1..1167: note = Description of Artificial Sequence: Synthetic coding sequence
  source 1..1167: mol_type = other RNA
atggagcagtgggatcatttccataatcagcaagaagataccgactcatgtagtgaaagtgtgaagttcgacgccaggagcatgaccgcccttctgccacctaacccaaaaaactcacctagtctacaagagaagctgaaatcatttaaggccgcgttgatcgccttgtacttattggtgttcgctgtgctgattcccctaattggcattgtcgccgctcagctgctgaaatgggaaacaaaaaactgtagtgtttcatcaactaatgctaacgacataacccaaagtttgaccggaaagggcaatgactcagaagaggagatgagattccaagaggtctttatggagcacatgagcaacatggagaaacgcatacagcacatcctggacatggaagccaatctcatggataccgaacacttccagaacttttcgatgaccaccgatcagcggtttaatgatatcctattacaactatctactctcttttcctcagttcaaggtcacggaaacgcaatagacgaaatttccaaaagccttatttcacttaataccacactcttagatctgcagcttaatatcgagaatctgaatggcaaaattcaggaaaacacgtttaagcagcaggaggaaatcagcaaattagaggagcgggtgtataatgttagtgctgagattatggcaatgaaggaagagcaagtgcacctcgaacaggaaatcaaaggtgaagttaaagtgctgaacaacattaccaatgacttgaggcttaaagactgggagcacagccaaactcttaggaacattaccctgatccagggaccaccagggccacctggagagaagggcgacaggggtcctacgggcgagagtggaccccgaggtttcccaggcccaataggcccaccaggactgaagggagataggggggccatcggatttccggggtcacgagggttacctgggtacgccggaaggcctggcaactctggtcctaaagggcagaagggggaaaaagggtccggcaataccctatccactggccccatttggctcaacgaagttttctgtttcggtagagagtcctctattgaggaatgcaaaatccgacagtggggcacaagggcctgcagtcatagcgaggacgccggggtcacgtgcacgctgtag

SEQ ID NO: 248321 - RNA, 1077 nt, synthetic construct
  misc_feature 1..1077: note = Description of Artificial Sequence: Synthetic coding sequence
  source 1..1077: mol_type = other RNA
atggaacagtgggatcacttccataatcagcaggaggatacagacagctgctctgaaagtgtgaaattcgacgcgaggagcatgaccgccctgttgcctccaaaccccaagaattcgccatcattacaggaaaaactcaaatcttttaaggcggcccttatagccttgtatctcctcgtgttcgcagtcctcatccctttaattggtattgtcgccgcgcagctcctgaagtgggagaccaaaaattgctcagtgtcttcaacaaacgcaaatgacatcactcagagcctgacaggcaaagggaacgactcagaggaggagatgcgcttccaggaagtatttatggagcatatgtctaatatggagaaaagaatccagcatatcctggacatggaggccaatctgatggacaccgagcatttccagaatttctcaatgaccactgatcagagatttaacgatattctcctacaactgtccactctcttctcttccgtccaaggtcatggcaatgccattgatgagatatccaagtctttgatcagtcttaacaccaccctgctcgatctgcaactcaatattgagaatctgaacggcaagatccaggagaatacctttaagcagcaagaggaaatttctaagctcgaagaacgcgtatataacgtttcggccgagataatggccatgaaggaggagcaggttcaccttgagcaggagatcaaaggagaagtcaaagtcctgaataacatcacaaatgatctaaggctgaaggattgggagcacagccagacactcaggaatattaccctcatccagggtcctcctggtccacccggagagaaaggagaccggggaccaaccggtgaaagcggcccgcggggatttcccgggccgataggcccacccggactaaagggcgatcggggtgccattgggtttccaggctcacggggacttcccgggtatgctggacggcctggaaattctgggcccaaagggcaaaaaggagaaaagggctccggaaatactcttagaccggttcagcttactgaccatatcagagctggccccagttag

SEQ ID NO: 248322 - RNA, 1410 nt, synthetic construct
  misc_feature 1..1410: note = Description of Artificial Sequence: Synthetic coding sequence
  source 1..1410: mol_type = other RNA
atgtgttacctgtccgccattatctctataagtttacttaacaaaaaaccgtccatggaacaatgggatcactttcataaccaacaggaagacaccgacagttgttctgagagcgtgaagttcgacgccagaagcatgactgctctacttccacccaaccctaagaactctcccagcctgcaggagaagcttaagagcttcaaggccgccctcattgcactatatcttctggttttcgcagttctcataccattgattggtattgtggccgcccagctccttaaatgggagactaagaactgtagtgtgtctagcacaaatgccaatgacataacccaaagcctgacagggaaaggcaatgactccgaggaggagatgaggttccaggaggtgttcatggagcacatgtcaaacatggagaaaaggatacagcacatcctagacatggaggccaatttaatggatacagaacattttcagaacttttcaatgaccactgaccagcgattcaacgacatattgctgcaacttagcactctgttctccagtgtacagggccacggaaatgctattgatgaaatatctaaaagcctcatcagcctgaatacaactcttctggacctgcagctaaacatagaaaacctaaatgggaagatccaagagaacacctttaagcagcaagaagagatctcgaaactagaagaaagggtatataacgtctcagcagagataatggccatgaaggaagagcaagtccacctggagcaggagataaagggtgaagtcaaagtgttgaataacatcacaaatgatctgcggcttaaagactgggaacattcccaaactcttagaaatataacactcatccaaggtcccccaggccccccaggcgagaaaggtgaccgcgggcctaccggggaatccggacctcgcgggtttccggggcctatcggccctccaggtttgaagggcgacagaggcgctatcggctttcccggcagtagggggttaccaggatatgcgggtaggcccggcaattccgggcccaagggccagaaaggagagaagggctccgggaataccctgactcctttcactaaagtacggctggtagggggctccggcccccatgagggcagggtggagatcctgcacagcgggcagtggggtaccatttgtgacgaccggtgggaagtcagagtaggccaagtcgtttgcagatccctgggataccccggggtccaggctgttcataaagctgcgcatttcggacaggggactggacccatctggctcaacgaggtgttttgtttcgggcgagaatccagcatcgaggagtgtaaaatccggcagtggggaactcgggcttgtagtcacagtgaggatgctggagtcacttgcactttatag

SEQ ID NO: 248323 - RNA, 195 nt, synthetic construct
  misc_feature 1..195: note = Description of Artificial Sequence: Synthetic coding sequence
  source 1..195: mol_type = other RNA
atggaacaatgggaccactttcacaatcaacaggaagacaccgacagctgctcagaatcagtgaagtttgacgcacgcagcatgacagccctactgcccccgaaccctaaaaattccccctcattacaagaaaagctcaaaagttttaaagcagctcttattgctctgtacctgttggtatttgccgtgttatag

SEQ ID NO: 248324 - RNA, 399 nt, synthetic construct
  misc_feature 1..399: note = Description of Artificial Sequence: Synthetic coding sequence
  source 1..399: mol_type = other RNA
atggctatgaaggaagaacaggttcaccttgaacaggaaatcaagggcgaagtgaaggttctgaacaatatcactaacgatctccggctcaaagattgggaacactcccagaccctgcgcaacatcacattgattcagggccccccaggtcctcccggagagaagggcgacaggggcccaaccggtgagagtggacctcgcggatttccaggacccattggtcctccgggattgaagggagatagaggtgcaattggtttcccagggagccgcgggctgcctggatacgcaggaagacctgggaattccggcccgaaaggacagaaaggagaaaagggaagcggaaatacactccgtcctgtacaactgacagaccatatccgcgctggtccctcctag

SEQ ID NO: 248325 - RNA, 1143 nt, synthetic construct
  misc_feature 1..1143: note = Description of Artificial Sequence: Synthetic coding sequence
  source 1..1143: mol_type = other RNA
atgaggtggctcctgctttattatgctctttgcttttccctgtcgaaggctagtgcccatacagttgaactcaataacatgttcggccagatacagtcaccaggatatccagactcctatccaagcgactcagaagtaacctggaatattactgttcccgacggctttcgtattaaactgtacttcatgcattttaatctagaaagctcctatttgtgcgaatacgactatgtaaaggtggagaccgaagaccaggtgctcgcaacattctgtgggagggagaccacagatactgagcagacccccggacaggaagttgtgctaagtccgggctctttcatgagcataacctttagaagtgacttctccaatgaggaaagatttacagggttcgatgcacattacatggccgtcgacgtggacgaatgtaaagaaagagaggacgaggagttatcttgcgaccactactgccacaattatataggaggatactactgctcttgtcgtttcgggtacatacttcatactgataatcgaacctgccgagtcgaatgtagtgataatttgttcacgcagcgtaccggtgtgattacctccccggactttcccaatccatatccaaagagcagcgagtgcctgtataccatcgagttggaagaaggctttatggtgaacctacagtttgaagacattttcgacatagaggatcacccagaagtgccatgcccctatgactacattaaaattaaggtcggacccaaggtgctagggccattttgcggcgagaaggcaccggaaccaattagcacacagtcgcattccgtgctgatcctgtttcattctgataacagcggagaaaacagaggatggagactcagctaccgcgccgccggaaatgaatgtcctgaactgcaacctcccgtacatgggaagattgaaccatcccaagcaaaatactttttcaaggaccaggtgcttgtgagttgcgacaccggctataaggtactcaaggataatgtcgaaatggatacatttcagatcgagtgcctgaaagacggtacatggtctaacaaaattcccacctgtaaaaagaatgaaattgacctagagtcagaactgaagagtgagcaggtcaccgagtag

SEQ ID NO: 248326 - RNA, 2187 nt, synthetic construct
  misc_feature 1..2187: note = Description of Artificial Sequence: Synthetic coding sequence
  source 1..2187: mol_type = other RNA
atgcggtggttacttttgtactacgcgctgtgttttagccttagtaaggcaagtgctcacaccgtggaactcaacaatatgttcggacagattcagtccccaggttatcccgactcctatccttccgacagcgaggtgacatggaacattactgtccctgacggatttaggattaaactatactttatgcatttcaacttagaatcctcttacctgtgcgagtatgactacgttaaggttgagactgaagaccaagtcctagccactttctgtgggcgtgaaactacagatactgagcagaccccagggcaggaagtcgtcctatcacctggcagcttcatgagtattacatttagaagcgacttttccaacgaggagagatttactgggtttgacgctcattatatggccgtggacgttgatgaatgcaaggaacgcgaggacgaagaactgtcttgcgatcactattgtcacaattacattggtggatattactgctcgtgtaggttcggttacattctacatactgacaatcgaacatgccgcgttgagtgcagtgacaatctctttacacagcggacgggcgttataacatctcccgatttccccaacccttatcccaagagcagtgagtgtctgtacacaatcgaactggaagagggattcatggtgaatttacagttcgaagatatctttgatattgaagaccatcctgaagttccgtgcccgtacgactacatcaaaattaaggtcggtccaaaggtgctcggccctttctgcggtgaaaaggctcccgaaccgatcagcacccagagccacagtgtgctgattctcttccatagtgataattccggagaaaatcgggggtggcgactcagttatcgcgctgctggcaacgagtgtcctgaactccaacctccagtacatggcaagatcgagcctagtcaggcaaaatactttttcaaagaccaagtccttgtatcctgcgacaccggatataaggtcctaaaggacaatgtggagatggatacatttcagatcgagtgcctgaaagatggaacatggtccaataagatcccaacctgtaagatcgtggactgtcgagcccctggggaattggaacatggcttgataaccttctccacccgcaataatctgacaacttataagagtgaaatcaaatactcctgtcaggagccgtattataagatgttgaataacaacacaggaatctatacatgttcagctcaaggggtttggatgaacaaggtgctgggaaggtccttaccaacttgtcttcccgagtgtggccagccatcccgatcccttcccagtttagttaagcgtatcattggagggcgtaatgccgagcccggtttgtttccttggcaggccctgatagtagttgaagacacatcccgagtgcctaacgataagtggtttggcagcggggccttgctgtcagcttcatggattttgacagctgctcacgtactgcgatcccagagaagagataccactgtcatcccagtgagtaaggagcacgtaacagtctatctgggactgcacgacgtgcgtgataaatccggtgcggtcaacagttcggccgctagggtcgtgctgcatccggacttcaacattcaaaactataatcatgacatcgcactcgtacagctgcaagaaccagtcccactcggaccacatgttatgccagtctgcttacctagactagaaccagaggggcctgctccccatatgctcgggctggtcgccggatgggggatttctaatcctaacgttaccgtcgacgaaattatttcctctggaacaaggacactgtcagacgtgctgcagtatgtgaagttaccagtggtgccccacgctgagtgtaagacctcgtacgagtctcgcagcggcaattattctgtcaccgaaaacatgttctgtgcagggtattatgagggtggaaaggatacatgtctgggagactcggggggggcatttgtgatttttgatgacctatcacagcgctgggtagttcaagggctggtgagttggggcggtcccgaggagtgtggtagtaagcaggtttacggggtttatacaaaggtgtcaaactacgtggactgggtgtgggaacaaatgggtttgcctcagtctgtggtcgaaccccaagtggagcgttag

SEQ ID NO: 248327 - RNA, 2100 nt, synthetic construct
  misc_feature 1..2100: note = Description of Artificial Sequence: Synthetic coding sequence
  source 1..2100: mol_type = other RNA
atgagatggctgttgctgtattacgcactgtgcttctctctgtcaaaggcttctgctcacaccgtcgagctgaacaacatgttcggccagatacaatcccctggataccccgatagctacccgtccgactccgaggttacctggaatataaccgtcccagatggattcagaatcaagctgtatttcatgcattttaacttggaatcaagctacctgtgcgagtacgactatgtcaaggtagaaacggaagaccaggtcctggccacattttgcggcagagagaccaccgacaccgagcagactcctgggcaggaagtcgtgctctccccaggaagctttatgtctatcacgttcagatccgactttagcaacgaagagcgttttacagggttcgatgcccactatatggcagtggacgtagatgagtgcaaagagagggaagatgaagaattatcctgcgaccactattgccataattacatcggcggatactactgctcttgtcgcttcggttatattttgcatacagataatcgcacctgccgagtcgaatgtagtgataatttgtttacccagaggacgggagtgatcacatctcccgacttccctaacccctacccaaaatcgtccgagtgtctgtatactatcgaattagaagaggggttcatggtgaatcttcagtttgaggacatttttgacatagaggaccatcctgaagttccatgtccatatgattatattaaaataaaggtggggcccaaagttctcgggcccttctgcggagaaaaagcacccgagcctatatccactcagtcccacagtgttttaatcctgtttcactcagacaactccggcgaaaaccgcggctggcgtctttcataccgcgctgcgggaaatgaatgccctgaacttcagcctcccgtacacgggaaaattgaaccatcccaagctaagtatttttttaaagatcaagtgcttgtttcgtgcgacactggctacaaggttctcaaggataacgtggaaatggacactttccaaatcgaatgtctgaaggacggcacctggagcaacaagatacctacttgcaagattgttgactgtagagccccaggtgaactggaacatggccttatcacattctcgacccggaataacctcaccacatataagtcagaaatcaaatacagttgtcaggaaccttattacaagatgctgaacaacaatactggaatatacacatgttcggcacaaggcgtgtggatgaacaaggtactgggcagatcgcttcccacctgccttccagtatgtggattacctaagttctctagaaaattgatggcacgcatttttaacggacgacctgctcagaagggcacaactccctggatcgccatgctgagtcatctgaacgggcaacccttttgtggaggtagtctactcgggtcaagctggattgtcacagccgcccattgcctgcatcagtcacttgatccagaggaccctaccctcagggactccgatcttctgagccctagcgatttcaagatcatccttgggaagcactggcgcctgcgatcagatgaaaacgagcagcacctaggcgtgaaacataccaccctgcacccccagtatgacccaaacactttcgagaatgatgttgccttagtggaattactggaatctcccgtattgaacgctttcgtcatgcctatctgcttaccagaagggcctcagcaagagggcgctatggtgatcgtttctggctggggcaaacaattccttcagcgatttccagagacccttatggaaattgaaattccaatcgtggatcactctacatgccaaaaggcttatgcccctctcaagaagaaggtcacacgtgatatgatctgcgcaggcgagaaagaggggggcaaggatgcttgcgctggggactccggtggccccatggtgaccctgaaccgcgagagaggtcagtggtatttggtgggcactgtgagctggggagatgattgtgggaaaaaagatcggtacggcgtgtattcatatatacatcacaataaggattggatccagcgggtgacgggagtgcgcaactag

SEQ ID NO: 248328 - RNA, 1848 nt, synthetic construct
  misc_feature 1..1848: note = Description of Artificial Sequence: Synthetic coding sequence
  source 1..1848: mol_type = other RNA
atgtcaattacatttagaagcgacttcagcaacgaggaaaggtttactggcttcgacgcccactatatggccgtggatgtcgatgagtgcaaagagcgggaggatgaagagctctcatgcgaccactactgccataattatatcggggggtactattgcagctgccgctttggatatatattgcatacggacaaccgtacctgcagggtagaatgcagcgataatctgtttacccagaggactggagtaattaccagccccgacttccccaacccctacccaaagagttcagagtgtctgtatactatcgagttagaagaaggtttcatggtgaatctccagtttgaggacatcttcgacatcgaagatcatcctgaagttccttgcccttacgactacatcaaaatcaaagttggaccgaaagtcctcgggcccttttgcggagaaaaagcgcccgagcctatttccacgcaatctcactctgttttaatattgtttcattccgacaactcaggagaaaatagaggatggagacttagctatagagcggctggcaacgagtgcccggaactgcagccaccagtccacggcaagattgaaccttcacaagcgaagtatttctttaaagaccaagtcctggtaagctgtgataccggttataaagttctcaaagacaatgtggagatggatacattccagatcgagtgcctgaaggatggaacttggtccaacaaaattccaacgtgtaagattgttgattgtcgagccccaggcgaactggaacacggcctaattacattttctactcggaacaatctgacgacatataaaagcgagatcaaatatagctgccaggaaccctattacaaaatgttaaacaataataccggaatctacacttgtagcgcccagggtgtgtggatgaataaagttctcgggagatcactccccacatgtcttccagagtgcggccagccaagccggagcctgccctccctcgtaaagcggattatcggcggtcgtaatgcagagcctggtctgtttccttggcaggcgcttattgtggtggaagacacttcccgcgtacctaatgataaatggttcggcagcggagctttgctgagcgcctcctggatccttacagctgcccacgtgttaagaagtcagcggagagacacaaccgtgatcccagtatccaaggaacacgttactgtctatctgggtctgcatgatgttagagacaaaagcggcgcagtcaacagcagcgccgcccgcgttgtgctgcaccccgatttcaatatccagaattacaatcatgatatcgctttggtgcagctacaggaaccagtgcctcttggacctcatgtgatgcctgtgtgcttgccaaggttggaacctgagggtccagctccacacatgctcgggctcgttgccgggtggggtatttctaaccctaatgttaccgtggacgagattataagttcaggtacaaggacactgtccgatgtactgcaatatgttaagctcccagtcgttccccacgcagagtgcaagacatcctatgagtcaagaagtggtaattactccgtgacagagaatatgttctgtgcagggtattatgagggaggcaaggatacgtgcttgggagatagcggaggggctttcgtgatattcgacgatctgagccagcgctgggttgtgcaaggactagtttcctggggagggcccgaggaatgcgggtcaaaacaagtctatggcgtttatacgaaggtctccaattatgtggattgggtctgggaacagatgggtctaccacagagtgtggtcgaaccccaagtggaacgctag

SEQ ID NO: 248329 - RNA, 249 nt, synthetic construct
  misc_feature 1..249: note = Description of Artificial Sequence: Synthetic coding sequence
  source 1..249: mol_type = other RNA
atgttttgtgcagggtattacgaaggtggcaaagacacttgcctgggggattccggtggcgcgtttgtcatatttgatgatctgagtcaacgatgggtagtgcaaggactcgtgagctggggcggacccgaagaatgcggcagtaaacaggtatatggtgtttataccaaggtgtctaattatgtcgattgggtgtgggagcagatgggattacctcaatcggtcgtggagccccaggtggaaagatag

SEQ ID NO: 248330 - RNA, 1443 nt, synthetic construct
  misc_feature 1..1443: note = Description of Artificial Sequence: Synthetic coding sequence
  source 1..1443: mol_type = other RNA
atgagcataaccttccgatcagacttcagcaatgaggagaggtttactggtttcgacgcccactatatggcagtggatgtcgacgaatgcaaggagcgagaggacgaagaactcagttgcgatcattattgtcacaattatataggcgggtattattgctcctgtcgctttggatacatcctgcacacagataatcgaacctgccgggtcgaatgtagtgataatctcttcacccagcgaaccggtgtgattacctcccccgactttccaaacccctatccaaagtcatctgaatgcttatatacaatcgaacttgaggagggcttcatggtcaacctgcaatttgaggacatctttgatattgaggaccatcctgaagtgccatgcccttacgactacattaagattaaggtcggtcctaaggtcctcggccccttttgcggcgaaaaagcgcctgaaccaatctcaacacaatcccattcagtgcttattctgtttcactcagacaattctggagaaaatcggggctggagactgtcttatcgggccgccggaaatgagtgtcctgaattgcagcctccagttcatggcaagatcgagccatctcaagccaaatacttcttcaaagatcaggtcctggtaagctgtgacaccgggtataaagtcttaaaggataacgtggagatggacacctttcagatcgaatgtctcaaggatggcacatggagtaacaagatccctacctgtaagatagtggactgcagagctcccggagagctggaacatggcctcattaccttcagcactcggaacaatcttacaacatataagtctgaaatcaagtattcatgtcaggagccttactataagatgctgaataacaataccggaatctacacctgctcagctcagggcgtttggatgaataaggtcttgggcagaagcctccccacatgcctgcccgagtgtggacaaccttcacggtctctgccatctttggtgaagcggataattggcgggcgcaacgctgagcccggcttatttccctggcaggccctaatagtggtggaagacactagtcgcgttcctaacgacaagtggttcggatcaggcgctcttctgagcgcaagttggattctcacagccgctcatgtgctacgaagtcaaagaagagacacgaccgtgatccctgtctctaaggaacacgtgaccgtctacctgggtctgcatgatgtgagagacaaatccggcgcagtgaacagctcagccgcaagagtagtgctgcaccctgacttcaacatccagaattataatcacgacatagccctagtccagctgcaagagcctgtgcctctgggcccacatgtaatgcccgtctgcctgcccaggttagaacctcccgggggaaggctgggacatctccaaagtcagtgcgactcctag

SEQ ID NO: 248331 - RNA, 834 nt, synthetic construct
  misc_feature 1..834: note = Description of Artificial Sequence: Synthetic coding sequence
  source 1..834: mol_type = other RNA
atgttccccttctacagctgttggagaacgggcttgctattactcctgctggccgtggccgttcgagaatcctggcagaccgaggagaaaacttgcgatctggtgggcgagaagggcaaagaatcagagaaggagcttgcgctagtaaagcggctgaagcccctgttcaataagtcgtttgagtctacagttggacagggcagtgatacttacatttatatctttcgggtttgtagggaggctggcaatcatacaagcggagcgggcttggtgcaaataaataagtctaacggcaaggaaaccgtggtaggtcgcctgaacgagacgcatatattcaatggcagtaactggatcatgcttatctataaaggcggagacgagtacgataatcactgtgggaaggagcagcgacgtgcagtagtgatgatatcttgcaatagacataccctggcagacaattttaaccctgtgagtgaggaacgcggaaaagtccaggattgcttctatctttttgagatggattctagcctggcgtgcagtccagaaatctcccatctgagcgttggctcaatcctgctcgtgacctttgcctctctcgttgccgtctacgtagttggtgggtttttgtatcagaggctggtagtcggagcaaaaggaatggaacagtttccacatctcgcgttttggcaagatctgggaaatctggttgccgatgggtgcgacttcgtatgtaggtcaaagccccgcaatgtacccgctgcctatcgtggcgtgggcgacgaccaactgggggaggagtccgaggaaagggacgatcacctcctgccaatgtag

SEQ ID NO: 248332 - RNA, 3942 nt, synthetic construct
  misc_feature 1..3942: note = Description of Artificial Sequence: Synthetic coding sequence
  source 1..3942: mol_type = other RNA
atgagcggatggcgctatcttatatgcgtttctttcctgctgacaatacttttagaattgacttaccagggtccccctgtacccgccagctcaagtaccaaactgctgatgacttcttattcgatgcggagcaccgtggtatcccgatatgcacacactctggtgacctccgtgctattcaatcctcatgctgaagcccacgaggcaatttttgacctggatttgccacacctggcgttcattagcaattttacgatgacaattaataataaggtgtatattgcggaggtaaaggagaaacaccaagcaaagaagatttatgaggaagcacaccagcagggaaagacagcagcccatgtaggcatccgcgatagggaatccgagaagttccggattagcacatcattagccgcagggacagaagttacattttcattagcatacgaagaactgctacaacgacatcaaggacagtatcagctggtcgtgtcactgagaccgggccaactggtcaaacgcctcagcattgaagtaacggtgagcgaacgtacgggtattagttacgtgcatatccccccactgcgcactggacggctccggaccaatgctcacgcctctgaggtcgattcccctccctcgacgcgtatagaaagaggagaaacctgtgtacgaataacttattgtcccacattgcaggaccagagcagtattagcggcagtggaattatggcggactttttggtgcagtacgatgtcgttatggaggacattattggggatgtgcagatttatgacgattactttatccattattttgctccccgcggacttccgcccatggaaaagaatgtagtcttcgttatcgacgtgagctcctccatgttcggtactaagatggaacagactaaaacagccatgaacgtcattctatccgacctccaggccaacgattacttcaatattatttcgttcagcgacaccgttaatgtgtggaaggctggcgggagcatacaggccactattcagaatgtgcacagtgcaaaagattatctccattgcatggaggccgacggatggacagacgtgaatagtgctctcctggctgctgcttccgtgctcaatcattccaatcaggagccgggccgcggcccttctgtaggtaggattcctttgataattttcttaactgacggagaacccactgccggcgtgaccactcccagtgtgattctgtccaatgttcggcaagctctgggccatcgcgtgtccctattttcgctggccttcggtgatgacgccgatttcaccctactgcgacgccttagccttgagaatcgcggaattgccagaagaatttacgaagacaccgatgctgctctgcaactcaaagggctctacgaagaaatatccatgcctttgctcgccgacgttcgtctgaactacctcggagggctggttggagcgagcccttgggcagtgtttccaaattatttcgggggcagcgagctggtagtagccggccaagttcagcccggaaagcaagaattaggaatccatctcgccgcgagggggcctaaggatcagctgctggtggcccaccactccgaaggcgcaactaacaattcccagaaggcttttgggtgtccaggcgagcctgccccaaacgtagcacactttataagacggctctgggcatatgtgaccattggagaactactggatgctcacttccaagctagggatacaacaactagacacctcctcgcagccaaggtcctgaatctgtctcttgagtacaacttcgtaactcctttaaccagcctggtaatggtgcagcctaaacaggcctccgaggaaactagacgacagacttcaactagcgcaggtcccgatactataatgccatcttcaagctcaagacacggattgggggtctcaacagcgcagcctgcattagtgcctaaggtcatttctccgaagtccagacctgtaaaaccgaagttctacctgtcctccactacaacagcctcaacaaaaaaaatgctgtcatctaaagagttagagccactcggggagtctccccataccttatcaatgcccacctacccgaaagcaaaaattcctgcgcagcaagactcaggaacgttagctcagccaaccctaagaacaaaaccgaccattctggtgcctagtaactcagggaccttacttcctctgaaacccggctccctctcccatcagaaccccgacattctgcccacaaacagcagaactcaggtgcctccagtgaagcctggaataccagcctcccctaaagccgacacagtcaagtgcgtgacacccctgcatagcaagcctggcgctccttcccatccacaactcggagcacttacatcgcaagcaccaaagggccttccacagtcaaggcccggagtaagcactctccaggttccaaaatatcccttgcacacccgccctcgtgttcctgcccctaagacacgaaataacatgccccatctgggccctggtatcctgctatccaaaacccccaagatcctgctctccctcaagcccagcgcgccgccccatcagatctccacatcaatttcactgtctaaacccgagacaccaaatccccatatgccacagaccccattaccaccgcgcccggacagacctaggcctcctctccccgagtcactgagtacttttccaaacacaatatcctcaagtactggaccaagttccaccacaactacctccgtgctgggagagccccttcctatgccttttacaccgaccttaccccctggcaggttttggcaccagtatgatctgctccctggtcctcagagaaccagacaagtcctgggaccatctaggcctggagttcccacaatgagtttgctgaactcttcccgcccgacccccgagggtagccctcccaatttgccgattctccttccgagctctatactgcctgaggctatttcattgcttctgctcccggaagaactagaactgctgtctgagtccatggtggagtctaagtttgtagagtccctcaaccccccagcattttatacatttcttacgcctgatgaagacggtagccccaactgggacggaaatagtgaagagatcctcggcggagctggcggaagcatggagtctcagggcagctctgttggcctggccaagggaacattgccctcaattttcacctttagcagctctgtggacggagacccacactttgtgatccagataccccatagcgaagaaaagatctgctttaccctcaacgggcacccaggagacttgctgcagctgatcgaggaccccaaagctggactgcatgtctccgggaagctgctcggcgctcctccccgacctggccataaggaccaaacacggacctattttcaaattattactgtcacaacagataagccacgcgcctacactatcaccatcagccggagcagcattagcctcagaggagagggaacactcaggctttcatgggaccaaccagctctcctcaaacggcctcagctcgaactgtatgtcgcagccgccgctaggctgaccctcagattgggaccgtacctagagtttctcgtattgcgccataggtaccgccatccgtcaacccttcagctgccacacctcggattttacgtggctaacggctccgggctgtctcctagcgctcgcggcctgatagggcaatttcagcatgccgatatcaggctggtaactggacccatgggaccctgcttgcgccgacaccatggccctgacgtgcctgttattctcggcaaaagactccttaaggactcaccgaggcttttgcctagatgggccagctgctggctggttaaaagatcacacgtggaactgctactgggccacccctatctttcttacgttctttag

SEQ ID NO: 248333 - RNA, 804 nt, synthetic construct
  misc_feature 1..804: note = Description of Artificial Sequence: Synthetic coding sequence
  source 1..804: mol_type = other RNA
atgatgagcagtaagcccaccagtcatgcggaagtcaacgagaccatcccaaatccgtaccctcccagtagtttcatggctcctgggttccaacagcccctcggctctattaacttggagaaccaggcacagggcgcgcaacgcgctcagccatacggaattacctccccaggcatctttgcttccagccaacccggtcagggaaatattcaaatgattaacccctctgtcggaacagccgtgatgaatttcaaggaagaggccaaagcactaggggtcattcaaattatggtgggcctgatgcatattggatttggtatcgtgctatgccttatctctttttcattccgtgaagttctcggatttgcaagcaccgctgttattggcggataccccttctggggcggcttaagctttatcatcagcggttccctgtcagtgtccgcctctaaggaactaagcagatgccttgtgaagggtagtctcggaatgaatatagtatcatctatacttgcattcatcggagtgatcttattgctagtggacatgtgtatcaatggggttgctggccaggattactgggccgtcttgtctgggaagggaatttctgccacactaatgatcttctccttactggagttttttgtcgcctgcgccacggcccattttgcaaaccaggccaacacaacaacaaatatgtctgttctggtgatccctaacatgtatgaatccaaccccgtaactccagcctcaagcagtgcaccgcctagatgtaacaactattcagcgaacgccccaaagtag

SEQ ID NO: 248334 - RNA, 876 nt, synthetic construct
  misc_feature 1..876: note = Description of Artificial Sequence: Synthetic coding sequence
  source 1..876: mol_type = other RNA
atggaaagaaagaggtgggagtgccccgcgttaccccagggctgggagagggaggaggtgccccgtcgttcagggctttccgccgggcatcgagatgtgttttattactcccccagtggtaagaaattcaggtccaaaccacagttagctcggtacctgggcggatcaatggatttgtccacattcgatttccgtacaggcaagatgttgatgagcaagatgaacaaaagcaggcagcgcgtgcgctacgactcatccaatcaggtaaaagggaagcccgacctgaataccgcccttccagtgagacagactgcatccattttcaaacagcccgtgactaaaattaccaaccatccttcaaacaaggttaagagcgaccctcaaaaggccgtcgaccaacccaggcagctgttctgggaaaagaagctttcaggcctcaatgcattcgatatcgccgaggagttggtaaagaccatggatctgcctaagggtctgcaaggggtgggcccaggctgtaccgatgagacccttctgagtgcaatagcctccgccttgcatacatccactatgccaatcaccggccagctgagtgcggccgtggaaaaaaaccctggagtgtggctgaataccacccagcccctgtgtaaagcctttatggtgaccgacgaagacatcagaaaacaggaagaactggtgcagcaggttcgaaagagactagaagaggcccttatggctgatatgctcgcacatgtggaagagctggccagagacggagaggcccctcttgataaagcttgtgcagaggatgatgacgaagaggatgaggaagaagaagaggaagagcctgacccagatcctgagatggagcacgtgtag

SEQ ID NO: 248335 - RNA, 522 nt, synthetic construct
  misc_feature 1..522: note = Description of Artificial Sequence: Synthetic coding sequence
  source 1..522: mol_type = other RNA
atgtccctgcttggaccaaaagtactactgttcctcgctgcctttattataacctccgattggatccccttaggcgtgaatagccagcgaggggatgatgtcacacaggccacgccggagaccttcaccgaagaccccaacctggtgaatgatccagccaccgatgagaccgtccttgccgtacttgccgatattgccccctctactgacgaccttgcttcactgtcagagaaaaacaccaccgctgaatgctgggacgaaaagtttacctgtactcgtctctactctgtgcaccgccctgtaaaacaatgcattcaccagctctgtttcaccagtctgagacggatgtacatagtcaacaaagaaatttgctctagacttgtctgcaaagagcatgaggctatgaaagatgaattgtgcagacagatggccggtctgccccccaggcgtctccgacgtagcaactattttagactgcctccttgcgagaatgtggacctccagagaccaaatggattatag

SEQ ID NO: 248336 - RNA, 492 nt, synthetic construct
  misc_feature 1..492: note = Description of Artificial Sequence: Synthetic coding sequence
  source 1..492: mol_type = other RNA
atgtccttactcggtcctaaggtgcttctattcctggccgcattcataattacatctgattggatccctctcggggtgaattcccagcgaggcgacgatgtgactcaggccactcccgaaacgtttacagaggaccctaatctcgtcaatgatcccgcaacagatgagacagttcttgcagtgctggcagatatagctccgtcgaccgatgacctggaatgttgggacgagaaattcacttgcacccgcttatactccgtgcaccgtcctgtgaagcaatgtattcatcagttgtgtttcacctcccttcgaagaatgtacatcgtcaacaaggaaatatgctcacgcctggtctgcaaggaacacgaagccatgaaagatgaattgtgtcgacagatggccgggctcccccctaggaggctcagaagaagtaattatttccgccttccaccctgtgaaaatgtggatttgcagcgccccaacggactgtag

SEQ ID NO: 248337 - RNA, 447 nt, synthetic construct
  misc_feature 1..447: note = Description of Artificial Sequence: Synthetic coding sequence
  source 1..447: mol_type = other RNA
atgtcactactgggtcccaaggtgttactgttcctcgctgcattcataataacatccgattggattccattaggcgttaactcacagcgcggggatgacgttacccaggcaacgccagaaacctttacggaagatcctaacctggtcaatgatccagccaccgacgagacagagtgctgggatgagaaatttacttgtacacgcttgtatagcgtacacagacctgtcaagcagtgtattcaccagctgtgctttactagccttagaagaatgtacatagttaacaaagaaatctgcagccgcttggtttgcaaggagcacgaagctatgaaagacgagttgtgccgccaaatggcaggacttcccccacgacggttgcgtaggtccaattatttcagactgccaccctgtgagaatgtggacctgcaacgaccaaacggcctgtag

SEQ ID NO: 248338 - RNA, 492 nt, synthetic construct
  misc_feature 1..492: note = Description of Artificial Sequence: Synthetic coding sequence
  source 1..492: mol_type = other RNA
atgtctctgttggggcctaaggtgttactgtttctagctgctttcataattacaagtgattggattccactgggtgttaattctcagagaggagatgacgtgactcaagcaactcccgaaacatttactgaggatcccaacttggtgaacgacccagccaccgacgagacggttctggccgtgctagcagacattgccccatcaaccgatgacctggaatgttgggatgagaaattcacctgcacaagactgtacagcgtacaccgccccgtcaaacagtgtattcaccaattatgtttcacttccctcagaaggatgtacattgtgaacaaagagatatgttcaaggctggtgtgtaaagagcatgaagccatgaaggacgagctgtgtagacagatggcaggtctccccccccgacggttgcgccgttccaattactttagactcccaccttgtgagaacgtggacttgcaaaggccaaacgggttgtag

SEQ ID NO: 248339 - RNA, 276 nt, synthetic construct
  misc_feature 1..276: note = Description of Artificial Sequence: Synthetic coding sequence
  source 1..276: mol_type = other RNA
atgagtctcctaggacccaaggtgttattatttctggccgcatttattataacctctgattggatccccctgggggtgaatagccagcgaggggatgatgtaactcaagctacccctgaaacttttacagaagacccaaacctcgttaacgatcccgctacagatgagaccgtgttagccgttcttgcggacattgctcctagtaccgacgatctcgcatcgttgtccgaaaaaaacaccaccgcggaatgctgggatgaaaaattcacgtgttag

SEQ ID NO: 248340 - RNA, 468 nt, synthetic construct
  misc_feature 1..468: note = Description of Artificial Sequence: Synthetic coding sequence
  source 1..468: mol_type = other RNA
atggtggatctcacccaggttatggacgacgaagttttcatggcgttcgctagttacgccacaatcatcctcagtaaaatgatgctcatgtcaactgccacagccttttatagacttaccaggaaggtctttgccaatcctgaggactgcgtcgcatttgggaaaggagagaatgccaaaaagtaccttcgcactgatgatcgtgttgaaagggtgcgtagagctcacctaaacgatctggaaaatatcattcccttcttgggcatcggcctgctttattcactcagtggaccagatccttcgactgccatcctccactttcgcctcttcgtcggagcaagaatttaccatactattgcctacttgactccattaccacagcctaatcgcgccctctcattttttgtagggtacggagtgaccctgagcatggcatatagactgctgaaatccaaactctacctttag

SEQ ID NO: 248341 - RNA, 4395 nt, synthetic construct
  misc_feature 1..4395: note = Description of Artificial Sequence: Synthetic coding sequence
  source 1..4395: mol_type = other RNA
atgttcagttttgtcgacttaagactgctcttgctgctggcagcgacagcactgctgacacatggacaggaggagggacaagtcgaaggacaggacgaagatatcccccctatcacatgcgttcaaaacgggttacggtaccatgaccgtgacgtgtggaagccagagccatgccgtatttgcgtgtgcgacaacggtaaagtgctgtgcgatgacgtcatctgcgatgagacgaaaaactgccctggggcagaagtcccagaaggcgagtgttgtcccgtgtgccctgatggctcggagtcccctacagatcaggaaacaacaggggtggaaggccctaaaggggataccggccctcgggggccccggggtccagcaggcccaccaggtagggacggcattccagggcagccaggcttgcctggtccgcccggaccccccggccctcccggcccacccggattgggaggaaatttcgctccccaactgagctacgggtatgatgaaaagtccacgggaggcattagtgtgccaggcccaatgggtccatccggcccccgagggcttcccgggccccctggggcacccggtccacagggctttcaggggccacccggcgaaccgggggaaccgggtgctagcgggcctatgggaccaagaggcccccctggtccccccggaaagaatggtgatgatggggaagcaggcaaacctggacgacctggggagcgcggtcccccagggccacagggtgcgcggggcctgcctgggactgcgggactacctggcatgaaaggccaccgaggcttctcgggtttagacggagcgaaaggcgacgcaggacctgctggacctaaaggagaacctggatcgcctggggagaatggggccccaggccaaatggggccaaggggcctgccgggggagaggggacgcccgggtgccccgggaccggctggtgcgcgcggaaacgatggagctacgggcgccgctggcccacctggccctaccgggcctgccggtcctcccgggtttcctggtgccgtgggcgctaagggggaagcaggaccccaagggcccagaggaagtgaaggccctcaaggcgtgcgaggcgagccaggcccccccgggccagcaggtgcagcgggtcccgccgggaaccctggcgccgatgggcaacccggtgccaagggcgctaacggtgcgcctggtatagcaggagcaccaggctttccaggggcccggggcccttcaggccctcaaggcccaggaggcccccctggccccaagggaaactctggggaacctggggcccctggatcaaaaggtgataccggcgccaaaggcgaaccggggcctgtgggtgtgcaaggtccccccggacccgctggcgaagaaggcaagcggggcgcacgcggtgagcccggccctaccggtttgcccggacctcctggggagagagggggccctgggtcacgcggattcccgggcgcagatggagtggcaggtccgaaggggcctgctggcgaacgtgggagcccaggcccagccgggccgaaaggttctccgggagaggctggcaggcctggggaggctgggttgcctggcgccaaaggactgaccggaagtcctgggtcccctgggcccgacggaaaaaccggaccgccaggtccagccggtcaggatggaaggcccggcccacccggtcctcccggagcaaggggacaggccggcgtcatgggcttccccggcccaaagggagcagccggtgagcctggaaaagccggggaaaggggggtaccagggccacctggcgccgtgggccctgcagggaaagatggcgaggcgggggctcagggacccccgggaccagctggcccagctggtgagcgcggagaacaaggccccgcagggtccccaggcttccagggtctacctggccccgcaggaccccccggagaggctggcaagcccggagaacagggagtcccaggcgatctgggagcgcccggtcccagcggggcgagaggggagagaggcttcccaggcgaaagaggcgtgcaaggaccacctggacccgctggccctcgcggcgcgaatggggctccaggaaacgatggtgctaagggcgatgccggagctcccggagctcccggatctcagggagctcccggactccaggggatgcccggagagcggggagccgctgggctacctgggcccaaaggagatagaggcgatgcaggacctaagggggctgatgggtcaccaggcaaagacggcgtgcgggggctgaccggtcctatcggccctcccggacctgctggagccccaggcgataagggcgaatctggtccaagtggacccgccggtcccactggagcccgaggcgctccaggagaccgcggcgagccagggccacctggtcctgcaggttttgccggacctccaggtgcggacggacagcctggagctaagggcgagcctggcgacgcaggagccaagggcgacgcgggaccaccaggtccagccggacccgcaggtccgccgggacctatcgggaatgtcggagcacctggcgcaaaaggcgcaaggggctccgccggtccacccggcgcaaccgggttccccggtgctgccggacgagtgggtcctccaggcccctcagggaatgcaggtccaccaggtcctcctggtccggcaggcaaggaaggaggaaagggacctcgaggtgagacggggcctgctggtcgtcccggagaggtaggcccgccaggccctcccggcccagcgggtgaaaaaggttcccctggcgccgatggcccggctggcgcccccggaacccctggcccacagggcattgcaggccaaagaggggtcgtaggactaccaggacagcgaggcgaaagaggtttccccgggctgccaggcccctccggggagccagggaaacaaggaccctccggagccagcggggagcgaggcccacccggaccaatgggacccccaggcctggcaggacctcccggggagtccgggagggagggagcaccaggcgccgaggggtcgcctggaagggatggatcaccaggagctaagggcgataggggggagacagggcccgccgggccccccggtgctcctggagccccaggcgcaccagggcccgtgggcccagccggtaaatccggcgatcgcggtgagacagggcccgcaggtcccacaggacccgtggggcctgttggagcccgcgggcctgcagggcctcaaggaccaaggggcgacaaaggagagaccggcgaacagggggatcggggcattaaggggcaccggggcttttccggcctccagggtccccccggccctccaggtagtcccggagaacagggaccttcaggggcatctggcccggccggtcctcgtggtccacctggatccgccggagcacccggcaaggatggtttgaacggtctgcccggtcctattggaccgcccggcccccgggggagaaccggagacgcgggtccagtcgggccacctggcccaccaggtccaccaggcccccctggcccgccgtctgccggctttgatttcagttttcttccacagccaccccaagagaaagctcacgacggcggcagatattaccgggccgatgacgccaacgtagtgagagacagagatctggaagttgatacaacactgaaatcactctcacaacaaatcgaaaatatcagatcacccgaaggatctagaaaaaacccagcccggacctgtcgggacctcaaaatgtgtcacagcgactggaagtcaggggagtactggatcgaccccaaccagggatgcaatcttgacgccattaaagtgttttgcaacatggagactggagagacctgtgtctatcccactcagccctcagtggcccaaaagaattggtacatctccaaaaatcctaaagacaagcgccatgtatggttcggtgaaagcatgactgatggcttccagttcgaatacgggggtcaaggatctgaccctgccgatgttgctattcagcttacttttctccgtttgatgtcaaccgaggcctcgcaaaatattacctatcactgtaaaaatagcgtggcatacatggaccaacagacaggcaatctgaaaaaagctctgctgctgcagggctcaaacgaaatagagatccgcgccgaggggaattccagatttacctactccgtgactgtagacgggtgtacctcacatacaggagcctggggaaaaactgtgatcgagtacaagactaccaaaaccagcagactgccaattatcgacgtggccccactcgacgttggcgcgcctgatcaagaattcggattcgatgtaggccctgtgtgttttttgtag

SEQ ID NO: 248342 - RNA, 606 nt, synthetic construct
  misc_feature 1..606: note = Description of Artificial Sequence: Synthetic coding sequence
  source 1..606: mol_type = other RNA
atggccgcacggactgcatttggggcagtatgtagaaggttatggcagggattgggaaatttttcagtgaatacgagtaagggcaacaccgccaagaatgggggcctcctccttagtactaatatgaagtgggttcagttctccaatctacatgtggacgtgccaaaggacctgacaaagcccgtggtgaccattagtgacgaaccagatattttatacaaacggctgtccgtgctcgttaaaggacacgataaagcagtgttggattcctatgaatattttgctgtcctggccgctaaggagttaggaatctcgatcaaggtccacgaacctccacggaaaatagaacggttcaccttactgcagagtgttcacatctacaaaaagcacagagtgcaatatgagatgaggactttgtataggtgtctagaacttgagcatctgacaggatccaccgctgacgtctacttggaatacattcagcgcaatttgccagaaggtgtggcgatggaagtgacaaagacacagctggagcagctccccgaacatatcaaagagcccatttgggaaaccctgtctgaggaaaaggaagaatcaaaatcctag

SEQ ID NO: 248343 - RNA, 972 nt, synthetic construct
  misc_feature 1..972: note = Description of Artificial Sequence: Synthetic coding sequence
  source 1..972: mol_type = other RNA
atggctgccgccgccctacctgcttggttgagcttacaaagtagggccaggactttacgcgcgttttcgaccgcggtgtactccgcgacccccgtgcctacccctagcctgcccgagcgaacaccaggcaatgaaaggccacccagacgaaaagcactgcccccaaggactgagaagatggcagtagatcaggattggccttcggtgtaccctgtcgcagcgcccttcaagccatcagctgtaccacttccagttcgaatgggctatccagtgaaaaaaggggtccctatggctaaagaagggaatctcgagctcctgaaaatccccaatttcctgcacctcacccccgttgcaataaaaaaacactgcgaagctctgaaggatttttgcaccgagtggcccgcagccctggatagtgacgagaagtgtgaaaagcatttccctatcgaaatcgactccaccgactacgtgtctagcggtccttctgtacgcaatccccgggcacgcgtagtggtgctccgagtgaagctgtccagtctgaatctagatgaccacgcaaagaaaaaacttattaaattggtaggcgagcgctactgcaagaccacagatgttctgacaatcaaaaccgatagatgccccctaagaagacagaattacgactacgcagtgtacctgttgaccgtgctatatcacgaatcgtggaataccgaagaatgggaaaaatcgaagaccgaagcagacatggaagaatatatctgggagaatagcagtagcgagagaaacatattagaaacactgctccagatgaaggccgctgaaaaaaatatggagattaataaggaagagctcctgggcaccaaagaaattgaggagtacaagaagtctgtggtcagcttgaagaatgaggaagaaaatgaaaattccatcagccaatataaagaaagtgtgaagaggctactgaacgtaacctag

SEQ ID NO: 248344 - RNA, 1797 nt, synthetic construct
  misc_feature 1..1797: note = Description of Artificial Sequence: Synthetic coding sequence
  source 1..1797: mol_type = other RNA
atgctccctgatttcccctcccctagtacctgggcccctggacttctactgccatccggaccagccttgctcagcccgtcagttctgcaagactctcttagcttaggtcgaagtgaacagcctcatccaatatgttcctttcaagatgatttccaagagtttgagatgatcgatgataatgaagaggaggatgatgaggatgaggaagaggaggaagaagaggaagaaggagatggagaagggcaagaaggtggtgatcccggaagtgaggcacccgctccgggccccctgattcctagcccttccgttgaagaaccacataagcacaggcccacaacccttaggctcaccacactcggagcacaagactcccaagaccctgaagcagcggctggtcccggtggcgtggagctcgtggatatggaaaccctgaatccgacccgggataccatcacccccctctgggccgcccctggacgcgccgcccggcccggaagagcttgtagtgccgcctgcagcgaggaagaagacgaagaggatgacgaggaggaggaagatgccgaagactcggccgggtctcccggcggtcgcggcacaggacctagcgcaccgcgcgacgcatctcttgtttatgacgcagtcaagtatactttggtagtcgacgagcacacacagttggagttggtctctctgagaagatgtgcaggcctgggacatgactccgaagaagatagtggcggggaagcctctgaagaggaggctggggcagctcttctgggcggtggacaggtttcaggcgatacgtccccagactccccagatctgacattttctaaaaagttcttaaatgtcttcgtaaacagcacgtctcggtcttcttctactgaaagctttggcctgttttcatgtctggtgaatggagaggagcgggaacagacccatcgagctgtgtttagattcattccacgccatccagacgagctcgagctggacgtcgatgatcctgtgcttgttgaagcagaggaggacgacttctggttccgcgggttcaacatgcggaccggagagcgaggtgtgttccccgccttctacgcccacgccgtgcctggaccagcaaaagacctcctggggtccaaacgaagtccgtgctgggtcgagcggttcgatgtccaattccttggtagcgtggaggtgccttgccaccagggcaacggcatcctgtgtgccgctatgcagaaaattgcgacagcacgcaaactgactgtgcaccttaggcccccagctagttgcgatctcgagatctctttacggggcgtgaagctgagcctgagcggaggggggcctgagtttcaaagatgctcccactttttccagatgaagaacatctcattttgtggttgccaccctcgcaacagttgcgaagcacctcagggagctgcttttcagtgggaacgaggcgtggacagaaagagggtgcttcagacacgaggtaatgttcagcctcacctaggcgctggccagggggcagccctgaatagagcaacggagggttccagcacaggaagcgagaagggtgaatggaccccacttgtaatcatggagctgacacagtcggttaattcatgttacttcggatttatcaccaaacacccactcctgagtagattcgcgtgccacgtgttcgtgtcacaggagagcatgcgtccagttgcccaatccgtgggtcgcgcttttttggaatactatcaggaacacctcgcttatgcatgtcccactgaggacatctacctggaatag

SEQ ID NO: 248345 - RNA, 3357 nt, synthetic construct
  misc_feature 1..3357: note = Description of Artificial Sequence: Synthetic coding sequence
  source 1..3357: mol_type = other RNA
atggagccgagccgcgcattattggggtgtttggcatccgcagctgcagccgctcctccaggcgaagatggtgcaggcgctggggcagaggaggaagaggaggaagaagaggaagccgcagccgccgtgggccccggagaactggggtgcgacgcaccacttccttattggacggccgtgtttgaatatgaagctgcaggcgaagacgagctcacgttgcgtctgggtgatgttgtcgaggttctgtctaaagatagccaggtatctggggacgaaggatggtggactggtcagctgaatcagagagtcggaatttttccctcgaactacgtcacacctaggagtgcattcagtagccggtgccaacccggcggcgaggaccccagctgctaccctcctattcagctgcttgagatcgatttcgctgagttgaccctggaagaaatcatcgggatcgggggcttcggaaaagtgtaccgggctttctggatcggcgatgaagtggcagtgaaggccgcaagacacgaccctgacgaggatattagccaaactatcgagaatgtaaggcaagaggctaagctcttcgccatgctgaagcaccctaatatcatcgctctgaggggcgtgtgtctcaaggagccaaacctgtgtcttgttatggaattcgctcgaggcggacccctgaatagagttctgtctgggaagagaatcccaccagatatcttggtaaactgggcagtgcagatagcccgcgggatgaattaccttcatgatgaagccatcgtgcccattatacacagggatttgaagtcatccaacatattgattttacaaaaggtcgagaatggcgacctaagcaacaaaatcctgaagattactgattttggcctcgctagggagtggcatcgaaccactaagatgtccgctgctggcacatatgcttggatggccccggaagtcatcagggcctccatgttctccaagggcagcgatgtttggagttacggagtgttgctgtgggaactgctcactggcgaggtgccattccgcggcattgatgggttggcggtcgcctatggggtggcgatgaacaagttagccctgcccatcccttcaacttgcccagagcccttcgcaaagctgatggaggactgctggaaccccgacccacactccaggccatctttcacaaacattctggatcagctgacaaccatcgaggagagcggtttttttgagatgccaaaggactcatttcactgtctccaggataattggaagcatgaaattcaagaaatgttcgaccagcttagagcaaaggagaaggaactccgtacttgggaagaagagctgactagagccgctttacagcagaagaaccaggaggagctgctacgccgtagagaacaggagctcgccgaacgggaaatcgacatcctggagcgcgagttgaacatcataattcaccaattgtgccaggagaagccccgcgtcaaaaaaaggaaagggaagtttaggaagtcccgcttaaaacttaaagacggcaatcgcatttctctgcccagcgattttcagcataaatttacagtccaggcaagtccgactatggataaacgaaaatctttgattaacagcaggagttccccccctgcatcacctactatcatcccaaggttacgggccatccagttgacgccgggcgagtcctcaaagacttggggacggtcctcagtcgtgcctaaggaggagggtgaggaggaggagaagcgggccccaaaaaagaagggaaggacttgggggccgggcacgttaggtcagaaggagctcgcctctggtgacgaaggctccccgcagcgacgggagaaggccaatggtttaagtacaccatccgagtctccccacttccacctgggacttaagtctctggtcgacgggtacaaacagtggagttcctctgcacccaatctggtgaaaggtccccgtagctctccagcattacctgggttcacctcactcatggaaatggcattattagctgcatcctgggtggtacctatcgatatcgaagaagatgaagacagcgagggccctggcagcggtgagtctagattacagcattctccgagtcaatcgtacctatgcataccattccctaggggtgaagacggggacggtccctcgtccgatggaatccacgaagagcctacaccggtgaattccgccacttccaccccacaactgacaccaaccaactctttgaagcgcggcggggctcaccaccgcagatgtgaagtggcccttctggggtgtggtgcagttctcgccgccaccggcctcggattcgacctcttagaggccggtaagtgccagctgctgcctctcgaggagccagagcccccagcaagagaagagaagaagcgtcgggagggacttttccaacgcagctctcgtcccagacgcagcacctcacctccatcaagaaagctctttaagaaggaagaacctatgcttttgcttggtgacccttcagcctcccttacattgctgtctctctccagtattagcgagtgcaacagcaccaggagcctgctcaggtccgattctgacgagattgttgtgtacgagatgccagtgagtccagtggaagcgcctccgctcagcccatgcacccacaacccgcttgtgaatgttcgcgtggagcgatttaaacgggatccaaatcagtcacttacccccacgcacgtgacactgactaccccctcccaacccagctctcaccgtcgcaccccatcagacggggcactgaagcccgaaactctactggcaagccgctcacccagttcaaatggcctgtctccaagtccaggcgccggcatgctcaagacaccctccccctctcgggatccaggcgaattccctaggctaccggatcctaacgtagtcttcccacccaccccccgtagatggaacactcagcaggactcaaccctcgaacgtcccaagacactggaatttctccccaggccacgaccttccgcaaaccgacagagactcgatccctggtggttcgtcagccctagccacgcccgcagcacaagtcccgccaattcatctagcactgaaacgccatcaaacttggattcttgcttcgcgtcatcaagctctacggtggaagagcgcccgggccttccagctcttctgcctttccaggccggtccacttccaccaacagaacgtacccttctagatcttgacgccgaggggcaaagccaggacagtactgttcctttgtgtcgcgctgagctcaatacgcaccgtccagccccttacgagatccaacaggaattttggtcttag

SEQ ID NO: 248346 - RNA, 2541 nt, synthetic construct
  misc_feature 1..2541: note = Description of Artificial Sequence: Synthetic coding sequence
  source 1..2541: mol_type = other RNA
atggaagcccctctcagacctgctgccgacattctccgcagaaacccccaacaggactatgagctggtgcagagggtcggttcgggtacttacggcgacgtctacaaagctcgtaacgtgcacaccggcgaacttgcggctgttaaaatcataaagcttgaacctggagatgatttttccctgattcaacaggagatattcatggtgaaagaatgcaaacactgtaatatcgtggcatacttcggctcgtacctgtcccgtgagaagctgtggatatgcatggagtattgtggcgggggctctctgcaggatatttaccatgtcactggtcctctctctgaattgcagatagcatacgtctgtagagaaacactgcagggactcgcgtacctacataccaaaggtaagatgcatcgcgatatcaaaggcgccaacattctgctgacggaccacggggacgtcaagcttgctgatttcggtgttgctgctaagatcacggccacgattgccaaaagaaagtcttttattgggactccatactggatggctcccgaagtagccgcagtggagaagaatggcggatacaaccagctatgtgatatctgggcggtgggcatcaccgccatagaactgggcgagctgcagcctccaatgttcgatctccatcccatgagggccctgttcctgatgagcaaaagtaatttccagccgcctaagctgaaagataaaaccaaatggtcatccactttccacaattttgtcaaaatcgcgcttaccaagaatccgaaaaaaaggcctaccgctgagcgactattgactcacaccttcgtcgctcagccaggacttagcagagcgctggcagtggagcttctcgacaaggtcaacaacccagataaccatgctcactatactgaagcagatgacgatgactttgaaccccacgcgataatacggcacactattcgatcgactaatcgcaatgcaagagccgaaagaacagcctcggagattaatttcgacaagctacagttcgagccacccctacggaaggagacagaggctagggacgagatgggtctttcctctgaccccaatttcatgttgcagtggaacccttttgtggatggtgctaatacggggaagagtacatcaaagagagctatacctcccccccttccgccgaagccccgcatcagcagctaccccgaagataacttccctgatgaagagaaggcatccactattaaacattgtccggattcagagagccgggcaccgcaaatcctccgccgtcagagctcccctagctgtggcccagtggccgaaacatctagcatcgggaacggcgacggaatttctaaactcatgagcgagaacacagagggatctgcccaagctccacagctccctaggaaaaaagacaaacgcgatttccccaagcctgctattaatggcctacctcctacccccaaagtgctaatgggtgcttgcttctctaaagtgttcgatggatgtcctcttaaaattaactgtgccacttcttggatacaccccgatacaaaggaccagtacataattttcgggactgaggatggcatttatacactgaatttgaatgaactacatgaggccacaatggagcagttgtttccccggaagtgcacttggttgtacgtcattaataacacactgatgagtctttcggtgggcaaaaccttccaactgtacagccacaatctcattgccctcttcgaacacgcgaaaaagcctggtctggcagcccacattcagacacatcgctttccggataggatcctccccaggaaatttgctctgaccaccaagattccagatacaaaaggctgccataagtgctgcattgtcaggaatccctatacagggcacaagtacctatgcggtgccctccagagtggtatcgtcttactgcaatggtatgaacctatgcagaaatttatgctgattaaacacttcgatttccctttgccatctccactcaacgtgttcgaaatgctggttataccagaacaggaatatccaatggtttgtgttgccatctccaaagggaccgaatccaatcaggtggttcagtttgagactatcaatcttaatagcgcatcatcctggtttacagagataggggcaggaagccagcagcttgactctatccatgtcacacagctggaaagagacactgtgttagtctgtttggacaaattcgtgaaaatcgtgaacctccagggcaaactgaaatcttcaaagaaactggcctcagagctttccttcgacttccgaattgaaagtgtggtctgcctgcaagatagtgttctggcattttggaagcatggcatgcagggcaaaagcttcaagtcagatgaagtaactcaagagatttccgatgagacacgcgtcttccgactgcttgggagtgaccgcgttgtggtgctggagtctcgccccaccgaaaatcctacagctcattcaaacctctacattttggcgggccacgaaaatagctattag

SEQ ID NO: 248347 - RNA, 345 nt, synthetic construct
  misc_feature 1..345: note = Description of Artificial Sequence: Synthetic coding sequence
  source 1..345: mol_type = other RNA
atggtctcgaggaaggccgtggccgcgcttctggttgtacacgtcgcagccatgctggcatcacagaccgaagcatttgtaccaatatttacatatggggaactgcagcggatgcaagagaaggagagaaacaagggacagaagaagtctctatcagtctggcagcgatcaggcgaagaaggccccgtcgaccctgcagaaccaatcagagaagaagagaatgagatgatcaaactgacggctcctcttgaaataggcatgcgcatgaacagccggcaactcgaaaaataccccgccaccctcgagggactgttgtctgagatgctgccacaacacgcaaagtag

SEQ ID NO: 248348 - RNA, 348 nt, synthetic construct
  misc_feature 1..348: note = Description of Artificial Sequence: Synthetic coding sequence
  source 1..348: mol_type = other RNA
atggtttccagaaaagcagtcgctgcccttcttgtcgtgcatgtggccgctatgctggcatcccaaacggaagccttcgtgcctatttttacatatggtgaactacaaagaatgcaagagaaggaaagaaacaagggtcagaaaaagtcactgtccgtgtggcagagaagtggagaggaagggccagtggacccagccgagcccattcgcgaagaagaaaatgagatgatcaaactgacagccccacttgaaatcggaatgcggatgaactctcggcagttagaaaagtaccccgctacattagagggtcttctctcagagatgctaccacagcacgccgccaaatag

SEQ ID NO: 248349 - RNA, 327 nt, synthetic construct
  misc_feature 1..327: note = Description of Artificial Sequence: Synthetic coding sequence
  source 1..327: mol_type = other RNA
atggtgtcacgaaaggcggtcgctgccctgcttgtggttcacgttgctgctatgctagcgtcacagaccgaagcgttcgtgccaatcttcacttatggcgagcttcagaggatgcaagagaaggagcgtaataagggtcagaagaaatctctgagtgtttggcagaggtcaggagaagaggggccagtcgacccagctgaacctatccgagaagaggagaatgaaatgataaaactgacagctcctctagaaatagggatgcggatgaattcaagacaacttgagaaatatcctgctactttggaaggcctgctcactgctaaatag

SEQ ID NO: 248350 - RNA, 17121 nt, synthetic construct
  misc_feature 1..17121: note = Description of Artificial Sequence: Synthetic coding sequence
  source 1..17121: mol_type = other RNA
atgggagccccaagcgcatgcagaacgttggtattagccctggctgccatgctggtggtgccccaggcagagacacagggtccagtggagccttcctgggaaaacgcaggccataccatggacggcggggcacctacatcaagcccaactcgccgcgttagtttcgtgccacctgtgacagttttcccctccctctctccccttaatccggctcataacggcagagtctgtagtacctggggggactttcattacaaaaccttcgacggggatgtttttcgctttcccggcctgtgcaattatgtcttttccgagcactgccgtgcggcgtacgaggatttcaacgttcagttgaggcggggactcgttggctctaggccagtggtgacccgggtggtcattaaagctcaagggctggttttagaagctagcaatgggtcagtgcttatcaatgggcagagggaagaattgccttattcaagaaccgggttactggtggagcaatccggcgattatattaaggtcagtattaggctcgtgctgactttcctatggaacggagaggactctgctctcttagagctggatccaaagtacgcaaaccaaacttgcggcttgtgcggcgattttaacggactccccgcatttaatgagttctatgcccataatgccagactgacgccccttcaatttggaaatctgcagaagctggacggccctaccgagcagtgcccagatcctctgcctctgccagctggaaattgtactgatgaggagggtatctgtcaccgaactttgctgggacccgcttttgccgagtgtcacgccctggttgatagcacagcctacctggctgcttgcgcccaggatctatgccggtgtcctacatgtccctgtgcgactttcgtcgagtacagccgccagtgtgctcacgctgggggccagcccagaaactggcgatgtcccgaactttgtccgaggacatgtcccctcaatatgcagcatcaggaatgtgggagcccttgcacagatacgtgctctaacccgcagagagcacagctttgtgaggatcactgcgttgacggatgcttctgcccacctgggtcgaccgtccttgatgatatcacacacagtggatgtctgcccttgggacagtgcccctgcacccacgggggacggacctactctcctggcacaagctttaatactacatgcagcagctgcacgtgcagcggtggattgtggcagtgtcaagatctgccttgccccggcacctgctctgtccaaggcggagcccacatttcaacctatgatgaaaagctttacgacctgcatggagattgttcatacgtcctctcaaagaagtgcgccgacagctcattcaccgtcctcgcagagctgagaaagtgcggcttgacggataacgagaactgtctgaaagccgtaacgcttagcctcgacggcggggacaccgctattcgggtccaggcagacggcggggtgttcctgaactccatctatacccagctgccactttcagctgctaatataactctgtttacccctagtagtttcttcattgtggtgcagacaggattagggctgcagctgctagtgcagcttgttcccctcatgcaagtcttcgtgaggctggatcctgctcaccaggggcaaatgtgtggcctgtgtgggaatttcaaccagaatcaggccgatgactttactgcattgtcaggagttgtcgaggccaccggcgctgcgttcgctaacacctggaaagctcaggcagcttgtgcgaatgcacggaactcctttgaggatccatgttcgttatctgtggagaatgagaactacgctcggcattggtgttcccgactgacagaccctaactccgcgtttagcagatgtcattccatcatcaatcccaagccctttcactccaattgcatgtttgacacctgtaattgtgagagatccgaggattgtttgtgtgcggcattgtcctcatacgtgcatgcatgtgctgcaaagggcgtccagctttcggattggagagatggcgtttgcacgaagtatatgcagaattgcccaaaatcccagcggtatgcatatgtggtggacgcatgtcagccaacatgtagaggactcagtgaagcggacgtgacttgttcagtgtccttcgtgccagtggatggctgtacctgcccggccggcacattccttaatgacgcgggggcatgtgtgcctgcccaggagtgcccctgttatgctcacggaacagtactggcccccggagaagtggtgcatgacgagggagcagtgtgcagctgcacaggcggcaagcttagctgtttaggagcaagtcttcagaagtccactggatgcgccgctccaatggtgtacctagattgctccaattcctcagcaggcacccctggtgctgaatgccttcgctcttgtcacactttagatgttggctgcttttcgacacactgcgtttcaggctgcgtgtgccctcctgggctggtgtcagacggatccgggggttgtatagcggaggaggactgcccctgtgtgcacaatgaggccacatacaagccaggtgaaacgatccgagtagactgtaatacatgtacctgtcggaataggaggtgggagtgtagccacagactctgcctcggcacatgtgtcgcatacggtgatggccatttcatcacatttgatggcgaccgatacagctttgaaggatcctgtgaatatatcctcgcacaggattactgtggcgacaatacgacccacggaacctttcgcatagtgacagagaacatcccttgcgggactaccgggacgacctgttccaaggccatcaaactctttgttgagtcttatgaactgattttacaggaaggcactttcaaggcagtcgctagaggacccggcggagaccctccgtacaaaatcagatacatgggcatctttctcgtgatcgaaactcatggaatggcagtttcatgggatcgcaaaacatctgtgttcattagactgcaccaggattataaagggcgcgtttgcggactgtgcggcaatttcgacgataacgcaatcaatgatttcgccacccggagtcgctccgttgtcggggacgcattggaattcggcaactcatggaagcttagcccgtcttgtcccgacgctctggcgcctaaagacccttgtaccgctaaccccttccggaaatcctgggcccagaaacagtgcagcatactgcatggaccaacgttcgcggcctgtagatcgcaggtggactccacaaaatattacgaggcgtgtgtgaacgatgcttgcgcctgcgactccggtggagattgcgagtgcttctgtacagccgttgcagcatacgcccaggcctgccatgatgcagggctctgcgtgtcctggaggacgcctgatacgtgccctctgttctgcgacttctacaatccccatggggggtgtgaatggcactaccagccatgcggagctccctgtttgaagacgtgcagaaatccatccggtcactgtttggtcgatttgccggggctggaggggtgttacccgaaatgtcctccgagccagccattctttaacgaggatcagatgaagtgtgtcgcccaatgtgggtgctacgacaaggatggaaactattacgacgtgggggcccgggtaccaacagccgaaaattgccagtcctgcaattgtactccttctgggattcagtgtgcgcactccttggaagcttgcacctgtacctacgaagatagaacatactcatatcaggatgtcatctacaatacaacagatggtttgggggcctgcctgatcgcgatttgcggcagcaatggaactatcattcggaaggctgtcgcttgtcccggtacgcctgctactacccccttcacgttcacgactgcctgggtaccgcactcaacaacgtcgccagctctgcccgtgagcacagtgtgcgtcagggaagtgtgtcgctggtcatcctggtataacggacataggccagagcctggactcgggggtggagattttgaaacatttgaaaatctgcggcagcgcgggtaccaggtgtgcccggtccttgccgacatcgagtgtcgcgcagcccaactgcccgatatgcctcttgaggagctcgggcaacaagtggactgcgataggatgcgcggactgatgtgtgctaatagccaacaatcacccccactatgccatgactacgagttgcgggtgctgtgctgcgagtacgttccctgcggcccttcccctgctcccggtacgagtcctcagccatcgctcagtgcgtccacagagccagccgtacccactccaactcaaactacagccacagaaaagactaccctctgggtgaccccttcaatccgatcaaccgctgctttaacaagccagacaggatccagtagcgggcctgttacggtaacaccttccgcccctggaacaacaacttgccagcccagatgccagtggactgagtggttcgacgaagattacccaaaatccgaacaattgggcggggacgtggaatcctatgacaagatcagggccgcaggggggcatctctgccagcaaccgaaagacatagaatgccaggctgaatccttccccaattggaccttagctcaggtcggacagaaagttcattgcgacgtccattttggcctagtgtgccggaactgggagcaggaaggagtctttaaaatgtgctataattaccgcatccgggttctgtgctgcagcgacgatcactgcagggggagggccaccactccaccccctacaacagagttggagactgccaccaccacaaccactcaggcactgttcagtacacctcaaccaacctcttcacctggcctgaccagggcccctcctgcgagtaccactgctgtgccgactttgtccgaggggttaacatcaccacggtatacgagcaccctcgggaccgccaccactggcggtcctacaacacccgctggaagcacagagcctaccgttccaggcgtcgcgacatctacgctgccaaccagatccgctctgccaggaaccaccggatctctggggacctggagaccttcacaaccccccaccctcgcccccacaactatggccacttcccgcgcacgccccaccggcacggccagcaccgcctctaaagagcccctgactacatccctcgcgcccactttgacctcagaactgtctaccagtcaagctgaaaccagcactcccagaaccgaaacgaccatgagccctctgactaacaccacaaccagccagggaaccacacgatgccaacccaaatgtgaatggactgagtggttcgacgtggacttccccacttccggcgtggctggaggcgatatggagaccttcgaaaacatcagagcagcaggaggaaagatgtgttgggctccgaagtctattgagtgccgcgcagaaaattatcccgaggtgtcgatcgaccaagtaggacaggtccttacttgttccctagagactggcctgacctgcaaaaatgaagaccagacggggaggttcaacatgtgttttaattataatgtaagagtcctgtgctgtgatgactattcacattgcccatctacacctgccactagcagtaccgccacacccagttcaacaccgggaactacttggatcctcactaaacccactacaaccgctacaaccacggccagtactggatcaacagcgactccgacatctactcttcgtacagcccctccgcccaaagtgctcactactaccgctaccacacccacggtgacttcctctaaggctactccatcgtctagtcccggcaccgccaccgccctgcccgccctccggtccaccgccaccacacccacggccaccagcgttaccccaattccatctagttcgttaggtactacgtggacaagactcagtcaaacaacaacccctacagccaccatgagtaccgccaccccttcatccacacccgagaccgcccatacttccaccgttctcactgcgacagcgaccacgaccggggcaacgggtagcgtagccaccccaagttccacccccggcaccgcgcataccactaaggtgccaacgaccaccactactgggttcacagccacgccctcatcaagccccggtacagccctgactccacccgtgtggatcagcaccacaaccacacccactaccaggggcagcaccgtcaccccctcctccattcccgggacgacccataccgctacggtgctcactaccactaccacaacagttgcaaccgggagtatggcaaccccaagctcatctactcaaacttctggaactccaccctctctgaccactacggctacaactattactgcaaccggatccaccacaaatccttcctcaacacccggaactacgcccatcccgcctgtgctgaccaccacagcgactacccctgccgcaacttctaatacggtgactcctagcagtgctttaggcactacacacacaccccctgtcccaaacacaatggctaccactcacggtagaagcctgcctccgagttcaccccacacagttcgaacagcttggacgtctgcaacttctggtattttgggaacaacacacattacagaaccgagtaccgtgacatcccatacacttgccgcgactacaggcaccacacaacattcaacccccgcactgtcttctccgcaccccagctctagaaccaccgaaagccccccatcaccagggacaaccactcccggccatacaactgctactagcagaacaactgccaccgctacaccaagtaagacccggacgtcaactctgctcccgtcaagcccaacaagtgcacctatcacaactgtggtaactatgggctgtgaacctcaatgcgcatggagtgaatggctcgactactcctatccgatgccgggtcccagtgggggggatttcgacacgtattccaatattcgagctgccggtggcgccgtgtgcgagcagcccctaggcctggagtgccgcgctcaggctcaacctggagttcccctgcgggaactgggacaggttgtcgagtgttcactggacttcgggctggtgtgccgaaatcgcgagcaagtcggcaaattcaaaatgtgtttcaattatgagatacgcgtgttctgttgtaactatggccactgtccatcaaccccggccacgagcagcacagccatgcctagcagtactcctggcactacctggattctgaccgagctcacgacaactgctaccaccaccgaatccactggatccacagctacgccaagcagtacccctgctactgcgggaacccctcacgtctccacgaccgccacaacacccactgtaactagctcaaaggctacacccttctcaagcccaggcacagctactgcacttccggccctacgctccacggcaaccacccccacagctacctccttcacagccattcctagtagctcactgggcaccacatggactcggcttagccagaccactactccaacagctactatgagcacggctaccccatcctccactcctgagactgtacacacttcaaccgtgctcacaacaaccgcaacaacaactggcgcaacaggttcagtggctactccatcatccaccccaggtacagcgcacacaaccaaagtacttaccaccactaccacgggctttaccgctacgccctccagctcgcccggtacagctcgtaccttgcccgtgtggatttccaccaccactacccccacaacgcgtggttccaccgtgacgccatctagtattccgggaacaacccatactcctactgttctgacgacaaccacaaccacagtcgcaactggtagcatggccacaccaagtagctctacacagacttccggtaccccaccgtctctgacgacgacagctactactatcactgcaacaggcagcactaccaaccctagttccacccccggcaccactcccattccccctgttcttactacgaccgctaccaccccagctgccacctctagcactgtcactccaagttccgccctgggcactactcacacgcctccagttcctaacaccactgcaacaactcacggccgtagcctcagccctagcagtcctcacacagtaaggaccgcttggacatcggcaacttcaggcacattgggtaccacccatatcacagagccctcgaccgggacatctcatacacctgctgccaccactgggactacacagcattccactccagccctatcttctcctcatccatcctcccgcacaactgagtctcctccaagcccagggaccacaaccccgggccacacccgagccaccagcaggaccaccgcaactgccacaccctctaaaacgcggacctccacactgcttccctctagccccacaagcgcccctataactactgtggtcaccatgggatgtgaaccccagtgtgcatggtcagagtggctcgattattcttaccctatgcccggacctagcggcggcgactttgatacatactctaacatcagggctgccgggggtgccgtctgtgagcaacccctgggactcgaatgtcgtgcacaggcacagcctggcgtacccctgcgggagctcgggcaggtggtggaatgcagcctggacttcggacttgtgtgcagaaatcgagagcaggtagggaagtttaagatgtgctttaactatgaaatcagggtgttctgttgcaattatgggcactgcccaagcacccctgccacctctagcactgccaccccttcatcaacccctggaactacctggatcttgactgagcagaccaccgcggcgaccacaaccgccaccaccggctccaccgccattccatcctctactcccggcacagcaccgcctcccaaagtgctaacaagtactgcgaccactcccaccgccacgtcaagcaaggctaccagttcctcatccccaaggactgcaacgacactcccggttctgacctcaaccgcgacgaaatccactgcaacgtcattcacccccatcccttcctttacactcggtacgacagggaccctgcctgagcagaccaccacccctatggcaaccatgagtacaatccatccttcctctacccctgaaactacacacacttctaccgtcctgacaacaaaagccaccaccactagagcaacctcatcgatgagtactcctagctccacaccaggcaccacctggatcctgacagaattaacgacagctgcaaccacgacagcagcaaccgggcccaccgcgactcccagcagcacccccggcactacctggatcctgacggaaccgtccacgactgctaccgtgactgtacccactggtagcactgctacagcgagttcaacacgcgccactgccggcactttgaaggtgctcacctctactgcgactacaccaacagttatctcttccagggccacaccttccagcagtcccggaacagcgacagcgctgcctgcccttcggtctacagcgaccaccccgacagccacctctgttaccgccatccccagtagttcactcggcaccgcctggacccgcctcagtcagacaacaactccaaccgccaccatgagtaccgctactccatccagtacacccgagacagtgcatacgagtactgtcctaaccaccacaacaaccactacgagagctactgggagcgtggcaaccccctcttcaacccccgggactgcacacaccacgaaggtgcccacgacaactaccacaggattcacagccaccccgtcttcttcccctggcacagccctcacaccacctgtctggatcagcacaacgacgacacccaccactaggggtagcacagtaacaccttcctctatcccaggtaccacccatactgcgaccgttctgaccactaccactactacagtggcgaccggatctatggccacaccgtcaagtagcactcagacttcaggaacccctccgagcctcaccacaacagcaaccaccatcactgccactggatccactactaatccgtccagcacccctgggacgacgcccatcccccccgtcttgactaccaccgccactacgcccgcagccaccagctctactgtgactccctcttcagccctgggaaccacccatacgcctcccgtcccaaacaccaccgccaccacacatgggaggagcttgccaccttcttcacctcacacagtgcgcaccgcttggacatcggctacgagcggaatcctaggcacaactcatatcacagagccctctacagtaacctctcacacccccgcagcaacaacgtcaacgactcagcatagcactcccgccctctccagcccgcacccgagtagccgcactactgaaagccccccatctcctggaacgacaaccccgggccacacacgtggtaccagcagaactactgccacagcaaccccatctaagacgaggacgtccaccctgctacctagctctcccacaagcgctccgatcaccaccgtcgtgacgaccggctgtgaacctcagtgcgcctggtccgaatggctggactacagctatcctatgccaggacctagtggcggggacttcgacacgtactcaaacataagggccgcaggtggtgccgtctgcgagcagccactcggcctggagtgccgagcacaggcacagccaggcgtacctctgcgcgagctgggacaagtggttgagtgcagcctagattttggcctggtttgtaggaatagggagcaagtaggcaagtttaagatgtgttttaattatgaaattcgggtcttttgctgtaattatggccactgtcctagtacccctgcaaccagcagtaccgccactccgtcctccacaccagggacgacttggattctgaccaaattaacgactactgccactactactgagagtacagggagcacggccacgccttcctctacccctggcgctacagccggaactccacatgtcagcacgaccgccactacacctactgtgacctcctcgaaagctacccctttctcatcacctggcactgccacagccctcccagctctgcgtagcactgctacaacgcccactgcaacatccttcaccgctatccctagttcaagcctggggacaacctggactcgcctgtcccagactaccacgcccaccgctaccatgtcaacagccacaccatcgagcacaccggaaacggcccataccagtactgtgctcactacgacagcaactactactagagctaccggctccgttgccactccttcctcaacaccgggtaccgcgcatactacaaaggtgcccaccacgacaactactggcttcacagtgactccgtctagctcaccaggtaccgctcggactccccccgtctggatctctactactactactcccaccacctctggctccaccgtaaccccttcctccgtgccgggcactactcacacccccaccgtcttgaccacaacaaccaccaccgttgcaactggctcgatggcaaccccttcaagctccacacagacttctgggacaccccccagcctgatcacaactgccaccacaatcactgcgactgggtcaacaactaatccatcctcaacgcctgggaccaccccaattccaccagtgctcaccaccaccgccactacgcccgccgctacttctagcactgtgacaccctcgtctgcgctcgggacgacacacacgcctcccgtgccgaatactacagctactactcacggccgcagcctctcaccaagttctcctcacacagtcagaacagcgtggactagcgccacatccggaacattgggcacgacccatatcactgaacctagtaccggcacatcccatactcccgcagcaacaacagggacgacgcaacattctactccagccctgtccagcccacacccctcaagcaggaccactgaatcgcccccctcccctggaaccactacccctggacacactactgccacctctcggacaactgcaacagccaccccttccaaaactcgcacatcaacgctgttgccctcatctccaacatcggcccctattactactgtcgtcacaacgggctgtgagccccagtgcgcttggagcgagtggctggactactcttatccaatgccaggaccgtcaggtggagacttcgacacctactccaatatccgagccgcgggcggcgccgtgtgcgaacagcctttaggactagagtgcagggctcaggcccagcctggcgtgcccttgggagaactcggtcaggtcgtggagtgttcactggacttcggtctggtttgccgtaaccgtgagcaggtaggcaagttcaaaatgtgttttaattacgagatccgggtgttttgttgtaactacggccactgtccttccacaccagccaccagttcaaccgcaatgccaagttctacacccggcacaacatggatcttgaccgagctgactactacagctactaccaccgccagcacaggctccaccgctacgccttctagtacacctggcacagcgcccccacccaaggtgctgactagtccggctactacccctacagcgacatcaagcaaagcgacaagcagttcatctcctagaaccgccactacgctacctgtgctgacctccacggcaactaaatccaccgccacttccgtgacacccattccctcatcaactttaggaaccactgggactcttccggagcagaccacaacgccagtagccaccatgagcaccatacacccctcttctactcctgaaaccacacatacttctactgtactgactacaaaggccaccacaactagggctacttccagtacatcaactccatcctctacgcctgggaccacatggatccttactgaacttacgacagccgctacaacaactgcagcaacaggacccactgccacccctagttctaccccgggtacaacgtggattctcaccgagttaacaaccaccgccacaaccactgcaagtactggttcaacggccaccccgtcatctacaccaggcacaacctggattcttacagaaccatctactaccgccaccgtcacagtgcccactggctctactgccacagcttcttctacacaagctacagctggtacccctcatgtgtctaccaccgcaacgaccccgaccgtcacctcatctaaggcaaccccctccagcagccccggtacagcgacagctttgcccgccctaaggtccacggccactactccaacagcaaccagctttactgccattccttccagttccctgggtactacctggacgcgcttatcacagactactacccctacggctaccatgtccaccgcgacccctagttcaactcccgaaaccgtgcacaccagtacagtgttgaccgcgaccgccacaactacaggtgcaaccggaagcgtggctacaccatcttcaacccccggcaccgcacataccactaaagtgcctaccactaccacaacaggctttacagcaacgccttccagtagccccgggacggcacttacaccgcctgtttggatctcaaccactacaactcctacaaccaccacacctaccacatccgggtcgaccgtgacaccatcatctattcctggaactacccacaccgctcgagttttgactacaacaactacaactgtcgctactggcagcatggctaccccaagcagctccacacagacctcaggaactccaccttccctcactaccacagcaaccaccataacagcgaccggttctacaaccaacccaagttcgacccccggtactacaccaattacacccgtcctgacctcgactgccaccacacccgccgctacttcctcaaaggctacatccagctcctctccaagaacagctaccacactccccgtcctgacctccaccgcaacgaaatcaaccgccacaagcttcactcctattccgtcttcaacactctggactacgtggactgtcccggcgcaaactacaacccctatgtcaactatgtctacaattcatacctcttcaactcctgaaaccacacacacctccactgtgcttacaaccaccgccacgatgactcgggccaccaattcaactgccacaccctcatccaccctggggacaactaggattctaactgagctcactaccacagccacaacaaccgccgccaccggctcaacagcaaccttgagctccactcccggtacaacctggattctcacagagccttccaccattgcaaccgttatggtgccaacaggtagcactgcaactgcaagttccaccctcggcaccgctcacactcctaaagtggtaacaacaatggctacaatgcccactgctactgctagcacagtcccatcctctagcactgttggcactacaagaaccccggctgtactcccatcctccttgcctacatttagcgtgtccaccgtgtcctcttctgttctcacaaccctgagacctactgggtttccttcaagtcatttttcaaccccgtgtttttgtagagccttcggacagtttttcagcccgggtgaggtaatctacaacaaaaccgatcgcgccgggtgtcatttttacgcagtctgtaaccagcattgcgatatcgacaggttccagggcgcatgcccgactagccctcctcccgtgagttctgctcctctgtcctcaccaagtccagcacctgggtgtgataatgccatccccttgcggcaggtgaacgaaacatggacactcgagaactgtacagtcgctcggtgtgttggcgacaaccgcgtggtgttactcgatccaaaacccgttgccaatgtgacttgtgtgaacaagcatctgccaatcaaggtttccgacccatcacagccttgtgacttccactatgaatgcgaatgtatctgtagtatgtgggggggatcgcactactctacgtttgacgggacctcttatacattccggggcaattgcacttacgttttaatgagagagatccacgcccggtttggcaacctgtccctgtacctggacaatcactattgcaccgcttctgcaacagccgctgccgcccggtgtcctagggccctgtctattcactacaaatccatggacatagtgcttacagtcactatggtgcacggaaaggaggagggacttattttatttgaccaaatcccagtgtcttcagggttttcaaagaacggtgtgcttgtgtcagtgctggggacgaccaccatgagggtggatatacctgcactgggagtttctgtgacattcaatgggcaagtgttccaagccagactgccttacagcctgttccacaataacacggagggacagtgtggtacttgtaccaacaatcagcgggacgactgcctccaaagggacgggaccacggccgcctcttgtaaggatatggccaagacctggcttgtacctgattctaggaaagacggctgctgggcaccaaccgggaccccccctacagcttcacctgcagccccggtttcctctacacccaccccaacaccttgtccacctcagcccctgtgcgatttaatgctgtctcaggtcttcgccgagtgtcacaatctggtcccacctgggccgttcttcaacgcttgtatctccgatcactgtcgcggtagacttgaggtaccttgccagtctctggaggcttatgctgagctttgtcgggccagaggcgtgtgctcagattggcgcggagccaccgggggattgtgtgacctaacctgtcctcctacgaaggtttacaaaccgtgcggcccaatccagcccgctacctgtaatagccgcaatcaatccccacagctggagggcatggccgagggatgcttctgcccagaggatcagatcctctttaacgcgcacatgggaatatgcgttcaggcctgtccatgcgttgggcctgacggttttcctaagttccccggcgagcggtgggtgagtaattgccagtcatgtgtgtgcgatgaaggaagtgtcagcgttcagtgtaagcccctgccttgcgacgcccaagggcagccaccaccatgcaaccgtcctggatttgtcaccgtgacgagaccccgcgccgagaatccctgctgtcccgagactgtctgcgtatgtaacaccacgacttgtccgcaatccttgcccgtctgtccccccggtcaggagtctatctgtacacaggaggaaggtgactgctgtcccacattccggtgccgacctcagctgtgttcatataatgggaccttttacggggtgggggcaacatttcctggtgcattaccgtgtcatatgtgcacttgtctgagcggtgatacccaggatccaaccgtccagtgccaagaggatgcttgtaataacaccacttgtccccaaggattcgagtacaagcgggttgcgggccagtgctgcggggaatgcgtgcagaccgcatgtctcacacctgacgggcagccagtccagttgaatgagacctgggtgaattctcatgtggacaattgcactgtttacctgtgcgaggccgagggaggcgtccaccttctcactcctcaaccagcttcttgtccggacgtgtcttcatgcagaggatcattacggaagacaggatgctgctactcctgtgaggaggattcatgccaggttcggattaataccaccatattgtggcaccagggttgtgagacggaggtaaatattactttctgcgaggggagctgccctggcgcctctaagtatagtgccgaagcccaagccatgcaacatcagtgcacctgctgtcaggagcggagagtgcacgaggaaactgttcctttgcactgccccaatggatcagcgatcctacacacctatacacatgtcgatgagtgcggctgtactcccttctgcgtaccagctcccatggccccccctcacacaaggggtttcccggcccaagaagccaccgcagtttag

SEQ ID NO: 248351 - RNA, 16587 nt, synthetic construct
  misc_feature 1..16587: note = Description of Artificial Sequence: Synthetic coding sequence
  source 1..16587: mol_type = other RNA
gccccaaggatgggcgccccatctgcctgcaggacactggttctggctctcgctgcaatgttagtcgtgccgcaggcaggcaaaagcccccctttgagacccttgtcacgtaatagcggggcaggcctggatggtggagcgccaacttcttctcctacccggcgggtgtcgttcgtcccaccagtcaccgtgttcccttcactttcacgaaagcaaatgctgcccttgcctgctggtaagggggttttcgcaagccctaagggggggggtcccgacctgggcgtgcagctgccaccggcactcaatcctgctcacaatggccgcgtctgcagcacctggggagatttccattataagacgtttgacggggacgtgttcagatttcccggactgtgtaactatgtcttctccgaacactgtagggcagcatatgaggatttcaacgtgcagctccggagggggctcgtcgggtcacgacccgtggtgactagggttgtcatcaaggctcaaggtctcgttctcgaggcaagcaacggtagtgtactgatcaacggtcaaagagaagaattaccttactcccgcaccggtctcctggtcgagcagagcggggactacataaaggtgtcaattagactggttttgacatttctgtggaatggggaggatagtgcgctcctcgaactcgatcccaaatatgctaaccaaacctgcggcctgtgcggtgatttcaacgggctgcctgcctttaatgaattctacgcccataacgcgagactcacaccccttcagttcgggaatcttcagaaactcgacggccctaccgaacaatgtccagacccattacctcttcccgccggcaactgtacggatgaggaggggatctgtcacagaactcttctcggccccgccttcgccgagtgccatgctctggtggactccaccgcatacctggccgcttgcgcacaggatctatgcaggtgcccaacctgtccgtgtgccacctttgtagagtattctcggcagtgcgcccacgctggcggccagcccagaaactggcgttgtcccgagctgtgcccaagaacatgtcctctcaatatgcagcatcaggagtgtgggtcaccatgtaccgacacctgttccaacccacagcgcgctcaattatgcgaagaccattgcgtggatggttgtttttgccctcctggacggagttgtactgtcctcgacgacatcactcattctggctgcctccctctcgggcagtgcccgtgtacccacggcggaagaacctattcacccggtaccagctttaacaccacctgttcctcttgcacctgtagcgggggactatggcaatgtcaggaccttccctgtccgggaacttgtagcgttcagggaggcgctcatatttccacgtacgacgaaaaactttatgatttacatggcgattgttcctacgtgctgtccaagaaatgtgccgactcctcctttaccgtcctggctgaacttaggaagtgtgggctcactgacaacgaaaactgcctaaaggctgtgacactgagtctggatggaggagatacggccattcgggttcaggctgatggaggggtgttcctgaactccatttatacacaactgcccctgtcagccgctaatatcacgttatttaccccctcaagcttctttatcgtggttcagactggactggggctgcagctgcttgttcagctagtcccattaatgcaagtctttgtgaggctggacccagcacaccaggggcaaatgtgtgggttgtgtggtaactttaaccagaatcaggccgacgacttcactgcactgtctggtgtggttgaagcaaccggggcagccttcgccaacacctggaaggcacaggccgcctgcgcaaacgccaggaattcttttgaagacccatgcagtctgtcagtggagaatgaaaactatgctaggcattggtgttcgaggttgaccgacccaaactccgcgttctcacgatgccatagcattatcaatccaaagccctttcattcgaactgcatgttcgacacatgcaattgtgagcggtctgaggactgtctctgcgccgccttgagctcttatgttcatgcatgtgcggccaagggggttcagctatctgattggagggacggtgtgtgtacaaagtatatgcagaattgccctaaatcccagaggtatgcttacgtcgtggacgcctgccaacctacatgccgcggacttagcgaggccgacgtgacatgttcggtgtcctttgttcctgtcgacggttgtacctgcccggcgggcacctttttgaacgacgctggtgcatgcgtgcctgcccaagagtgcccctgttatgcccacggaaccgtgctcgctccgggggaggtggtgcacgatgagggtgccgtctgctcctgtacaggagggaagctgtcgtgcctcggagcttcactgcagaagtcaaccggctgtgcagcgcccatggtgtatctagattgctctaattcctcggccggtacacctggagctgaatgtctgcggtcttgtcacactctggatgtgggatgtttttccacacactgtgtgtctggctgcgtttgtccacctgggttggttagcgatggcagcggaggatgcattgccgaggaagattgcccttgcgtccacaatgaggccacttataaacccggggaaaccattcgggtggattgtaacacatgcacgtgccgcaatcggcgttgggaatgcagccaccggctctgtttagggacttgcgttgcctatggagacggtcatttcattacttttgacggcgacagatactctttcgaagggtcatgcgagtacatactggctcaggactactgcggcgataacactacacatgggaccttccggatcgtgactgagaacataccatgtggaacaaccggaaccacttgcagcaaggccataaaacttttcgtcgaggttaggaccgcgcccgcagtaagtactccagaccccgctgcaaatgaacctgcgccgagggaagcttcagtcggattcagacagcgccttccccccctccaaagttatgaattgattctgcaggagggtacctttaaggccgtggctcgaggccccggcggcgacccaccttacaagatcagatacatgggcatctttctcgtcatcgagacccacggcatggccgtttcctgggatcgcaagaccagcgtgtttatccgcctgcatcaggattataaaggccgggtgtgtggactatgtggaaattttgatgataacgccataaacgattttgcaacccgaagccggtccgtcgtaggcgacgcactggagtttgggaactcttggaaactcagtccatcttgtcccgacgccctagccccaaaggatccttgcacagcaaatccctttaggaaaagctgggctcaaaagcagtgttctatacttcatggccccacctttgccgcctgccggtctcaggttgacagcactaagtattatgaggcatgtgtcaatgatgcctgtgcctgtgactccggaggtgactgtgaatgcttctgcacggccgtggccgcctatgctcaggcttgccatgatgccggcttgtgcgtgagctggagaactccagacacttgcccactgttctgcgatttctataacccccacggtgggtgtgaatggcactaccaaccctgcggagcaccatgcctaaaaacttgcagaaatccgagcggccattgcttggtggatcttccgggcctggagggttgttacccaaaatgcccaccctcccagccattctttaacgaggatcagatgaagtgtgtggctcagtgcgggtgttatgataaagatggtaactattacgatgtgggagccagggttcccactgccgaaaactgccagtcgtgtaactgcacgccctccggcatccaatgcgcccatagtttggaggcctgcacttgcacctatgaagatcgaacctatagctatcaggatgtcatttataatacaacggatgggctgggggcatgcctcattgcaatttgcggctcaaatggaaccattatccgtaaagctgtagcttgtcctggtaccccggccactaccccttttaccttcacaaccgcgtgggtacctcactccacaacctctcctgctttgcccgtcagcacggtatgcgttcgggaggtgtgccgctggagctcctggtacaacgggcataggccagaacctggtctcggcggtggtgactttgaaacattcgagaacctcagacaacgtggatatcaggtctgcccagtactggccgatatcgaatgtcgggccgcccagctgccagacatgccactggaagaactgggacagcaggtcgactgcgaccgcatgagaggccttatgtgcgccaactcccagcagtcccctccactgtgccacgattacgaactccgcgtcttgtgctgtgagtatgtgccctgcgggcctagtcctgcccccggaacatctccccagcccagcctgtctgcaagcaccgagcccgctgtgcccaccccaacacagacaactgcaactgagaagactactctgtgggtgacccctagcattcgctcgactgctgctttaacgtcacagaccggctcatcctcaggcccagtgaccgtgacaccaagcgcacctggaactaccacctgccagcctcgctgccaatggaccgaatggttcgacgaggactacccaaaatcagagcaactcgggggggacgtggaatcatacgacaaaattcgcgcggcggggggacacttgtgccagcaacctaaagacatcgagtgtcaggccgagagtttcccaaactggactcttgcccaggtgggccagaaagttcattgtgatgtccacttcggactcgtttgtcggaattgggagcaggagggagtgttcaagatgtgctacaattatcgtattagagttttgtgctgctccgatgaccattgccgaggcagggcaaccacaccaccaccaacgaccgaactcgagaccgctactactaccaccacccaggcactgttttccacccctcaacccacctcctcacccggtttaactcgggccccacctgcatccacaaccgccgttcctaccctgtccgagggactcacctctcctcgctatacctctactcttggtacggccacaacgggaggtccaaccactccagccgggtcaacagagcctaccgtgcccggagtcgccacatcaaccctgcctactcgttctgccctgcccggaaccactgggtctctgggcacttggaggccttcccagccaccaacactggccccaactaccatggcaactagcagggcacggccaacgggcaccgcctcaaccgcctctaaggagcctctgaccacgagcttggcacccacactgacatcggagctgagtacatcacaggctgagacctccactccaaggactgaaacgacaatgagcccactgaccaataccacgacctctcagggcaccactagatgtcagcctaaatgtgaatggactgaatggtttgacgtggacttccccacatcgggcgtggccggcggtgacatggagacatttgaaaacattagagcagctggtggcaagatgtgctgggccccaaagtcaatcgagtgccgcgctgagaattaccctgaagtatcaatcgatcaggtcggtcaggtgctaacctgctccctagagactgggctgacctgtaagaatgaggatcagaccgggcgctttaatatgtgtttcaattataacgttagagttctgtgctgtgacgattatagtcactgtccctctacacctgcgacctcgagtaccgctaccccatcatccactccaggcacaacctggatccttacaaaaccaaccacaactgctacgaccacagccagcaccggatcaacggcgaccccaacgagtacacttcgcaccgccccgccccccaaggtgctgactaccaccgctaccacacccactgtgacgagttccaaagccacccctagcagttccccgggaacggccacagcactgcctgcgttgagaagcacagccactacccctaccgccacatctgtgacccctattccctctagctccttgggcaccacatggacaaggctctcacagactactactccaactgccaccatgtcaaccgcaactcctagcagtaccccagagactgcacacacgtcaaccgtcttgaccgcaaccgctactacaacaggcgctacaggctctgtggccaccccttcatccacccccggcaccgctcacaccactaaagtgcctacaaccactaccaccggtttcactgcaacccccagctcctcaccagggaccgccttgacaccccctgtgtggatttctacaacaaccacccccaccacccgcggcagcacagtaactccttcatccatacccgggacaacgcacactgcaaccgtgttaactactaccactaccaccgtcgcaacaggaagtatggctactccttccagcagcacacagacttccggaacaacccatacccctccagtgccaaatacaatggccactactcatggccgctcactgccaccttcctctcctcacaccgttaggacagcgtggacctcagcaacaagcgggattttggggaccacccatattaccgaaccttctaccgttacctctcacacccttgccgctaccaccggcacgacacagcactccacccccgctctgtctagtccacacccctcttcacggaccacggagagccccccatctccgggtactaccacgcctggtcatacaactgctacctccagaacaaccgctaccgctaccccaagcaaaacccgaacaagtactcttcttccgagctcaccaacctctgccccaattacaactgtggttacgatgggctgtgagccccagtgcgcttggagcgagtggcttgactactcctaccccatgccaggccccagcgggggcgattttgatacatattcaaacatccgcgctgcaggcggcgccgtgtgtgagcagcctttaggcttggagtgccgagcgcaggcccaacctggcgtacccctgagggagcttggccaggtggtggaatgctcactagacttcggactcgtgtgccgaaatagagaacaggttggcaaatttaagatgtgttttaactacgaaatcagggtgttctgctgtaactatggtcactgtccttcaaccccagcaacctcctctaccgccatgcccagctcaacgcccgggaccacatggattctgacagaactcactactacagccaccactacagaatctaccggatcaaccgctacaccctcatcgacccccggcacaacttggattcttactgagccatcaactacagctacagtcaccgtgccaaccggatctacagccacagcctcttctactcaggcgaccgcgggtacccctcatgtttccacaactgccacaaccccaaccgttacatcctccaaggctacacccttctcaagccccggaaccgcaactgcactgcctgctttgcgatctactgcaacaacccctacagcaaccagctttaccgccatcccctcttccagcctgggcactacttggacccggctctcacagacgactacaccgactgcaactatgtccaccgctactccttcttctactcccgagactgtccacaccagtaccgtgttaacaacaacagcgactacaacgggagccacgggatctgtggcaacacctagcagcacccccggtacggctcacaccactaaagtcttgacaaccacaacaactggatttacggcaaccccctcatccagccccggcacggccagaaccttgccagtttggatctcgacgacaacaacacctacgacgcggggctctacagtcactcctagctcgatacccggcactactcacacacccacagtccttactaccacgactaccacagtcgcgactggatcgatggcgaccccatcttcttcaacccaaacatctggtacaactcacaccccgcccgttccgaatacaacggccaccacgcatgggaggtcactatctccttctagccctcacacagtgagaacggcttggacgtcggcaacctcaggtaccttgggaacgacccacataaccgagccatctaccgggactagccacactccggccgctacgacaggaacaacgcagcactcgacaccagctctgagttcgccacatccttcctcgcggacaacagagagcccgccttcgcccggtactacaacccccggtcacactcgtgccacaagtcggactacagccacggccactccgtctaagaccagaacctcgactctgctcccttcatcccctacaagcgcccctataaccaccgttgtaactatgggttgtgagccccagtgcgcatggagcgagtggttggactattcataccctatgccgggtccaagcggcggagatttcgatacttactctaacatccgtgccgctgggggtgctgtctgtgagcaaccactgggcctggagtgtcgggcacaggcgcagccaggcgtcccccttcgcgagctggggcaagtggtggaatgttccctcgactttggcctagtctgtcggaaccgcgaacaggtgggcaaattcaaaatgtgttttaactacgaaattagggtcttctgttgtaattacgggcactgcccatcaaccccagcaacatcttcaactgctaccccttcatctacccctggcaccacgtggatcttaacagagcaaaccaccgcagctaccacaactgctactacagggtctaccgccataccctcatccacacctggaactgcccccccgccaaaggtactcacctctactgccactaccccaacggctacctctagcaaggccacctcctcaagcagcccaaggactgccacaaccctgccagtccttacttccacagccaccaaaagcacggccaccagcttcacgccgatcccatcattcacacttggtacaaccggcaccttgcccgaacagaccaccactccaatggccaccatgagcacgattcacccctcatccacccctgaaacaactcatacttcaacagtgttgactactaaagcaactacaacccgggcaacaagctcaatgagtaccccctcatctactcccggtacaacatggatactaacagaactgacgactgccgcaactaccactgccgccaccgggcccacagcgacccctagctccacccctggcaccacctggattcttaccgagcctagcacaacagccacagtgactgtgcccaccggctccaccgcaacagcgtcaagtacaagggcaacagctggtaccctcaaggttctgacgtctaccgccacaacccctacagtcatttcctcccgggctacaccaagcagctcacctggcactgctacagccctgcctgctctgaggtctacagcaacaacccccaccgctacttccgttactgcaattcccagcagctcattgggtactgcctggactcgtttgagccagactaccactcctacagctacaatgagtacggccactccatcgtccacaccagagaccgtgcatactagcactgtgctgaccactaccaccaccacaacaagggcgaccggctctgttgctacgccaagctccaccccgggaaccgcccacactaccaaagtcccaaccactactaccaccggcttcactgcaactccatctagcagccctggtactgccctgactcctcccgtgtggatatctacaacaacaacaccaaccacccggggctcaactgtaacacctagctctattcctggaacaactcatacagcgactgtgctaactactactaccactacagtggccacagggtcaatggccactcctagctccagcacacaaacctcaggaactacacataccccccccgtgccaaacacaacagctacaacccacggacgatcactgccgccatcctctcctcacacagtgcgcacggcctggactagtgctacctccggcattctcggcaccacacacatcaccgaacccagtactgtaacctcccatacacccgctgcaacgaccagcaccactcaacactccacccctgctctgagcagtccccatccaagctcgagaacaactgagtccccaccttcaccgggcaccactacccccggccatacacgaggcacctcacgtaccaccgcaactgccaccccttccaagacaagaacctccactctattgccttcatccccaactagtgcccctattacgactgtggtgaccacggggtgcgagccacagtgtgcgtggagcgagtggctagactactcttatcctatgcctgggccatcgggcggcgactttgacacctattcgaatatccgagctgccggtggggccgtctgtgaacagcctcttggcctggagtgcagggcgcaagcacagcctggggtccccttgcgcgagctgggccaggtggtcgagtgtagcctggacttcggccttgtgtgccgcaacagggagcaggttgggaaattcaagatgtgtttcaactacgaaattcgggtgttttgctgcaattatggtcattgtccttccaccccagctactagtagcaccgctacgccctcgtcgacaccaggaaccacctggatcctgaccaaacttaccactactgctacaaccacagaatctacagggtctactgccacacctagttctacaccaggtacaacctggatcctgacagagccttcgacaactgcaaccgtgacagtgcctaccggatctacagccaccgcttcctccactcaagccaccgcaggcacaccccacgtgtcgacaactgcaaccacccccacagtcacatcatcaaaggctactccattctctagtcccggcacagcaaccgctctccccgcgttacgatccacagcaaccacgcccactgccaccagttttactgccataccttcgagctctcttggcactacctggacccgcttgtctcaaactaccactccgacggcgactatgtccactgccaccccttccagtacaccggaaactgcccacacgtccacagtcctcaccacaacggctaccaccacgagggccaccgggtctgtcgcgaccccatctagtaccccaggcacagcccacacaacaaaggtacctaccaccacaaccaccggctttaccgttaccccaagcagttcccctggcaccgccaggacaccacctgtgtggatcagcactactacaacacctacaacaagcggttcaaccgtgacgcccagcagcgtgcccgggaccacccatacccctacagtcctcacaacaacaactaccacagtcgcgaccggatccatggccactccgagcagttctactcaaacgtccggaactactcacacgcctcctgtgccaaacacgacggccacaacccacggcaggtcattgtcccccagtagtcctcacaccgtaaggactgcctggacctcagccacgagtggtacactgggcaccacccatatcactgagccttctacaggaacttctcataccccggcagctactactgggacgacccagcactcaacccccgcgctatcatcccctcatccttcaagcagaacaacagagtcacctccctcgcctggaactaccaccccggggcatacaacagctacttctagaactacagcaacagccacgccctccaaaacccggacgtcaacactgttgccctcgtctccaacatctgctccaataacgacagtggtgactaccggttgcgaaccccagtgtgcgtggtccgaatggctggattattcttacccgatgccaggacctagcgggggcgactttgatacttactctaatatcagagcagctggcggagctgtgtgtgaacagcctctgggcttagagtgtagagctcaggcccaaccaggagtcccgctgggggagctgggacaagtggtagagtgtagcctcgacttcggtctagtttgtaggaaccgggagcaggtgggaaagttcaagatgtgttttaattacgagatcagagtcttctgctgtaattatggccattgtccttccaccccagccacaagttctacagccatgcctagctcaacgcctggcaccacctggatcttgaccgagctaacaacaactgctaccactaccgcctcaactggaagtacagctaccccgagttcgacccctggcaccgcgccaccccccaaggtcttgactagccccgccacgactcctacggcaacttctagcaaagctacctcaagtagcagccctcggacagccacaaccttgccagtactgacaagtaccgccaccaagtccactgccactagcgtaaccccaatcccttcatccaccctcggtaccaccggcaccctgcccgaacagacaaccaccccagtggccactatgtccacaatccatccgagctccactcctgaaactactcatacgagtacggtgctaacaactaaggccacaacaacgcgggcaacatccagcacaagtaccccaagttcaactcctggaaccacctggattctaaccgagctgacaaccgctgctactaccaccgccgcgacggggcccactgcaacaccaagtagcaccccgggcactacttggattctgacagaactcactactacagccaccacgactgcatcaacagggagcacagccactccctccagtaccccaggcactacctggatcctcacagaaccttcaacaacagctacagtgacggtgcctacaggatcaactgccaccgcttcttccacacaggccacggcgggtacaccccatgtgtccactacggctacgactcctaccgtcacatcatctaaggccaccccctcgtcctcaccaggaacagccacagccctgccagctctcaggtctacagctaccacaccaactgctacctcgttcactgcgatccctagctcatcattaggcaccacatggacccgactgagccagacaacaacgcctacagccacgatgtctaccgccaccccaagtagtaccccagagacagtccatactagcacagtcttgaccgccacggctaccactactggagcaaccggctcagtggccactcctagctctacgcccggcacggcccatactacgaaagtcccaacaaccacaactaccgggttcactgctactccaagctcgagtcctgggaccgccctgacacctcccaccactacgcccatgtcgactatgtctacaatccacacgtcaagtacgcccgaaaccacccacacgtccacagtcctaactaccactgctaccatgacccgcgccacaaactccactgccaccccttcatcaactcttggcaccacaaggatcctgaccgaactaactaccacagcgaccactacagccgcaactggatccaccgcaacactgtcctcaacccctgggacaacctggatcctaactgagccatccacgattgctaccgtgatggtgccaacaggatccactgccacagctagctctacgctgggtaccgcccatacacctaaggttgtcaccactatggctacaatgcctaccgccactgcgtcaacagtgcccagttcaagtaccgtgggtaccactcgcaccccagccgttctgccatccagcctgcctacatttagcgtaagtactgtgagctctagtgttctcaccactcttcgcccgaccgggtttccgtcatcacacttttccacaccatgtttctgtcgcgcttttggtcagttcttttccccaggtgaagtgatttataataaaacagatagggcaggctgccacttctacgccgtctgcaatcagcactgcgacatagacagatttcagggagcatgcccaacgtctcccccccccgtgagttcagcacccctgtcaagtccttctcctgccccaggttgcgataacgccatcccattacgacaggtaaacgaaacgtggactttggagaactgcaccgttgctaggtgtgtgggcgacaatcgcgtcgtgcttctggaccccaagcccgtggccaacgtgacctgtgtcaacaagcatctccctatcaaggtgagtgacccttcgcagccctgcgatttccactacgagtgcgagtgtgaatgtgtgggaggccggggcatcacaccaggagctggcatttgcagcatgtgggggggatctcattacagcactttcgacggcacatcctacacttttagaggcaattgtacctatgtgctcatgcgcgagattcacgcccgcttcgggaatctgtcactctacctcgataaccactattgcacagcctccgctactgctgctgctgctcgctgtccgagggccctgagtatccactataagagcatggacatcgttctcactgtcaccatggtacacggaaaagaggaaggtctgatccttttcgaccagatccccgtgagtagcggcttcagtaagaatggagtgctcgtgtcggtgctggggactaccacaatgcgggtagacatccctgccttaggcgtgagcgtgaccttcaacggccaggtgtttcaagctcgactgccttacagcttgtttcacaataataccgagggacagtgtggcacctgtacaaataaccagagggacgattgccttcagagggacggcacaaccgccgccagttgcaaagacatggcaaagacttggctcgttcctgacagcaggaaggacggctgttgggcacccaccggaaccccgccaaccgcttcgcctgcagcaccggtgtcatcaacccccactcctaccccctgcccaccgcagccgctgtgtgatttgatgttgtcgcaagtcttcgcagagtgtcacaatcttgttccacctggtcctttttttaacgcgtgcatctccgatcactgtcgcggcaggctcgaagttccatgccagagcctcgaagcctacgcggagctctgcagggccaggggggtgtgttcagattggcgcggagcaaccgggggactgtgtgatctaacttgtccgcctacgaaagtatataagccatgtgggccgatccaacctgccacctgtaattcacgaaatcagtcaccccagcttgaaggcatggccgaaggttgtttctgtcctgaggaccagattctgtttaacgctcacatgggtatctgtgttcaagcatgcccctgcgtggggcccgacgggtttccaaaattccctggcgaacgatgggtaagtaactgccaaagctgcgtctgcgatgaaggttccgtctcggtccaatgcaagccactgccctgtgatgcccagggacagccccccccttgtaaccgacctgggttcgttacggtcactagaccaagagctgaaaatccctgttgccccgagaccgtttgcgtgtgtaatactactacctgccctcagtctctgcctgtctgtccccctgggcaagaatctatttgtacccaagaggaaggggattgctgtcctacattcagatgccgccctcagctctgttcatataacggaacattctatggggtgggcgcgacattccctggagccctgccatgtcacatgtgcacctgcctctccggcgacactcaagatccaacagtccagtgccaggaagatgcttgcaataatacaacttgtccacagggctttgaatataaaagagtagccgggcagtgttgcggggagtgcgttcagactgcatgcctgacacctgacgggcaaccagtccagttgaatgagacctgggttaactcccacgtggacaattgtaccgtgtacctttgcgaagccgagggcggggtacatctactcacaccacagcctgcctcttgtccagacgtctctagttgtcgtggatccttgcggaaaaccgggtgttgctatagctgcgaagaagattcatgccaggtccgtatcaacacaacaatactgtggcaccagggttgtgagactgaggtgaacattacattctgcgaagggtcctgtcctggggcatcaaaatattctgctgaagcccaagctatgcagcaccaatgcacctgttgccaggaaaggcgggtgcacgaggaaacggtgccgctccactgccctaacggatccgcaatcctgcatacctatacccatgctgtacaagtgctgtgcggcctgctcgcgtggggactccaagcaggcggacacatccgaggcgcagtgcaggatccacagcagcctctgaaagatcaagaggccagcggtaaagccaggcagggaggtggatatcggcaaacagtcgcgtggggcgacaagtcaaatgctcgtgcatggctgcaaaaaccagtagtctgggtccagagcggagcgttcccgacgcccggacccgcatccgccctgtgtccttggtag

SEQ ID NO: 248352 - RNA, 17298 nt, synthetic construct
  misc_feature 1..17298: note = Description of Artificial Sequence: Synthetic coding sequence
  source 1..17298: mol_type = other RNA
atgggagctccgtccgcctgtcggaccctggtgttggccctcgccgcgatgctggttgtgcctcaggctgagactcagggccctgttgaaccatcatgggagaatgccggacatactatggacgggggggctcccacaagtagtcccacaagaagagtttcctttgtgcctcctgttacagtttttccctcactgtcacctttgaatcctgcccacaacggtagggtctgcagtacctggggcgactttcactacaaaacttttgacggagacgtgttccgcttcccaggactatgtaactacgttttctctgagcactgtagggccgcatacgaagactttaacgttcagctaagaagagggctggttggctcccggccagtcgtaactagggtggttattaaagctcagggcctagtgcttgaagcgtctaatggctctgtgcttatcaacggacagagggaggaacttccttatagccgtactggtctccttgtcgaacaatccggcgattatatcaaggtcagcatcaggctggttctgacttttctgtggaatggggaggattccgcccttctcgaacttgaccccaaatacgccaatcagacctgcggactgtgtggggatttcaacggactgccagctttcaacgagttctacgcacataacgcacgccttacacccctgcagttcggcaatctccagaaacttgacggtcccactgaacaatgtccggatccgcttcctttgccagctggaaactgtactgatgaggagggcatttgtcaccgcacactcctaggccccgccttcgcggagtgccacgccttagtcgatagcacagcatacttggcggcttgcgctcaggacctttgtcggtgtccaacatgtccctgtgcaacgtttgttgagtacagtcgacagtgtgcacacgcagggggtcaaccgaggaactggcgttgccccgagctatgtcccaggacatgtcccctaaatatgcagcaccaggagtgtggttccccatgtacagacacatgttctaatccccagagggcgcagctttgcgaggaccactgcgtagatggctgtttctgccctcccggaaggtcttgcacagtcttagatgacattacccactctggctgcctgcctttggggcagtgcccttgtactcacggaggaagaacgtacagcccggggacctctttcaacaccacatgtagttcctgcacctgttcgggcgggctttggcagtgtcaggatctgccttgcccagggacatgctcagtgcagggcggagctcacatcagcacatatgacgaaaagttgtacgacctgcacggagattgctcatatgtgttatccaaaaagtgtgccgattcatccttcactgttctggctgaattacgtaaatgtggcctgacggataatgaaaactgcttgaaggctgtaaccttgtccctcgatggcggtgacacggcaatacgtgttcaggccgatggcggtgtgttcttgaactctatttacacccagttgcccctgtccgccgctaatatcactctttttaccccttcttctttctttattgttgttcagactggcttgggtctacaactcttggttcagctggtgcccctaatgcaggtgttcgtgcggctggatcccgctcaccaaggacagatgtgcgggctgtgcggcaattttaaccaaaatcaggctgatgatttcactgctctctctggagtggtagaagccaccggagcagcttttgctaacacatggaaagcgcaggcagcctgcgccaatgcccgcaactcgtttgaagacccttgtagtctaagtgttgaaaacgaaaattacgcacgccactggtgctctagactcacagaccccaactcagccttctctaggtgccacagtattattaacccgaaaccatttcacagtaattgcatgtttgatacctgcaactgcgaaagatctgaggactgtttgtgcgccgccctgtctagctacgtgcatgcttgcgccgccaagggcgtccagttgagtgactggagagacggcgtatgtacgaagtacatgcagaactgtccgaaatctcaacgctatgcgtacgtggtggacgcctgtcagccaacgtgtagagggctgtccgaagccgacgtcacctgttccgtctcatttgtgccagtcgacggttgcacctgtcccgccggcaccttcctcaatgatgccggtgcttgcgtcccagcgcaggagtgtccctgctacgcccatggaactgtgcttgccccaggtgaggtagttcacgatgagggcgccgtttgtagttgtacgggtggcaaactgagttgtttgggtgccagcctgcagaaatcaactggttgcgcagcccccatggtctatctggattgttccaattcctcagccggcactccaggcgcggaatgtttgcgatcttgtcacacactggacgtcgggtgtttcagtacccactgtgtctctggatgtgtctgtccacccggcctcgttagtgacggaagcgggggctgcattgctgaagaagattgtccatgcgtccataatgaggctacatataagcccggagaaacaattagggtggattgtaacacatgcacctgtcgaaataggaggtgggagtgttcgcatcgactttgcctcggcacatgtgttgcgtatggcgacggacacttcattacatttgacggcgaccgctattctttcgaaggaagctgtgagtatatcctggcgcaagattattgtggggataatacaacccacggaactttcagaattgtgaccgaaaacataccatgtggcaccactgggacaacatgttcaaaagctatcaaattatttgtggagagttatgagttaattttacaagagggtactttcaaggcggtggccaggggcccgggcggggatcctccatataagatacgctacatgggcatcttcctagttatcgagacacatgggatggctgtgtcctgggaccggaagaccagcgtgttcatccggctgcaccaagactacaaggggcgtgtgtgtggactgtgcggaaactttgacgacaacgccattaatgacttcgccacccggagccggtctgtagtgggagacgcgctcgagtttggaaactcatggaaattgtcaccgtcatgccctgacgcactagcacctaaggatccctgcacggccaaccccttcaggaagtcctgggcccagaagcagtgttcaatcttacacggacccacattcgccgcttgcagatcacaagtggattccacaaaatactacgaagcctgtgtcaacgacgcctgcgcatgcgattctggtggcgactgcgaatgcttctgtactgcggttgcagcatatgcccaagcttgtcacgacgccgggttgtgtgtgagctggcgtactcccgatacatgccccttgttctgtgacttctacaatccccacggaggatgcgaatggcattatcagccatgtggtgcaccatgtcttaaaacatgtcgaaaccccagtggccattgcctggtggatttgcctggattggagggatgttaccccaagtgcccacccagtcagcccttctttaatgaggaccagatgaagtgcgtagcgcagtgtggctgttacgacaaagacggaaactattatgacgttggagcaagggtaccaaccgcagaaaactgtcagagttgcaattgtaccccaagcggcatacagtgtgcccacagcttggaagcctgtacctgtacctacgaagatcggacgtacagctaccaggacgtgatctataacacgacagacggcctgggtgcttgcctgatcgctatttgtggctccaatggtaccatcattagaaaggccgtagcatgtcccgggactcctgctactacaccttttacgtttaccacggcttgggtccctcatagcacaacttcccccgccctccctgtgagcaccgtctgtgtgcgcgaagtatgccgatggagctcttggtacaacggtcaccgaccggagccaggactcgggggcggggacttcgaaacttttgagaaccttaggcagcgcggataccaggtgtgtcccgttctggcagacattgagtgtagggccgcccagctgcctgatatgcctcttgaggagctcggccagcaagtcgactgcgatagaatgcgcgggctgatgtgtgccaactcacaacagagcccacctctgtgccacgactacgaactgcgagtgctctgctgtgaatatgtaccctgtgggcctagcccagcaccaggaacaagcccgcaacctagcctctctgcatccacagaacccgccgtgcccacaccaacacaaacaaccgcgactgaaaaaaccactttgtgggtgactccctctattcgttccaccgcagctctgacctcccagaccgggtcttccagtggacctgtgacggtaactcctagcgcacccggcacaacaacttgtcagcctcggtgtcaatggaccgaatggtttgatgaagattatcctaaatcagaacagcttggaggcgacgttgagtcttatgataagatcagagctgctggcggtcacttgtgccagcagcctaaagacatcgagtgccaggcagaatcctttccaaactggacgctcgcccaggtggggcaaaaagtgcattgtgacgtgcattttggactggtttgccgcaattgggagcaggagggggtattcaagatgtgctataactatcgaatcagggtgctgtgttgtagtgacgaccactgtcgcgggagggcaaccaccccacctcccactaccgaattagaaaccgccacaacaaccactacccaggcactgtttagtacaccgcaacctacctcaagtccaggcttgacaagggctccgcccgctagtacaactgcagtgcccactctttccgagggattaacatctccacggtacactagcacccttggcacagcgaccacagggggtccaaccacaccagcagggtcaaccgaaccgactgtacccggagtggccacatccaccctgcctacacgttctgcccttccgggcacaaccggatctctgggtacctggcgtccatcgcagccaccaaccttagcgcccacaactatggccacttccagggccagacctaccggtacagcgtcaacggcctccaaggagcccctgaccacaagcctcgcccctactttaaccagcgaactatccacctcccaggctgagacctcaactcctcgcacagagacaactatgagtcctctgacgaataccacaaccagccagggaacaactcgctgtcaaccgaaatgcgaatggacggagtggttcgacgtagatttcccaaccagtggtgtagccggaggtgacatggagaccttcgaaaatattcgggctgcaggcggcaagatgtgctgggcacctaaaagtatcgagtgccgagctgagaactatcctgaagtgtccattgatcaggtgggtcaggtgctgacctgtagcctcgaaacaggcttaacctgcaaaaatgaggatcagaccggtagatttaatatgtgttttaattacaatgttcgcgtcctttgctgcgacgactactctcactgtccctcaactccagccactagtagcaccgctactccaagctcaacgccaggcaccacctggatcttaacaaaacctactaccactgccacgaccacggcatccaccgggtccaccgctacaccaacttccactctcagaactgcccctccgccgaaagtgttgaccacaactgcaacaacaccgactgtgacaagttcgaaggctaccccttccagttcacccggcacggctaccgctttacccgcccttcgcagcacagcaaccactcccactgccacttctgtcacaccaatccctagcagttctctggggactacctggactaggcttagccagaccaccaccccgaccgcaaccatgagtacagcaacaccaagttccacacccgaaacggctcatacttccactgtcctgaccgcaacagcgaccactacaggagccacagggtccgtggcaactccatcctccactccaggcacggcccatactactaaagtcccaacaaccactacaaccggcttcacagccacccccagttccagccccgggaccgccctgacccctccggtgtggatctctaccacgaccacccccacaacacggggaagcacagtgacaccttctagtatccccggcactacacataccgctacggtgctcaccaccaccaccaccactgtggccacaggctctatggccaccccgtctagcagtacacagactagtggaacgccccccagtctgaccacaaccgcgaccactatcaccgccacaggatcaaccacgaatcctagcagcactcccggcactactccgattccacctgtgctgacaactaccgctacaactcccgctgcaacaagtaacacggtgaccccatccagcgctctcggcactacccataccccacccgtacccaataccatggccactactcatggtcgctctctgcccccaagttcccctcacacagtaagaaccgcctggacgtcagcaacctcaggtattctgggtaccactcacataactgagccaagtacggtgacctcacacaccttggccgcgacaacgggtaccacccagcactcgacacctgcactgtctagcccccatccaagttcccgtacaaccgagtcgcctccaagccctggcaccacaacccctggccacaccacagccacctccagaaccactgctacggcaaccccaagcaaaacccgtacaagtaccctgctaccttccagccctactagtgctccaatcaccactgtcgtgacaatgggctgtgagccccagtgcgcttggtccgaatggttagactattcctatcctatgccaggaccaagcggaggagacttcgacacctactcaaatatcagggctgccggcggggccgtttgtgaacagcccctcggtcttgaatgtagggcgcaggcccagcccggagtgcccctacgtgagctggggcaagtggttgagtgcagcttagacttcggcctggtttgccgcaatagggagcaagtgggcaaattcaagatgtgctttaattatgagattagagtattttgctgcaattacggccactgtcccagcacacccgcaacatcatctacagctatgccatcctctacccccggtacaacatggattctaacagaactgacaactacggcaaccacaaccgaatccactggatctactgctactccaagcagcacacccgggacgacctggatcctgactgagccatctacaacagccaccgtgactgtacctaccgggagtaccgcgaccgcgtctagcactcaagccacagccggcacaccccatgtctcgacgacagccactactccaaccgtcacatccagcaaagccacacccttcagctctcccggcaccgctacagcattgcccgcattgcgaagcacggctactacccccactgcgactagcttcactgccattccttcaagcagcttgggtaccacatggacccgcctcagccagaccacaaccccaactgctactatgagtaccgccacgccatcttcaactcctgaaacggttcatacatcaaccgttttaacaacgactgccacgacaacaggagcgactggcagtgtggctacgccatcctctactccaggaacagctcatactacaaaagtcttgaccaccaccacgactggattcaccgcgacccccagtagctctcctggcactgcgcgcacgctgcctgtgtggatctcaaccacaacaacccctaccacacggggatccaccgtgaccccttcaagcattcccgggacaacacatacccccacagtgctcactacgaccacaacgaccgtggccaccggtagcatggccactcctagctcctctacccagacctccggtactcccccttccctcaccaccacagcgacgacaattacagccactggctccaccactaatccttccagtacaccaggaactactcctatcccacctgtactgacaacaaccgccactacgccggccgctaccagttccaccgttaccccgtcatccgccctcggcaccactcataccccccccgtgccaaacacaactgccaccacccatgggagatctctctccccatccagccctcacaccgttagaactgcctggacttctgctacatcaggcaccttagggaccacacatatcacagaacctagtacgggcacgtcacatacacccgcggctacgactggtactacccagcactcgaccccagctctgagcagtccccatccgtcttctagaaccactgagtcacctccatcaccgggcaccacgacgccaggtcacacaagagctacttcacgcacaaccgccacagccaccccctctaagactagaacttcaactctgctgcccagtagcccgacatcggcccccattaccacagttgtcaccatgggatgtgagcctcaatgtgcctggtctgaatggctggattacagctatcctatgccaggcccctctggaggtgactttgatacctactccaatatccgtgctgcaggcggggccgtgtgcgagcagcctctgggtctggagtgcagggcccaggcgcagcctggcgtgccactccgagagctgggacaggtcgtggagtgctctctggacttcggccttgtatgtcgcaacagagagcaggtgggaaaatttaaaatgtgcttcaactacgaaatcagggtgttctgctgcaactatggccactgccctagtaccccagctaccagtagcaccgcaactcccagctcaacgcctggcaccacctggatcctgaccgagcagacgacagcggctaccactacagccacgactgggtctacggcgattcccagctcaactcctggcacagctccaccacctaaagtccttacatccactgctacaacgcccacagcgacaagcagcaaagccaccagctcctcgtcccctcgaacagccactaccttgccggtactaacctcaacggccacaaagtcgaccgcaacatctttcacgcctattccaagcttcactctgggaacaactggaactctacctgagcagaccacaacacctatggctaccatgtctaccattcatccatcttccactccggaaaccacacatacgtcaaccgtgctgacgacaaaggcaacaacgacaagagcaacatcctctatgagtacaccttcttcaactccaggtactacttggattttgaccgaactgacgacagccgcaaccaccacggctgctacaggacccaccgcaacaccaagctccaccccaggcaccacatggatacttactgagccatccacaacagcaaccgttaccgttcccactgggtctaccgccaccgcttcttctacacgtgccaccgccggcacattaaaggtgctcacatctacagccacaacgcccacagtgattagctcccgagctacaccctcttccagcccaggtacagccaccgccctaccagcccttcggtcaaccgcaacaactcctactgccacttccgttacagcaattccatccagcagcctgggtactgcctggacacgactgagccagactaccacaccaacggccaccatgtctacagccactcctagtagcactccagaaaccgtgcatacctctacagtcctgaccacaacaactacgacaacaagggccactggctctgtcgcaactccatcaagtaccccaggcaccgcccacacaacaaaagtcccaaccaccactactactggattcactgcgaccccttccagtagccccgggacagcgctgacaccgccagtttggattagtaccacaactactcctaccactcggggcagcaccgtgaccccatctagcatccctggtaccacacacacggccactgtgttgacaactacaaccaccactgtggcaacaggatccatggctactccttcgtccagcacacagacttcagggaccccaccctccctgaccacaaccgcgacaactatcactgctaccggaagcactaccaatccgtcctcaacgcctggaacaactccgatcccacccgtgttgacaacaaccgccacaactcctgccgctacttccagcaccgtgaccccctctagtgctctgggcacaacccatacaccaccagtacccaatacgaccgccacaacgcatggcagatcgcttccacccagctcgccacacaccgtgcgaaccgcgtggacctccgccacctccggcattctaggcaccactcacatcacagaacccagcacagtgacttcacatacacccgccgccaccacatcgacgacccagcattcaacacccgccctgtctagcccgcatccctcgagccgtactaccgagtcgcccccttcacctggtacaactactccgggtcacactcggggaacaagcagaactacagccaccgcgacgccaagtaagactcggacatcgactctgctgccaagtagccccaccagcgccccaattacgaccgtggtgaccaccggttgcgaacctcaatgtgcttggagcgagtggcttgactatagttacccgatgcctggcccctcggggggggattttgatacatacagcaatataagggcagctggaggagcagtgtgcgaacaaccgctggggctggaatgccgtgctcaggcacagcccggcgttcctttacgggagctgggacaggttgtggagtgcagtctggattttggcctcgtgtgtcgaaatcgcgaacaggttggaaaattcaagatgtgttttaattatgaaatcagagtgttctgctgcaactatggacactgtccctccacgcctgcaacatcttcaacagcaacaccttcctccactccaggcaccacttggatattaacaaaactgaccactaccgctaccacgacagagtcgacaggtagcaccgcaactccatcatctacccctggaacaacctggattctcaccgagccttccacgactgcaacagtcaccgttccaactggctccacagccacggccagcagtacgcaggctaccgccggaaccccacacgtgtcaaccaccgccactacgcctaccgtcacctcctcaaaagcaactcctttttcatcacctggtaccgcgactgctcttccagcgctgcgtagtactgctactacgccgactgctacttccttcacagctatcccgtcctcaagtctggggacaacctggacacgcctgtctcagacaactactccaaccgcaacaatgtccacagcaactcctagctcaacgcccgagacagcacatacatccaccgtccttacgacgacagccacaactactcgtgccacagggtccgttgcgacacccagctctactcccggaacggcccacacaacaaaggtccccaccacaacaaccacaggattcaccgtgacgccatccagttctcccggtaccgcccggactccaccagtttggataagcaccaccaccacacccaccactagcggctcaacagtaactccttcatcagtccctggcaccacgcacacccccaccgtactcacaaccaccaccacaaccgtggccactggaagtatggcaacaccaagtagctccacacaaacaagcggaactccgccctcactgattacaacggccaccaccattacggctaccgggtcaacaacaaaccccagctcaactcctggaaccacccctattccgcccgtgctcaccacgacggctaccacgcccgccgctacctctagtacagtaaccccttcatctgctctgggcacgacacacactcctcccgtccccaataccacggccacaactcacggacgttctctgtccccatcatcacctcacacagtgcgaacagcttggacaagtgccacttccggcacactgggaaccacacacatcaccgaaccttctaccggtacctcacacacaccagctgcaactactggtacgacacagcatagtacaccagcactgagtagccctcacccctctagcaggaccacagaaagcccgccaagcccaggaaccaccacacccgggcacacaacagcaacctccagaacaaccgcaaccgctaccccgtccaagacaagaaccagcactctgcttccaagcagcccaactagtgcccccataactacagtggtgaccacaggctgcgaaccccagtgtgcctggagcgagtggctggactacagctatcccatgccagggcctagcggcggcgattttgatacctacagcaatataagagctgctgggggagcagtttgcgagcaacccctgggattagaatgccgggctcaggcccagcctggggtcccactgggcgaactgggccaggtcgtagagtgctctctagacttcggcctagtctgtaggaatagagaacaggttgggaaatttaagatgtgctttaactacgagatccgggtcttctgttgcaactatggacactgtccctctactcccgccacatccagcaccgctatgcccagctcaacaccgggaacaacctggatcctcactgaactgaccaccaccgctactaccacagcttcgacgggatccacagcaaccccaagtagcacccccggaaccgctccgcctcctaaggttttgacaagtcctgcgacgacgcctactgcaacttcctcgaaagctacctcttcctcatcccctagaaccgccaccaccctccctgtactcacgtcgacggcaactaagtctaccgctaccagcgtgacgcctatacccagttccactctagggactaccggaacactgcctgaacagacaactaccccggtcgccacaatgtctacaatacacccttcgtccacccccgagaccacccacacatcaacggtgctgactacgaaggcaacgacaacacgcgccacatccagcaccagcaccccatcctcaactcccggcacaacctggatcctgaccgagctgaccaccgccgctaccactacagcggccacaggacccactgcgacaccctcttctactccaggaaccacttggatccttaccgagctgaccacaaccgcgaccacaacagcttctacaggcagtaccgcaacgccctcatccactcccggcaccacgtggattctgactgagccgtctactacagccacagtcaccgtgcccaccgggtccaccgcaactgctagttctacacaggctactgcggggaccccacatgtttccaccacggccaccacacccacagtaacttcgagcaaagctaccccttcctcatcaccagggactgccaccgcccttccagccttacggtctaccgccactacccccactgccacatccttcactgcaataccttcgtcaagtcttggcactacgtggacccgcctcagccagaccacaacacctacagccacgatgtccactgcaaccccaagctcaactccagagacagtgcacactagcaccgtgctgacagcaaccgccaccacgacaggtgcgaccggcagcgtggcgacaccctcatctacaccaggtaccgcccacaccactaaggtgccaaccaccactaccacagggttcaccgctaccccatcttccagcccaggtactgccctgactcctcccgtctggatatctaccaccactacacccactacaaccactcctacaacttctggtagcactgttaccccctccagtataccaggcactacacatactgctagagtgctgactaccacaaccacgaccgtagccactggctccatggccactcccagctcaagtacccagacgtcgggcactcctccaagcttaacaaccacggcaaccacaattaccgccacaggcagcactactaatccgtcatctacacccggaacaaccccaattactcccgtcctgacatccaccgctactacgcctgccgcaactagctccaaagctacctcatcttcatctccccggacagcgaccaccctacctgtgttgacctcaacagcgacaaagagtacagccacgtcttttacgccgatcccaagttccactctatggaccacttggactgtccctgcccagactaccacccctatgtcaaccatgtccactatccacacatcaagcacccccgagactactcacacaagcacagttctgactacaaccgctacaatgaccagggcaaccaactctaccgccactccctcctctaccctcgggacaacccggattctgacagagcttaccactacagccacaactacagccgcaaccggctcaaccgctaccctgtctagtactccaggaacaacgtggattcttactgagcctagcaccattgccactgtcatggttcctacaggcagcacagcaaccgccagctcaactctgggtacggcccatacccccaaggttgtgaccacgatggctaccatgccaacggccacggcttccacagtgccaagttccagcactgtaggaacaactcggaccccggccgtgctcccttcatccctgcccaccttttcggtgagcacagtttcttcatcggttctgacaacactgcgaccaacaggctttccatcctcccactttagtacaccatgcttttgccgagcctttggacaatttttctcacctggcgaggtgatctataataaaaccgatcgcgccggctgccacttttacgctgtctgtaatcagcactgcgatatcgaccgctttcaaggggcatgcccaacatctcccccaccagttagttctgctccattgagtagtcccagcccagctcccggatgcgataacgccattccacttcgtcaggtcaatgaaacatggacccttgaaaattgtaccgtggcaagatgcgtgggtgacaatagagtagtgctccttgacccgaaaccagtcgccaacgtaacatgcgtgaacaaacacctccccatcaaagtgagtgacccctcccagccgtgcgattttcattacgagtgcgaatgcatttgctctatgtggggaggcagtcactactcaacctttgacgggacctcctatacttttcgaggcaactgtacttacgtcctcatgagagaaatccacgcacgctttgggaatctatccctgtacctggacaaccactattgcaccgcctccgctacagcggcggcagcaagatgtccgagagcacttagtattcactacaagagtatggatatcgttctaactgtaactatggtacatgggaaggaagagggcctgatactcttcgaccaaatcccggtttcctccgggttctctaaaaatggtgtattagtgagcgtgctgggtaccacaaccatgcgcgtggatatccctgcattgggagtatctgtaacttttaacggccaggtgttccaggccagactaccttactctcttttccacaataataccgagggacaatgtggaacctgcacgaacaatcagcgtgatgattgcctgcagagagacggaaccacagcagcttcatgcaaggacatggccaagacatggctcgttccagactctagaaaagatgggtgctgggcccccactggcaccccacctactgcctccccggctgcccctgttagctcgactcccacacccacaccatgccccccacaacccctttgtgacctgatgctctctcaagtgttcgctgaatgtcacaaccttgtgcccccagggccattcttcaatgcttgtattagtgaccactgccgcgggcgtctggaagttccgtgtcaatcactggaggcatatgcagagctgtgccgagcgcgaggagtttgctcagactggcgcggcgctacaggaggactgtgtgatctgacatgcccccctacgaaggtctacaaaccctgcggcccaattcaacccgctacttgtaatagccgaaatcaatctccgcagcttgaggggatggcagagggttgcttctgcccagaggaccagatcctgttcaatgcccatatgggcatttgcgtacaggcttgcccctgcgtaggaccagacggcttcccaaagtttccaggcgaaaggtgggtaagcaactgccagtcctgcgtatgcgatgagggctccgtgagtgtccagtgcaaacctctgccttgcgatgctcagggccaaccgcccccttgcaaccggcccggatttgtgactgtgactcgtccccgggccgaaaacccatgctgcccagaaactgtctgcgtttgcaatacgaccacctgtccccagtctctcccagtttgtccacccggccaggagtccatctgcactcaagaggagggagactgttgcccaacattcaggtgccggcctcagctttgcagctataatgggaccttttacggggtgggagcgacatttccgggcgcattgccttgtcacatgtgtacatgtctgtccggtgatactcaagatcctacagttcagtgccaggaggatgcgtgcaacaacaccacctgtcctcaagggttcgagtataagcgggtcgctggccaatgctgtggcgagtgcgtgcaaacggcctgcctgacccccgatggacagcctgttcaacttaacgaaacctgggtgaattctcacgtcgataattgcacggtctatctgtgtgaggccgaaggtggcgtgcatctgctgactccccaacccgcctcttgccctgacgtgtcctcgtgcagagggagtctccgcaagactgggtgctgctactcttgcgaggaggacagctgccaagtgcgcataaacacgaccattctctggcaccaagggtgcgagacagaggtaaacattactttctgcgaaggaagttgcccaggagcctccaaatactctgcggaagcccaggccatgcagcaccagtgtacatgttgtcaggagagacgcgtacatgaggagaccgtgcccctgcactgtcctaacgggtctgccattttgcacacgtacacacatgttgatgagtgtgggtgtacgcccttctgcgtccccgcgccgatggccccgcctcatactcgggggtttcctgctcaagaggcaaccgcggtctag

SEQ ID NO: 248353 - RNA, 17289 nt, synthetic construct
  misc_feature 1..17289: note = Description of Artificial Sequence: Synthetic coding sequence
  source 1..17289: mol_type = other RNA
atgggagctccctccgcctgcagaacccttgtgctggccttggctgcaatgttggtggttccccaggccgagactcagggccccgttgagccaagttgggagaatgccggccatacaatggatggtggcgctccaactagttcacccacacgacgagtttcttttgtccctcctgttacggtatttccttccctgagccctctcaatccagctcataacgggcgggtctgtagtacctggggagacttccactataaaacctttgacggcgacgtctttcgatttccagggctttgtaattacgtcttcagcgagcattgtagagccgcctacgaagactttaacgttcagctgcgccgaggtctcgtgggatcgaggcctgttgtgacacgcgtcgtaatcaaggcccaaggactagtgcttgaggccagtaatggaagtgttcttatcaacggacagcgcgaggagctgccgtacagtagaactgggctgctcgtcgagcagtcaggagattacatcaaagtctccattagactggtcttgaccttcctgtggaacggagaagactccgcgctcctggagctggatcccaaatacgctaaccaaacgtgcgggttgtgcggcgacttcaacgggcttcctgctttcaacgagttctacgcccacaacgcccggctgacgccactacaatttggcaatcttcagaaattggatggacccacggagcagtgccctgatcccctccctttaccagccggcaattgcaccgatgaggaaggcatttgtcaccgcactctgctgggacccgcctttgccgaatgccacgccctggttgactcgaccgcttatctggctgcctgcgcccaagacttgtgcagatgcccaacatgtccctgcgctaccttcgttgagtacagccgccagtgtgcacacgccggaggacagcctcgtaactggcggtgcccggagctttgcccaaggacgtgccctctgaacatgcagcatcaggagtgcgggagtccttgcactgacacttgttctaaccctcagcgggcccaactgtgcgaagatcactgtgtcgacggatgcttttgccctccaggaacagtcctggatgacatcactcatagtgggtgcttaccactgggccaatgcccatgcacccatgggggacgtacctattcgcctggaacgagctttaataccacctgcagcagttgcacttgttcgggaggactctggcaatgtcaggaccttccatgtccagggacttgttccgttcaaggaggagcacatatctcaacatatgacgaaaagctgtatgacctgcacggcgactgttcgtacgtgctgagtaagaagtgcgccgactctagcttcaccgtgttggccgaacttcggaagtgtggattgactgataacgagaactgtcttaaggcggttacactgtccctcgacggcggagacacggctatcagagtacaggcagatgggggcgtgtttttaaattccatctatacccagctccccttgtctgcggcaaacattacattgttcaccccatcgtccttttttatcgttgtacaaacaggactcggacttcaactattagtgcagctggtcccactcatgcaagttttcgttagactggacccagctcaccaaggccaaatgtgcgggctctgtggcaatttcaatcagaatcaggccgatgattttactgccctatcaggcgtcgtggaggccaccggagcagccttcgcaaacacatggaaagcccaggccgcatgtgccaatgcgcgcaattccttcgaagacccatgctcactgagcgtggaaaacgagaactatgcccggcattggtgctcgcgactgactgatcctaattctgcctttagtagatgccactcgataattaaccccaagccttttcactctaattgtatgtttgacacatgtaattgtgagcgtagcgaggattgcttgtgtgccgccttgagctcatacgtacatgcatgcgccgcaaagggagtgcagctgtccgactggcgagatggggtctgcacgaagtacatgcagaactgcccaaaaagccaaagatatgcttacgtggtggacgcttgccagccaacctgtcggggtttatctgaggccgacgtcacttgctcagtatccttcgtccccgtggatggctgcacctgtcctgccggtaccttcctgaatgacgctggcgcctgtgtgcctgctcaggaatgtccatgctatgcccacggaacggtgctggctcccggagaggttgtgcacgacgaaggagcggtttgctcatgtacgggtggaaagttaagttgcttgggcgccagtttgcaaaaaagcacaggctgcgctgcccccatggtctatttggattgctcaaatagctccgctggtacacccggagctgaatgccttaggtcatgtcacacccttgatgtgggatgtttttctactcactgcgtcagtggctgcgtgtgtcctcccggactggtcagtgatggtagtggtggatgtatcgccgaggaggactgtccatgcgtccacaacgaagctacatataaacccggggaaacgataagggtcgactgcaacacttgtacctgccggaatcgcaggtgggaatgttcacataggttgtgcctgggcacctgcgtagcgtacggtgatggccacttcatcacctttgacggcgaccgctacagcttcgagggatcctgtgagtatattctggcgcaggattattgtggggacaacaccacccatggaactttcagaatcgtcaccgaaaacatcccatgtgggacaaccggaactacttgtagtaaggctataaagctcttcgtcgaatcctacgaactgatcctgcaggaggggacgttcaaggcagtcgcacgagggcccggaggcgaccctccctataagattcggtacatgggcattttcctggttatcgaaacacatggtatggcggtctcgtgggaccgtaaaacaagcgtgtttattagactacaccaggattacaaaggccgtgtctgcgggctctgtggcaacttcgacgacaacgctatcaacgacttcgctacaaggagccggagcgttgtgggggacgcgttagaatttggaaattcctggaagctctccccatcctgtccagacgccctggctccaaaggatccttgcactgcaaacccttttcgaaagagttgggcccaaaaacagtgttctatacttcacgggcctaccttcgccgcctgcagaagccaagtcgactcaacgaagtattatgaggcatgtgtcaacgacgcatgtgcgtgcgatagcggaggcgactgcgagtgtttttgtaccgccgttgcagcctacgcccaagcatgccacgacgccggtctctgcgtgtcttggagaacccctgatacgtgcccactcttctgtgacttctacaaccctcatggcgggtgtgaatggcattatcagccatgcggggcaccgtgtcttaagacttgcagaaacccttccggacattgcctggtggacctgcccggcctggagggatgctacccaaaatgcccaccctctcagccgttcttcaatgaagaccagatgaagtgcgtggcccaatgcggatgctatgacaaagatggtaattactatgacgtgggggctagagttcccaccgccgaaaattgccagtcatgtaactgcacccccagtgggatccagtgtgcgcacagccttgaggcttgcacatgcacttatgaggataggacatactcctaccaggatgtcatctacaataccactgatggtctgggcgcctgtctaatcgctatatgtggtagcaatggcactatcatccgaaaggccgtcgcctgtcccggcacccctgccacgaccccttttaccttcacaactgcttgggtcccacattctaccacttctcccgcactccctgtgtccactgtatgcgtccgggaagtctgtcgttggagttcgtggtataacggtcaccggcccgagcctgggcttggtgggggggatttcgaaacgtttgagaacttgagacagcgggggtaccaggtatgcccagttctggcggacattgagtgcagggctgcccagctcccagacatgcccttagaagaactgggtcagcaggtagattgtgatcggatgagaggactcatgtgcgcgaacagtcaacagtcaccacctctctgtcacgattatgagcttcgggtcctctgttgcgaatatgtgccctgcggccccagtccagctcccggcacctctccgcagccttcactatcagctagcacggaacctgccgtccccactcctacccagacgaccgccacggaaaaaacaacactatgggtcacaccctctatacgatcaacagcggcccttactagccagacaggtagtagctccggtccggtcaccgtaaccccctccgccccaggaaccaccacttgccaacctcgatgtcagtggactgagtggttcgacgaagactaccctaagtccgagcagctgggaggtgatgtagagtcctatgataagatccgcgctgcggggggccatctctgtcagcaacccaaggatatcgagtgtcaggccgaatcgttcccaaattggaccctggcacaggtgggccagaaggtgcactgcgacgtacatttcggcctggtttgccgcaactgggagcaggagggagtgttcaaaatgtgctacaattaccggattcgagtcttatgttgcagtgacgaccattgtagaggaagagccaccacgccacctccaaccaccgagctggagaccgccaccactacgaccacccaggcactgttcagcacaccacagcctacatccagtcctggactgacccgagctcctccagccagtacaacagccgtgccaacactaagtgaaggactgacgtccccccgctacacctctacactgggcactgccaccaccgggggaccaacgacgcctgctgggtctaccgaacctactgtcccaggagttgcaacaagtacactgcccacaaggtccgcactacctggtactacaggctcgcttggcacgtggaggccaagccaacctccaactttggcccccaccactatggctacttctagagcacgccctaccggtaccgcttcaactgcatcaaaagaaccgctcacaacctctttggcgcctaccctgaccagcgagctcagcacgtcccaggctgaaacttccacaccccgcacagaaaccactatgagcccgctgacaaacacaactacaagtcaggggacaacacgctgtcagcccaagtgcgagtggactgaatggttcgatgtggacttccccacctcaggcgtggccggaggcgatatggagacttttgaaaacattcgggccgcaggtggcaagatgtgttgggcacccaagagcatcgagtgcagggccgagaactacccggaggtaagcatagatcaggtgggacaggtgctgacatgctcactggagaccggtctcacatgcaaaaatgaagaccagacaggacgcttcaatatgtgcttcaattataacgtcagagttctctgctgtgatgattattcacactgtccttcaacaccagcaacctcctccaccgcaaccccatctagtacgccgggaacaacttggattttgacgaagccgaccacgaccgccactaccactgcctccactggatcaaccgccaccccaacgagcacgttgcggaccgcccctccccccaaggtcctaacaacaaccgccacaacaccaaccgtaaccagcagcaaagctacgcccagctcctcccctggtacagcaacggccctacccgctcttcgctccaccgccacaaccccaaccgcaacctctgtgacacctattccgtcatcgagtttgggcactacctggacacgcttaagccaaaccacgacccctacggccactatgtccaccgccaccccctcatcaactccagagaccgcccacacatccaccgtgctaactgcgaccgccacaaccaccggcgccacaggatcagtggcgactccttccagcacaccaggaacggctcacacaaccaaagttcccaccacaaccacgaccggattcacagcaacccctagctcatcccccggaaccgcactaacacctcctgtttggatcagcacaactacaaccccaacaaccagaggatcaacagtcacccccagctctattccgggaactacccacactgcaacagtgctgactaccactacgacaacagtcgccactggttcgatggctactccttccagctcaacacagacatccggcactccaccatccctgactaccactgccaccactatcacagcgaccggctcaactacgaacccgtctagcacgccaggcacgacacccattcctcccgtgctgactacgacagctacaactccagcagcgacgtctaacaccgtgactccctcctctgcactggggactactcacaccccacccgtgcctaacaccatggcaaccactcacggcagaagcctgcctccctccagccctcacaccgttagaaccgcatggacaagcgcaacatccggcatccttggcacgacacacattactgagccatccaccgtgacgtcccataccctcgccgctactacaggaactacacagcattccacgccagcccttagcagcccacacccatcatcaagaacaacagagtcacctcccagtcctgggaccacaacaccaggccatacaacagccacctcaaggactacagctaccgccactccgtccaaaacccgaactagtaccttgcttccgagcagtcccacctctgccccaatcacaactgttgtgacaatggggtgtgaaccacagtgcgcatggtctgaatggctcgattattcttaccccatgcctggaccatcggggggcgactttgacacctactccaatatcagggctgctggtggggcggtttgcgagcaacctttggggttggaatgtagggcccaggctcagccgggcgttccacttcgcgagctcggccaggtcgtcgaatgcagcctggattttggattagtgtgtagaaaccgggaacaagtcggcaagttcaaaatgtgctttaactatgaaattagagtattttgctgtaattatgggcactgtccctctactcctgctacctcgtccaccgcaatgccatcctctacgcctgggacaacctggatcctgactgagctgaccactacagccactactacagaatcaactggttctaccgctacccccagcagtacaccaggtaccacctggatcctgactgaaccctccaccactgctacggtgacggtacccactgggtcgacggctaccgcatcttccactcaagctactgcaggcactcctcacgttagcacgacagctaccacaccaaccgttacttcaagcaaggctactcctttctcttctccaggcactgccacagccttacctgccttgcggtcgaccgccacaacacccaccgcaacttcattcaccgcaattccgtcatcttctctgggcacgacttggactagactgagccagaccaccacccccactgccaccatgagcacagccaccccatcatccacccccgagaccgttcacacatcaaccgtgctcaccactacagccactaccacaggagccacaggttccgtcgccacaccgagttcgacgccgggtaccgctcacactactaaagtcctcacaaccaccaccacagggttcactgccactcctagcagtagtcctggaactgcccgaactctgcctgtgtggattagcactacgacaactcctaccactagaggaagcactgtcaccccttctagcattcccggcactacgcacaccccgacggttttaacaaccaccaccactactgtggcaactggaagtatggcaacccccagctcttcaacgcagactagcggaactcccccatctctaaccacaacagcaactacaatcacggcgacaggatcgacaacaaatcctagctctaccccagggaccaccccgatccctccagtgttaacaacaactgccaccacccctgctgctacctcatccacggtcaccccttcctcagcccttggcaccactcatacacctcctgtcccgaatacaacagcaacaacgcacggacgcagcctgagcccgagcagcccgcataccgtccgtactgcttggacatccgcaacttctggcacgttaggcactactcacataactgaaccatcaacaggcaccagccatacccccgcggctaccacagggactacccagcattctacacccgcgctttcttcccctcacccttccagcaggaccaccgagtcacccccctcccctgggaccacaacacccggccatacccgcgcaacctcacgcacaaccgccacggctacaccttccaagacacgtacatcaaccttgttgccatcttcacctacttctgcacccatcacaaccgtcgtgaccatgggatgcgaacctcagtgtgcatggtctgagtggttagactatagttatcccatgcctggacccagcggcggagactttgacacttacagcaacataagagcagccggcggagccgtgtgcgagcaacctctgggcctcgaatgtagggcccaagcccaaccaggcgtcccgcttcgtgagcttggtcaggtggtggagtgctctctggacttcggcttggtgtgtcgtaaccgcgagcaggtaggaaagtttaagatgtgctttaactacgagattcgcgtcttttgctgcaactacggacactgcccttctactcctgccacgtcctctacagccacaccctctagtacaccaggcaccacttggattctgacggaacaaacaaccgccgctactacaaccgccactactgggtcgactgcaatcccttcgagcaccccaggcaccgcacctccccctaaagttctgaccagcactgccaccacccccaccgccacaagctctaaggccacaagctcatcttctcctcggactgcaacaacgctacctgtgttaacatctacggccacaaagagtacggcaacttctttcacgcctatcccatccttcaccctcggaactactggcaccctgcccgaacagacaacgaccccaatggccaccatgagcacaatacatccgtcttctactccggagactacacacacgtccactgtgctgacaaccaaagccactaccacccgcgctacctcaagtatgtcaactccatccagcactcctgggaccacttggattcttaccgaactgaccactgccgccaccacgacagccgccaccggacctaccgcaactccatcgagcactccaggaaccacttggatactgaccgaaccctcaacaactgccactgtgaccgtcccgacaggcagcacagccaccgcaagcagcacacgggccacagccgggacgctaaaagttttgacctccaccgccactacaccgaccgtgatcagcagtcgcgctaccccgtccagctcgccgggtactgccaccgccctcccagctttaagatcaaccgctacaacaccgacagcaaccagcgttacagccattccatcatccagtcttggcactgcctggacccgactgtcccaaacaaccacacccaccgccaccatgagtaccgccacacccagctcaaccccggagacagtccacaccagcaccgtattaaccaccacaacaacaacaacccgggcgacaggctccgttgctactccttctagtacacctggaacagcacatactaccaaggtgcctacgaccaccaccactggttttaccgcaaccccaagctcctcccccggcactgcgcttacaccccccgtttggatatctacaactacaacccctaccacgagagggagtactgttactccatcatcaatccccgggacaacgcacacggcgacagtgctaactactacaactactaccgtggccaccgggtcaatggccacaccctcatcctccacacagacaagcggcacgcccccgtccctgacgaccaccgctacgactatcacagcaacagggtctacaactaatccgagctcaacccccgggaccactcctattccacctgtactgacaacaaccgctaccacaccagctgcgaccagcagcaccgtcactccttccagcgctttgggcaccacgcacacccctccagtgcccaacactacagccacaacacatgggcggtcactgccacccagctcaccccataccgtgaggaccgcatggacatccgctacgagtggaattctggggaccacacacataacagagcctagcaccgttacctcccacacgcccgccgccacaacaagtacgacccaacacagcacccccgctctgagttcccctcatccgagctcaagaacaaccgagtcaccaccatccccaggtaccacaacccccggtcacaccagaggtacatcgcgaactacagcaacagccacaccatccaagacccgcacttccaccctgctaccatcctcaccgacgtcggctcccattacgaccgtagttaccacaggctgtgaaccacagtgcgcatggtcagaatggttggattattcttatccaatgcccggcccatcgggcggagactttgacacctattctaacatccgggcggctggtggagctgtgtgtgagcaacccttgggactggaatgtcgggcacaggcacagcccggtgtgcccttgcgcgaactgggccaagtggtcgagtgctccctggacttcggattagtgtgccgtaaccgcgaacaggtgggaaagtttaagatgtgttttaactacgagatcagagtcttctgttgcaattacggacattgcccgtctacccctgctacttcttcaaccgccaccccctcctctacacctggcacaacctggatcttgaccaagttaaccactaccgctacgacaaccgaatccaccggatcaacagcgacaccttcctctaccccgggcaccacatggatactgaccgaacctagcaccacagccacagtgactgtgccaacggggagcaccgctacagccagcagtacccaagcaactgctgggacccctcatgtgtctacaaccgcaactactccaacagtgacttctagcaaggccacacccttcagcagtccaggcacagcaaccgcactgcctgcactgcgttccaccgccacaaccccaacagccaccagcttcacagcaattccttcgagtagcttggggacaacatggacccgcctgtcccagaccactacaccgacggccaccatgtccaccgccactccttctagcactcctgagacggcacacacgagcacagtgcttacaaccacagctacaactaccagggctaccggcagtgtggcaactccctcttctacccctggtaccgcacacacaacgaaagtacctaccacaaccactacaggcttcaccgtaacgccatcctcatcaccaggcaccgctagaacgcctcctgtctggatctccaccaccactacacccacaaccagcgggagcactgtcacacccagctcagtccctggaactacccacacccctaccgtattgacaaccaccacaactacggtcgcaacaggttctatggcaactccatccagcagcactcagacaagtggaactccaccgtcattgattacgaccgccacgacaatcaccgcaactgggtccacaaccaatcccagctcaaccccaggtaccacaccaatccccccggtgcttacaaccaccgcaaccactccagccgccacctccagcactgtgacaccatcttctgcgcttggaacaacacacacacccccagtgccaaataccactgccacaacccatggtcgatccctgtcccctagctcccctcacactgttaggacagcatggaccagcgccactagtgggaccctgggtacaactcacatcacggaacccagcacaggcacatcgcacacacccgctgccaccacagggaccacccaacattctacacctgccctctccagtcctcatccctcctctcgcaccaccgagtcccctccatcaccagggaccacgacacccgggcatactaccgccaccagtaggacaaccgctacagcaacacctagtaagactagaacatcgaccctgctgccaagttccccaactagcgcacctataacaaccgtggtgaccacagggtgcgagccccaatgtgcctggagcgagtggctggactactcgtacccgatgccaggcccttctggcggagatttcgacacatattccaatataagggccgccggaggcgccgtctgcgaacagcccctggggctggagtgccgagcccaggcccagccgggcgtcccactcggtgagctgggtcaggttgtcgaatgcagtctggatttcggtctggtgtgtcgaaaccgcgaacaggtgggaaaatttaaaatgtgtttcaactacgaaattcgggttttctgctgtaattacggacactgtcctagcactcctgccacttccagcaccgctatgccctctagcactcctggtaccacctggattctgaccgagttaacaactacagccaccaccacagccagtaccggatcaaccgccactcccagcagcaccccgggaaccgccccgcctccaaaagtgttaaccagtcccgccaccactccaaccgctacctctagcaaagccaccagcagttcctctcctaggaccgccaccacattaccggtgcttactagcaccgctaccaaatccacggccaccagtgtgacccccattccatcatcaaccctcggaactaccggcaccctgcccgaacaaaccacgactcccgtagcaacaatgtctacgatccatccctcctcaacaccggagaccacacatacgtctacagtgctaactactaaggcaacaaccactcgcgctacatcttccacatccacccctagttcaacaccaggaaccacctggattttgacagaattgacaacagccgccacaacaaccgcggcaaccggccctaccgctactccatcaagtacccccgggacaacttggatacttacagagctgactaccactgccacgactaccgctagcacaggctctaccgccactccgtcaagcacgccaggcacaacttggattctgactgagccctcgaccacagccaccgtgactgtcccaacaggatccactgcaaccgcctcatccacacaggccactgccggcacaccccatgtctctactactgccactactcctaccgtgacatcaagcaaagccaccccatcaagctcaccgggtactgcaaccgcactgcccgctctccgatctaccgccaccacccccactgcaacctccttcactgcaatcccttcctcttcccttggaactacctggaccaggctgagtcagactaccacaccaaccgccaccatgagcacggcaacacccagctcgacccccgaaactgtccatacaagcacagttcttacggccacagctactacaacaggtgcgactggctctgtggcaactccctcgtctacaccagggactgcccacactactaaggtgcctaccactacaacgactggttttactgcaacgccttccagttcaccgggtaccgccctcaccccaccggtatggatttcaaccacaacaacaccgacaaccacgacacccaccacatctggcagcaccgtaacaccatccagcatcccaggaactacccataccgcaagggtactgaccaccaccaccacaaccgtcgcgacaggcagcatggcaacccctagctcctccacacagacttcaggaacgccaccgtcactgaccactaccgcaacgaccatcactgccactggcagcaccacaaacccatcttctacccccggaaccacaccgattacccctgtgttaacaagtactgcaactacaccagctgcaacgtcctctaaagcaacttcatcttcctctcctagaactgccaccacactgcccgtgctgacctctacagcaaccaagtctacagctacctccttcacccctatcccctcctctaccctgtggacgacttggacagtccctgctcagactaccaccccaatgtctactatgtctactatccacacttcttccaccccagaaaccacacacacaagtactgttctgacaaccactgctacaatgacccgggcaactaactcaactgcaactccaagtagcaccctgggcaccacacggattctcaccgagttgacaacgacagccactactacagcagcaaccggatctacagccacactctctagtacgcccgggaccacctggattctgaccgaaccgagtacaatcgcgaccgtgatggtgccgaccggatctactgctacagccagttctacactcggaacagcacacacccctaaagtggttaccactatggccacgatgcccaccgctacggcatcgaccgtaccctcctccagcacggttgggaccacccgcacgcctgccgttctgccttcaagcctccccaccttctctgtcagcacagtgagttcaagcgtgctgacaacactgagacctactgggtttccctcatcacacttttccacaccctgtttttgccgggcattcggacaatttttttctcccggggaggtgatctacaataagacggatagagctggctgtcatttctacgcagtttgcaaccagcattgcgacatcgaccggtttcagggcgcctgcccaactagcccaccgcctgtgagctcagctccccttagcagtcctagcccggcccctggatgcgataacgccattcccctgcgccaggtcaatgagacatggactttagagaattgcacagtggccaggtgcgtaggagataatagagtggtgcttttggacccaaagcctgtcgcaaacgttacgtgtgtgaataaacacctcccaatcaaagtctcagatccatcccagccttgtgactttcattatgagtgcgaatgcatttgtagcatgtggggtgggagccattattcaacctttgatgggacttcttacacctttcgcggaaactgcacatacgtattgatgagagagatacacgcacgttttggcaacctgtccttgtatttagataaccattactgcacagcctccgcaaccgcagctgccgcccgatgcccgagagcactgtccattcattacaagtctatggacatcgtacttaccgttaccatggtgcatggcaaggaggaggggctaatcttgttcgatcaaatcccagtgtcctcaggattttccaagaacggcgtcctggtgtcagtgttgggcactactacaatgagagtcgatatccctgcactcggcgtttcggtgacctttaatggccaggtgtttcaggctagactgccctatagtctgttccataacaacaccgaagggcagtgcggtacctgcaccaacaatcagagagatgattgtctccagcgggacggaaccacggctgcttcctgcaaggacatggctaagacctggctggtgcctgacagccggaaagacggatgctgggctcctaccggtacacctcctacggcctcaccagccgccccggttagctcaaccccaacccccacaccctgtcctcctcaacctctttgcgacctgatgctgtctcaggtatttgccgagtgccacaatctagtgcctccgggtccttttttcaacgcctgcatatcggaccactgtcgtgggcgtcttgaggttccctgtcagtcactcgaagcctatgccgagctgtgtcgggccaggggcgtctgcagcgactggcggggggctactggcggcctttgtgacctgacttgcccacccacaaaagtgtacaaaccatgtggccccatacagcctgcaacgtgcaacagtaggaatcagagcccacaactggagggaatggccgaaggttgcttctgccctgaggatcagattctcttcaatgcgcacatgggcatttgtgtgcaagcttgtccctgcgtcgggcctgatgggtttcccaaatttcctggagagaggtgggtctccaattgtcagtcatgtgtttgtgacgaggggagcgtctcagtacagtgcaagccccttccatgcgatgcccaagggcagcccccaccctgcaaccgcccaggcttcgttacggtcactagaccaagagccgagaacccttgttgccctgaaacagtatgtgtgtgtaacaccaccacgtgccctcagtcgctgccggtttgccccccggggcaagagtccatttgcacccaggaagaaggcgactgttgtcccacattccgctgcaggcctcaactctgtagctacaacggcaccttctacggggtgggagccacgtttccaggagctcttccctgccatatgtgcacctgtctgagcggggatacacaggatcccactgtacagtgtcaagaagatgcctgcaataataccacttgtccccagggattcgaatacaaaagggttgctggacagtgctgcggcgaatgcgtacaaaccgcgtgtctcactcctgacggccagccagtgcaattaaacgaaacttgggtaaacagccacgttgataactgcacggtttacctgtgcgaggcagagggaggcgtacacctcctgacaccccagccagctagctgcccagacgttagctcatgccgtggttctttgcgcaagacaggctgttgttatagctgtgaagaggattcctgtcaggtgcgcatcaatacaacaatcctgtggcaccaaggctgtgaaaccgaggtgaacattactttttgcgagggcagttgccctggagcttctaagtactctgctgaagcccaggccatgcagcaccaatgcacctgttgtcaagagcgacgggtgcacgaggaaactgtacccctgcattgccccaatggctcggccatactccatacatacacccacgttgatgagtgtggttgtacccccttttgtgtgccagcgcccatggcacctccacacacacgcggcttccccgcccaggaggctacagcggtctag

SEQ ID NO: 248354 - RNA, 1611 nt, synthetic construct
  misc_feature 1..1611: note = Description of Artificial Sequence: Synthetic coding sequence
  source 1..1611: mol_type = other RNA
gtcttctgttgcaactatggtcactgccctcccaggccccctgcactcaggccttgccccccacccttgcgcgggagaccggggagcactgagctgactaccactgccacaaccaccgccagcacaggctcaacagcgacaccttcatcaacgcccggcacagccccccctcccaaggttctgacaagcccagctaccacacctacagctacgagttccaaagcaacaagtagcagctctcctaggaccgcaactaccctgcctgtgctgacttctaccgcaaccaagtcaacagccaccagtgtgactcccatcccttccagtaccctcggaactactggaacactaccagaacagaccactacaccagtagctaccatgagcaccatccacccttcttctactccagaaactacgcacacctctacggtcctgacaaccaaggcaacgacaactagagctacatcatcaactagtacccctagttctaccccagggactacgtggatcctgacagaattaacaacagcagccactacaaccgcagccactggccccacagcaaccccatcgtctactcccgggaccacatggatcctgaccgaattgactacaactgctactacaacagcctccactggctctaccgctacccccagttctacacctgggaccacctggatactgactgagcctagcactactgccaccgttactgtgcctactggtagcactgccaccgcgtcatcaacgcaggccacagctggtaccccccatgtctcaacgaccgctacaacacccaccgtaacttcttcaaaggccactccctcctcctcgccaggcacagccactgccctgcctgccctcagaagcactgctacaacccatagttaccaactgtatagccacccccttctgctcccgaccacatggacccgtctttctcaaacaaccactcctacagcaactatgtcaacagccacaccttccagcacgcccgagaccgttcacacatcaacggttctgactgccacggcgactaccacgggtcccgcactatggcccccccctccgccgcctcaggaacagttgacacttcccaaatgccggctgccccagcccaggcattctcaccccctcctgcagccacgtgacggaactcacgcatcatccgttgaccagcacaaccatcatacacacaatcaccatacacacaatcagtggctacacggcgatcctttgctccacccaggcgaccacccccaccgccagtcggccgatcaccaccatcataactgcaccggtagtatggcaactccctcgagctcaacccagacctccggaacccccccttcattgactacaacggctacaaccattaccgcgacaggaagcaccacgaacccatcctcaactcctggaacgacccccatcactcccgtcctaacttcaacagcaaccacccccgcggctacctccagcaaagctacatcaagctccagtcccagaactgctacgaccctgcctgtgctgacttctacggccaccaagagcactgccactagttttacccctataccaagcccttgtggtccaaggggcccctcctag

SEQ ID NO: 248355 - RNA, 561 nt, synthetic construct
  misc_feature 1..561: note = Description of Artificial Sequence: Synthetic coding sequence
  source 1..561: mol_type = other RNA
tcctccactccgggcaccacttggatacttactgaaccctctacaacagccacagtaacagtacctactggatcgaccgctaccgcatcttctacccaagccaccgcaggaacgccacatgtatcaacgacagcaacaacccccactgttacttctagtaaggccacacctttcagctcacctggaacggccacagccctgccagcacttcggtcgactgcgaccacacctactgctaccagtttcactgcaatcccaagttcatgggcacctccaggccccgcataccaccgtcccccccatcccaggccaccttgtcctcagccccacccccctccactgcagcgcctaagtacaccaccccaatgtctgcccccaagacctccacggggccaccgcctgtgcggacatccactgttgcatcctcggaactcatcccactaccagtcagcagactaccataatcacttcacagcgaccccatcttccagtcctggcacagcacgtaccctccctgtctggatcagcaccaccacaacccccacaacccgcggttcctag

SEQ ID NO: 248356 - RNA, 960 nt, synthetic construct
  misc_feature 1..960: note = Description of Artificial Sequence: Synthetic coding sequence
  source 1..960: mol_type = other RNA
acaaaagcgacaacaactcgggccacctcaagcatgtctacacctagcagcactcctgggaccacctggattctgactgaactcactaccgccgctacaacaaccgctgctactccacacggccatccagtactccatccacgggatcacctcgacccgcacagagcccagcattacacagtgaccgttcctacaggatctacagccactgcttctagcacacgtgcaaccgcgggtacactgaaagttctcacctcacaccatacacattcacatcagctgcagagccactccctcttgcaatccagggactgtaaccgacccagctccaccgagaagcactcccaccacacccatagctaccagcgatactctcaccccctgttcctccctaccgcatggacccgtctgagccaaaccaccaccccgacagctactatgtctacagccacacccagttccacaccagaaaccgtgcatacctccactgtgcttactacgaccaccactactactcgtgctacactgtggccccctccaccgcccccgcaagaacagctcaccctcccgaagtgtagacttccccagccgcgccacagccaccccctgctgcaaccaagggacggcacccatgcatcatccgtggaccaacataaccatcatactcacaaccaaagattacacggagaccccctgctacatccgactacacacactgccacagtcctcacgacaaccaccacaacacctctagttctgtggcaacaccccccacttgctcacagaccagttgttccccccagcctcaccaccaccgccacaaccattacagctaccggcagcactaccaacccttcttccacacctgggacaacccctattcccccggtcctaacaaccaccgctcatacgtgcagtcaccaacagcacagcgattccctgctttgtcctcgggattag

SEQ ID NO: 248357 - RNA, 2007 nt, synthetic construct
  misc_feature 1..2007: note = Description of Artificial Sequence: Synthetic coding sequence
  source 1..2007: mol_type = other RNA
atgcgtgaaattcacgcgcgtttcggaaatctctccctgtaccttgataaccactactgcactgcgtccgcaacagccgctgctgcacgatgtcccagggctctgtcaatacattacaagtccatggatatcgtcctgaccgttaccatggttcatggcaaggaggaggggctgatcttatttgaccagatccctgtctcaagtggcttttccaagaacggggtgctagtgagtgtgctcggcacgactactatgagagtcgacatccccgctcttggcgtgtccgtaaccttcaatggccaggtgttccaagcccggttgccttattctttgttccacaataacacagagggtcagtgcggcacatgcactaataatcagcgtgacgattgcctccaacgcgacggtactactgcagcctcctgtaaagacatggctaagacgtggctggttccggattcccgaaaggacggttgctgggcccctactggaactccacctactgcatccccggccgcacccgtgtcatccacacccacacctaccccttgccctccacagccgctgtgcgacctgatgttgagccaggtcttcgctgaatgccacaatctcgttccccctggcccattcttcaacgcatgtatctccgaccattgtcggggcagattagaagtgccatgtcagagcctcgaggcctacgccgaactctgtagggcaagaggggtttgcagtgactggaggggcgcaaccggcgggctgtgtgatctgacctgtccccccaccaaagtctacaaaccatgtgggccgatccagccagcaacttgcaactcaaggaaccagagtcctcagctggaaggcatggccgaggggtgcttctgccccgaagatcagatcctgttcaacgcccatatggggatatgcgttcaagcatgcccgtgcgtcggacccgacggcttccccaagtttcccggggagcggtgggtatccaactgtcagtcctgcgtttgcgacgagggctcagtatccgttcagtgcaaacctctcccatgtgacgcacagggccaaccaccaccctgcaaccgacctgggttcgttaccgtgactagaccaagagccgagaatccttgttgccccgagaccgtgtgtgtgtgtaatacaacaacttgtcctcaatccttgccagtttgtccccccggccaagaaagcatttgcacacaggaagaaggtgactgctgccctaccttccgttgccgccctcagttatgttcctataatgggaccttttacggggtgggcgctaccttccctggcgcgctgccctgccatatgtgtacttgtctgagcggagacacacaagatccaactgtgcagtgtcaagaggacgcatgtaataacactacgtgtccacagggctttgaatataagcgggtggcaggacagtgttgcggcgaatgcgttcaaactgcttgcttaacaccagacggccagccagtccagcttaacgaaacatgggtgaactctcacgttgacaactgcaccgtgtacctctgtgaggcagagggcggcgtccatctgctgacccctcaaccagcatcatgtcctgacgttagctcctgccggggttcattacggaaaacgggttgctgttattcctgcgaggaggattcctgtcaagttcgaatcaacactacaatcctttggcaccagggctgtgagactgaggtgaatatcacgttctgtgagggctcctgtccaggcgcctcaaagtatagcgcggaggcacaagctatgcaacaccagtgcacatgttgtcaagagaggcgcgtacatgaagagaccgtacccctgcactgccccaatgggtcggcaattcttcatacttatactcatgttgacgaatgcggatgtaccccattctgcgtaccagcgccgatgagtccccccgcttgcgtctggcatcccgccctgagagcacccgccgcccacctcgggttagccccgccctag

SEQ ID NO: 248358 - RNA, 441 nt, synthetic construct
  misc_feature 1..441: note = Description of Artificial Sequence: Synthetic coding sequence
  source 1..441: mol_type = other RNA
atgacgatgagatccctgctgaggacaccttttttgtgtgggctcctttgggctttttgtgcacctggtgctcgcgccgaagagccagcggcatcctttagccagcctggcagtatgggtctggataaaaacacagtgcatgaccaagaacacattatggaacacttagagggggtcatcaacaagcccgaggcagagatgtcaccccaagagctgcaactgcattattttaagatgcacgattatgacgggaataatcttctagatggtttagagctttcaacagcaataacacacgtacataaagaagagggatctgaacaagcccccctcatgtcagaagacgagcttatcaacatcatcgacggtgtgcttagagacgatgacaagaacaatgatggctatattgactacgccgaattcgccaagagcctccagtag

SEQ ID NO: 248359 - RNA, 441 nt, synthetic construct
  misc_feature 1..441: note = Description of Artificial Sequence: Synthetic coding sequence
  source 1..441: mol_type = other RNA
atgaccatgcgatctctcctccgaacacccttcctatgcgggcttttgtgggccttctgcgcgccaggtgcacgtgcagaagagccagcggcctcgtttagtcaacctggatcaatgggcctggacaaaaatactgtgcacgatcaggaacacataatggaacacctcgagggcgtcatcaacaagcctgaagccgagatgtcaccacaagaacttcagctgcactacttcaaaatgcacgactacgacggcaacaacctgttagacggtctggaactgtcaacagccatcacacacgttcacaaggaggaagggagtgagcaggccccccttatgtccgaagacgaattgattaacatcatcgacggcgttctcagggacgatgataagaacaatgacgggtacatcgactatgccgagtttgccaaatcccttcaatag

SEQ ID NO: 248360 - RNA, 285 nt, synthetic construct
  misc_feature 1..285: note = Description of Artificial Sequence: Synthetic coding sequence
  source 1..285: mol_type = other RNA
atggagcacctggaaggagtgatcaataagccggaagctgagatgtcgcctcaagaacttcaattacattacttcaaaatgcacgactacgatggcaacaaccttctcgacggattagagctgagtacggctatcacccacgtccataaagaagaaggcagcgaacaagcaccgcttatgtcagaggacgaacttattaatattatagatggcgtgctaagggacgacgataaaaataacgatggttatattgactacgccgagtttgccaagtcattgcagtag

SEQ ID NO: 248361 - RNA, 441 nt, synthetic construct
  misc_feature 1..441: note = Description of Artificial Sequence: Synthetic coding sequence
  source 1..441: mol_type = other RNA
atgacaatgcgatctctgctacgaacccctttcttgtgcggcctgttatgggcattttgcgctcctggcgctagggcagaggaacccgcagcttctttctctcaacccggatccatggggctggataagaataccgtacatgaccaggagcacataatggaacacctcgagggcgtgattaacaagccagaggctgaaatgtctccccaagaattgcagctgcattactttaaaatgcatgactatgacggaaataacctcctagatggactggagctcagcaccgcaatcacgcacgtgcacaaggaggaaggatccgaacaagcaccattgatgagcgaagatgaactgattaatatcatagacggtgtcctccgggacgacgataagaacaacgacggatatattgactacgccgaattcgcgaaaagcctgcagtag

SEQ ID NO: 248362 - RNA, 441 nt, synthetic construct
  misc_feature 1..441: note = Description of Artificial Sequence: Synthetic coding sequence
  source 1..441: mol_type = other RNA
atgacgatgagaagtttgcttagaacacccttcttatgtggactgctttgggctttctgcgcccccggcgctcgcgctgaagaacctgcagctagtttctcccaacccggctcaatgggccttgacaaaaacactgtgcacgatcaggagcatattatggaacatctggagggcgtaatcaacaaacctgaagcggagatgtcaccacaagaacttcagttacattactttaagatgcacgattatgacggtaacaacctgttggatgggctcgaactctcaacagccatcacacacgtgcacaaggaagaaggctcggagcaggcccctttgatgagtgaagatgaacttataaacatcattgacggcgtgttgcgggatgacgacaaaaacaatgacggttatatagactatgctgaattcgctaaatctctccagtag

SEQ ID NO: 248363 - RNA, 285 nt, synthetic construct
  misc_feature 1..285: note = Description of Artificial Sequence: Synthetic coding sequence
  source 1..285: mol_type = other RNA
atggaacatttggagggtgtgatcaacaaacctgaagcagaaatgtccccacaagaactgcagctacattactttaaaatgcacgactatgatggcaacaacttgttggatggtttagaactgagcaccgcgattactcacgtccacaaagaggagggttccgagcaggcaccactcatgagtgaagacgaattaattaatatcatcgacggggtcttgagggacgacgacaagaataatgatggctatattgactatgcagaatttgcaaagagcctgcaatag

SEQ ID NO: 248364 - RNA, 285 nt, synthetic construct
  misc_feature 1..285: note = Description of Artificial Sequence: Synthetic coding sequence
  source 1..285: mol_type = other RNA
atggaacacctggagggtgtaataaacaaaccagaggccgaaatgagcccacaggagttgcagcttcactatttcaagatgcacgattacgatgggaataacctgcttgacggtttagaactgtctaccgcaatcacccacgtacataaggaggaaggctctgaacaagcaccactgatgtccgaggacgaactgataaacataatcgacggtgtattgagggatgacgataaaaataacgatgggtacattgactatgctgagttcgcaaagtcgctacagtag

SEQ ID NO: 248365 - RNA, 441 nt, synthetic construct
  misc_feature 1..441: note = Description of Artificial Sequence: Synthetic coding sequence
  source 1..441: mol_type = other RNA
atgacgatgaggtctctgcttcgcacacccttcctttgtggcttactctgggccttctgtgcaccaggagcacgcgctgaggagcctgctgccagcttttcacaacccgggagtatggggctcgataaaaacacagtccacgaccaagaacacattatggagcaccttgagggcgtaatcaacaaacctgaggctgaaatgagtcctcaagaactgcagcttcattattttaagatgcatgactatgacggcaataaccttctcgatggcctcgaactgtctactgcaatcacccacgttcataaagaggagggaagcgagcaggcacctctgatgagtgaagatgaattaattaacataattgacggcgtacttcgagatgatgataaaaacaacgatggctacatagactacgctgagtttgctaagtccttgcagtag

SEQ ID NO: 248366 - RNA, 441 nt, synthetic construct
  misc_feature 1..441: note = Description of Artificial Sequence: Synthetic coding sequence
  source 1..441: mol_type = other RNA
atgacaatgagatccttgctaaggacacccttcctctgcggtttgctttgggccttttgtgctccaggcgcccgggccgaagaacctgccgcaagtttctctcagcccggctctatgggactagacaaaaatactgttcatgatcaggaacacatcatggaacatttggagggcgtgataaataaaccggaagctgaaatgtccccccaggagctccagttacactactttaagatgcacgattacgatggaaataatctgcttgatgggctcgaattatccacagcaatcacccacgtgcataaagaagaaggttcagaacaagcaccattgatgagtgaggacgaactgatcaacatcattgacggcgtacttagggatgatgataagaataacgatggctacatagattatgccgaattcgccaagagcctacaatag

SEQ ID NO: 248367 - RNA, 186 nt, synthetic construct
  misc_feature 1..186: note = Description of Artificial Sequence: Synthetic coding sequence
  source 1..186: mol_type = other RNA
atgacaatgagatccctattgcgaacccccttcctctgcggccttttgtgggcattctgcgcgccaggagccagagccgaagaaccagcagcgagcttctcccaacctggctccatgggacttgacaagaatactgtgcatgaccaagagcacattatggagcatctggagggcgtgatcaattag

SEQ ID NO: 248368 - RNA, 384 nt, synthetic construct
  misc_feature 1..384: note = Description of Artificial Sequence: Synthetic coding sequence
  source 1..384: mol_type = other RNA
atgctttctgtatgttcctgccggaccagtagcggaatgagatcacaatggcctagtgctcgccaacgctcgagcagtttaagcacattcagacacataatggaacacctggagggtgttatcaacaagcctgaggcggaaatgagcccccaggaacttcagttacactattttaaaatgcacgattacgatggaaataacttacttgacggtttggagctctcaactgcaattacacatgtccacaaagaagagggatcggagcaggccccccttatgtctgaggatgaactcattaacatcattgacggagtgcttcgagacgacgataagaacaatgacggctacattgactacgctgaattcgcaaagtctctgcaatag

SEQ ID NO: 248369 - RNA, 1515 nt, synthetic construct
  misc_feature 1..1515: note = Description of Artificial Sequence: Synthetic coding sequence
  source 1..1515: mol_type = other RNA
atgcggttcttctgcgcccggtgctgctcatttggccctgaaatgcccgcagtacagctcttgctgctcgcatgcctcgtgtgggacgtgggtgcaagaacagcccaactacgtaaagccaacgaccagagcgggcgatgtcaatataccttttctgttgctagtcccaatgaatcatcctgccctgagcagtcccaggctatgtccgtgatccacaatctccaacgggacagtagtacacagcgtctggacttggaagccacaaaagcgagactgtccagcctagagagcctgctgcatcaactcactctggatcaggcagctagaccccaagaaacccaggaagggctgcagcgggagcttgggaccctccggagagagcgagaccagctggagacacagactcgcgagcttgagaccgcctacagcaacctgttgagagataaatcagtacttgaggaggagaagaagaggttgcgccaagaaaatgaaaacctggcacgcaggttggagagctcttctcaggaggtagcccggctcagacgcggccaatgcccccaaaccagggataccgcaagagctgtgcctccaggatctagggaagtgtcgacgtggaatttggatacgctggctttccaggagctgaagtcagaacttacagaagtgcccgcaagccgaatccttaaggaatcgccttcgggttacttacgctctggcgagggcgacactggctgtggggaacttgtgtgggtgggtgagccattgactctgcggaccgctgagaccattacaggcaaatatggtgtctggatgagagacccaaaacctacctacccttacacacaggaaacaacttggcgaatagacactgttggcaccgacgtcagacaggtgttcgaatacgacctcatcagccagttcatgcagggttatccaagcaaggtgcatatactgccaagaccactcgaatcaacaggagcggtcgtgtatagtggtagtctctactttcaaggtgctgagagccggaccgtgatccgctatgagttgaacacagaaaccgtgaaggccgagaaagaaatccctggagccggatatcatggtcagttcccatattcctgggggggttacaccgatattgacttagctgtggacgaagccggcctgtgggttatttactcaaccgatgaggctaaaggcgctatagtgctgtctaaactgaacccggaaaacctagagctcgaacagacttgggaaacaaacatccgtaagcaaagcgtggcaaatgcgtttataatttgcggaactctgtacaccgtatcaagttatacctccgccgacgcaaccgtgaattttgcttacgacaccggcactgggataagtaagaccttgaccatcccattcaagaacaggtacaagtactccagcatgatcgactacaaccccctcgaaaaaaaactgtttgcatgggacaacctgaacatggtgacgtatgatataaaactctccaagatgtag

SEQ ID NO: 248370 - RNA, 1107 nt, synthetic construct
  misc_feature 1..1107: note = Description of Artificial Sequence: Synthetic coding sequence
  source 1..1107: mol_type = other RNA
atgggaaggaaaaaaatccagatatcgcgtatccttgatcaacgtaatcgacaagtgacctttacgaaaaggaaatttggtctgatgaagaaagcctacgaattgagcgtattgtgcgactgcgaaatcgccctgatcatcttcaattcggccaatcggcttttccagtacgcgtcaacagatatggacagggtgctgctgaagtacaccgaatattcagagccccacgagtcacggaccaataccgacatccttgagaccttgaagagacgcggaataggccttgatggacccgaattagaacccgacgagggtcctgaggagcctggggagaagtttcgtcgtctggccggcgagggaggagaccctgccctgcctcgacccaggttgtacccagccgcccccgctatgcctagtccagatgtcgtgtatggggccctcccaccccccgggtgtgaccccagtggactaggcgaagccctgccagcccagtcgcgccccagcccatttagacccgccgcacctaaggcaggcccccccggacttgtgcaccctctgttctcccccagccatctgactagcaaaacccccccccccctttaccttccaactgagggacgtagatccgaccttccagggggcctcgctggcccgcgaggcggcctcaacacttctcgaagtctctattcaggcttgcaaaacccctgctctaccgcaaccccgggacctcccctcggaagcttcccttttctgcccggcggacccccagagtacggactaggcgacccccccccgcctcccggcttgctgcagcctcccacgctggcaccttggcagccttcgaggggagatgggccccctgctgtgtctagccaacctagcggtggcagaagcctgggagaggagggtccacctacccgtggagccagtccccctaccccacccgtatccatcaagagcgagagactgagcccagcaccaggtggcccaggcgacttccctaaaacgttcccatatcccctcctccttgctaggtccttagcggaaccactgaggcccggccctgccctcagacggctgcctctggccgacggctggccaagatag

SEQ ID NO: 248371 - RNA, 3477 nt, synthetic construct
  misc_feature 1..3477: note = Description of Artificial Sequence: Synthetic coding sequence
  source 1..3477: mol_type = other RNA
atggccgccgtgcgaggagctccattgttatcctgtctgttggcactgctcgctctttgcccaggtggaagacctcagaccgtgctgaccgatgacgagatcgaggaatttctggaagggttcctgtcagaactagaacccgagcccagggaagatgatgttgaggcgccgccacctcccgaacctactccacgggtccggaaggcccaagcaggtggcaagcctgggaagcgtccagggactgccgctgaggtgcctcccgagaagactaaagacaagggaaaaaaaggcaagaaggacaagggcccgaaggtgcctaaggaaagcctggagggatcaccacgcccccccaagaagggcaaggagaaacccccgaaggctactaagaaacccaaagaaaaacctccgaaggccaccaaaaagccaaaagaaaaacctccaaaggccacaaagaaacccaaggaaaaaccccccaaagcaacaaaaaagcctcccagcgggaaaagaccacccatcttagcaccatccgagacccttgaatggcctctgcccccccccccatcccctggtcctgaagagctgcctcaagaggggggcgcacctcttagcaataactggcaaaaccccggcgaggagacccacgttgaggccagggaacatcaacccgaaccggaagaggaaactgagcagccaacactcgactacaatgatcagatcgagcgcgaggattatgaggacttcgaatacatccgtcgacagaaacagccccgccccccaccaagcagacgtcgccgtcctgaaagagtctggcccgaacctcctgaggagaaagcaccagcacccgcccccgaagagaggattgagccaccagttaaacccttgctgccccccctgccacccgactacggagacggttacgtcattccgaactatgatgatatggactactactttggtcctccaccaccacagaaaccggacgcagaaaggcaaactgatgaagagaaagaggagcttaaaaagcccaaaaaggaggactcaagccctaaggaagagactgacaagtgggccgtcgaaaagggaaaggatcacaaggaacctcgcaagggcgaggagctggaagaggagtggacacccacagaaaaggtcaagtgtccacctatcggaatggaaagtcataggatcgaggacaaccagattagagcatcctcaatgctgagacatggtctgggagcccagcgtggacgcctgaacatgcagactggggcaacagaagacgactattacgacggcgcctggtgcgccgaagatgacgcacgaactcagtggatcgaggttgatacacgcagaacaaccagattcacgggtgtgatcacacagggcagagattctagtatccacgatgatttcgtgacaactttttttgttggattcagcaacgatagtcagacctgggtcatgtacacaaatggctatgaggaaatgacttttcacggaaatgttgacaaagatactccagtgctgtccgagttacccgaacctgtggttgcacgctttattaggatttacccacttacttggaatggttccttatgcatgcggctggaggtcctgggctgtagcgtggcccctgtgtatagttattatgctcagaatgaagtcgtggccactgacgacctggacttccgtcaccactcctacaaagatatgagacagcttatgaaagtggtaaacgaagaatgtcctactataactcgcacttattccttaggcaagtcctcacgaggcctgaaaatttatgccatggagatctccgataaccctggtgagcatgagcttggtgagcccgagtttcggtacactgctggaattcatggaaacgaggtgctgggccgcgagcttctcctattgctaatgcagtacctgtgcagggagtaccgggatggcaaccctagggtcaggagtctggtgcaggacacacgcatacacttggtaccaagcctgaacccagacggatatgaagtcgctgcccagatggggagtgaatttgggaactgggccctaggattgtggaccgaggaaggattcgatatctttgaggactttcccgatcttaactcagtgctttggggcgctgaagagcggaagtgggttccgtatcgagtgcccaacaataacctgcctatcccagagagatatttaagcccggatgcaactgtttccactgaagtgcgcgccatcatcgcgtggatggagaagaacccttttgtactgggcgcaaatctgaacggcggggagaggcttgtgtcgtacccatacgacatggcgagaactcccacgcaggagcagctgctggccgcagccatggccgccgcacggggagaggacgaggatgaggtgagcgaagcccaggagactcccgatcacgccatctttcggtggctggccatctccttcgcatccgcgcatcttactctcaccgagccttaccgcggcggatgtcaggcacaggactacactggtggcatggggatagtgaacggagccaagtggaatccacgtactggaactatcaatgatttttcttacctccacacaaattgtctggagttgtccttctacctaggctgcgacaagttcccccacgagagcgaactgccccgcgaatgggaaaacaataaggaagccctgcttactttcatggaacaggttcaccgtgggattaagggggtagttaccgatgagcagggcatacctatcgcaaatgcaactatctcggtatccggcataaaccatggtgtaaaaacagcctctgggggtgattactggagaatccttaatcctggcgaatacagggtgaccgcacatgctgagggttatactcctagcgctaaaacatgcaatgtcgactacgacattggagccactcagtgtaacttcatcctggctcgttcaaactggaagcggatacgagaaataatggctatgaacggaaatcggcccataccacatatcgacccctctcggcccatgaccccacagcagagacggcttcagcagcggcgtctccagcacagactaagactgcgggcccaaatgcggctcagaagattgaacgctacaaccacgttaggcccgcacacagtaccacctacactgccccctgcccctgccactacactcagcaccacgattgagccctggggcctgataccgcctacaactgctggctgggaggagtctgaaaccgaaacctacacggaagtggtgactgagtttggtacagaggtggagccggaattcggtacaaaggtggagccagagtttgaaacacagttagagcctgagttcgagacccaattggaacctgagtttgaggaggaagaggaagaagagaaggaggaggaaatcgccaccggtcaggcattccctttcactactgtcgagacttacactgtgaatttcggcgacttttag

SEQ ID NO: 248372 - RNA, 471 nt, synthetic construct
  misc_feature 1..471: note = Description of Artificial Sequence: Synthetic coding sequence
  source 1..471: mol_type = other RNA
atggcttccagagttctttcggcatatgttagtagacttcctgccgcattcgccccgctacccagagtgagaatgctcgctgtggctcggcccttatccacagctctgtgctcagccggaactcagactcgcctagggaccctgcagcccgcactcgtgctggcccaggtgccaggacgcgtgacacaactctgtaggcagtacagcgatatgccacccctgaccctggaaggaatccaagatcgcgtcctctatgtgcttaaactttacgataaaatcgatcctgagaagctttctgtaaactcccacttcatgaaagaccttggcctcgattctcttgaccaggtcgaaatcattatggctatggaggacgagttcggcttcgagatccccgacatcgatgctgagaaactgatgtgcccacaggagatcgtggactacattgctgataaaaaagacgtttatgaatag

SEQ ID NO: 248373 - RNA, 1707 nt, synthetic construct
  misc_feature 1..1707: note = Description of Artificial Sequence: Synthetic coding sequence
  source 1..1707: mol_type = other RNA
atgatgggctgctggatcctgaacgagggcctgtctacaattctggtccttagctggctgggtatcaatttctatttgtttatcgacacattctattggtacgaagaggaagaatcattccattatacacgggtgattcttggctcaactcttgcctgggctcgggcctctgctctctgcctcaatttcaactgcatgctgattctcattcccgtttctcgaaatctaatctcttttattaggggtacaagcatatgttgccgtgggccgtggcgcagacaactagacaaaaacttaagatttcataaactggttgcctatggcatcgcggtgaacgccacaatccacatcgtggcccacttttttaatcttgagcgctaccattggagccagagcgaagaggcacaaggcctccttgccgccctctccaaactgggcaacactcctaacgagtcctatcttaaccccgtgcgcaccttccctactaataccacaaccgagctgctgcggacgatcgccggcgtcaccgggctggtcatctcccttgccctcgtcttgattatgacttccagtaccgagttcattcgccaggcaagctacgagttgttctggtatactcaccatgtgttcatcgtattcttcctttctctggcaatacatggtaccggcaggatcgtgagggggcagacacaagatagcctgagcttgcacaatatcacattctgccgtgaccgatacgcagaatggcagactgtggcacagtgccccgtgcctcaattttcaggaaaggaaccctccgcctggaagtggatactgggacctgtcgtgctgtatgcctgtgagcggatcattagattttggagatttcagcaagaagtcgttataacgaaggtggtgagccacccatcgggagtcttagaactgcatatgaagaagcggggtttcaagatggccccaggacaatatattctggtccagtgtccagcaataagctccctggaatggcacccattcaccctgacaagcgctccccaggaagatttcttctccgtccatattagagccgccggagattggactgctgctctgcttgaggcttttggcgcagagggacaggcactgcaggagccttggagtttacctcgattagctgttgatggcccattcgggaccgcccttaccgacgttttccactatcccgtttgcgtgtgtgtggccgctggaatcggagtcacccccttcgcagccttgctcaaaagtatctggtacaagtgctcggaggcccagacccccctcaaactatcaaaagtctacttttattggatctgccgcgacgccagagcgttcgaatggttcgcagacctgctactgagcctcgagactaggatgagcgaacaaggtaagacccattttctctcttaccacatctttctgacaggatgggacgaaaaccaagcactccatattgctctgcattgggacgaaaatactgatgtcattacaggcttgaaacaaaagaccttctatggccgcccaaattggaacaatgaattcaaacagatagcctacaatcacccctcaagctcaattggtgtgtttttctgcggacctaaggccctgtctaggacgcttcagaagatgtgtcacctgtattccagcgccgacccaaggggggtgcacttctattataacaaagagtcgttttag

SEQ ID NO: 248374 - RNA, 2520 nt, synthetic construct
  misc_feature 1..2520: note = Description of Artificial Sequence: Synthetic coding sequence
  source 1..2520: mol_type = other RNA
atgtcaatccgaaggctgctgattctgatcctgaagatcggccgaaggtggactgagctgattagaacgatggaatccagagtactgcttcggaccttctgtttaatctttgggttgggcgcggtatggggccttggcgtggatccaagtctgcaaatagacgttctgaccgaactggaactgggggaatctaccactggggtgaggcaggtgccaggtctacacaacgggacgaaagctttcctattccaagatactccgcgaagcataaaagcgtcgacagccaccgctgaacagttcttccagaaacttcgcaacaaacacgaattcaccattctggtcaccctgaaacagacacacctgaattccggagtgatcctgtccattcaccatctcgatcaccggtacttggaactggaaagtagcggccatcgcaatgaggtgcgcctccactacagatcaggatctcacagaccacataccgaagtctttccctatattctagcagatgataagtggcataaattatcactggccatttccgctagccatctgattttgcacattgactgtaacaagatttatgagcgcgtagtcgagaagccatcaacagacttgccgctgggaacaaccttttggctgggacagcgcaataacgcccatggctattttaagggtattatgcaggacgtccagttgctggttatgcctcagggttttatcgcgcagtgcccagatctcaatagaacctgtccaacctgcaacgactttcatggtctggtgcagaagatcatggaactgcaagacattctggcaaagacatccgccaagctgtcccgcgctgagcagaggatgaaccgcctggaccaatgctactgtgaacgcacctgcacaatgaagggtacgacatacagagagttcgagagctggattgacggctgtaaaaattgcacatgtctgaacggcacaatccagtgcgagacattgatttgccctaatccggattgtcccctgaagagcgccttggcctacgtggatgggaaatgttgtaaagaatgcaagagcatttgtcaattccagggccgcacctatttcgagggggaaagaaatacagtgtactcttcttccggagtttgtgtcctctacgaatgtaaagatcagacaatgaagctcgtcgagagtagcggttgccccgcccttgattgcccagaatcacatcagattaccctgtcgcattcttgttgtaaagtgtgcaaaggctatgacttctgctccgaaaggcacaactgcatggaaaatagtatatgtagaaaccttaacgatcgggccgtgtgctcatgtcgagatggctttcgagccctccgcgaagacaatgcatattgtgaagacatcgatgaatgtgcggagggacgccactattgcagggaaaacaccatgtgtgtaaataccccgggatcttttatgtgtatatgcaagaccggctacataagaattgatgattactcctgcacagaacatgatgaatgtatcaccaaccagcacaactgtgatgaaaacgccctatgctttaacacagttggcggccataattgcgtctgcaaacccggatataccggtaacgggaccacttgtaaagctttctgtaaagatggttgcagaaatgggggagcttgtatcgctgcgaatgtgtgtgcttgcccacagggttttaccggaccgtcttgtgaaaccgacattgatgagtgctccgacgggtttgtgcagtgtgactcacgcgctaactgcattaacctgcccggctggtaccactgtgagtgtcgggacggctaccacgataacggaatgtttagcccaagtggggagagttgcgaggatattgatgagtgcgggactggccgccattcatgcgccaacgataccatctgctttaatctggatgggggctacgattgcaggtgtccacacggcaagaactgcacaggagactgcattcacgacggtaaagtgaagcataatggccaaatttgggtcttggagaatgatcgatgctcagtttgttcctgccaaaatggattcgtcatgtgtagacgtatggtttgcgactgtgaaaaccccactgtggatctcttttgttgtcctgagtgcgatccgcgtctctccagtcagtgtcttcaccagaacggagagaccctctacaatagcggagacacctgggttcagaactgccagcagtgtaggtgcctacagggtgaagtggactgctggccattaccctgtccagacgtggagtgcgaattctctatcctcccggaaaatgagtgctgtcctcgctgcgttacagatccctgtcaggcggataccatccgcaacgatatcactaaaacatgtctggacgagatgaatgttgtcaggttcacaggaagttcctggatcaaacacggaacggagtgtacactgtgccaatgcaaaaatggacacatttgctgttcggttgatccgcagtgcttgcaggaattgtag

SEQ ID NO: 248375 - RNA, 2448 nt, synthetic construct
  misc_feature 1..2448: note = Description of Artificial Sequence: Synthetic coding sequence
  source 1..2448: mol_type = other RNA
atggagaccgggctcggagcccctctattcaaagcctggctgctaattagcgtttggggcctcggagtcgatcctagcctgcagattgatgtactcaccgagcttgagctcggtgaaagtacaacaggggtgcggcaagtgccaggcctgcataatggtacgaaggccttcctgtttcaggacacacctcgttcaatcaaggcttccaccgcaaccgccgagcaattcttccaaaagcttagaaacaaacatgagttcaccatcctggtgacattgaaacagacacacctgaactcaggggtgatactcagcatacatcacttggatcatcgctatcttgaactagaatcctcaggacatcgtaacgaggtgcgcctgcactacagatcaggcagccacagaccgcacactgaggtgttcccctatatcctcgcagatgacaaatggcataagttgtccctggccatctccgcatcccacttgatactccacatagattgtaacaagatttacgagagagtcgtggagaaaccttccacagaccttcctttgggcacaacattctggttgggccagcgcaacaacgcacatggctacttcaaaggaatcatgcaggatgtccaactgttggttatgccccagggctttatcgcacaatgccccgacctgaaccgcacatgccccacctgcaacgattttcacggccttgtccagaaaattatggagttacaggacatcctggccaagacaagcgcaaaattaagccgcgccgaacagcggatgaaccggctggatcagtgttattgtgagagaacctgcacaatgaaaggaactacttaccgggaatttgagtcctggattgacggctgtaagaactgcacttgcctcaatggcaccattcagtgcgaaactctgatttgtccaaatccagattgccccctgaaaagcgcactcgcgtatgtggacggcaaatgctgcaaagagtgtaagtctatctgtcagtttcaggggagaacctactttgagggcgagcggaatacagtgtatagttcttccggcgtctgcgtcttgtacgagtgcaaagaccaaacaatgaagctcgtggagtcttctggctgcccagctctcgactgccccgagagccatcagattaccttgagccactcttgctgtaaggtgtgtaagggctacgacttctgttcggaaaggcacaattgtatggagaattcaatttgtagaaaccttaacgacagagcggtttgctcctgtagggacggctttagagcattgcgggaagataatgcttattgcgaagatattgacgaatgtgctgagggtcggcactactgccgggagaacacaatgtgtgtcaacacgcccgggtcttttatgtgcatatgcaaaaccggttatatccgcatcgacgactacagctgcaccgaacacgacgaatgtatcacgaaccaacacaactgcgatgagaatgccctctgcttcaatacagtcggcggccacaattgcgtatgcaaacccggttatacaggcaacggaactacgtgtaaggccttttgcaaagacggttgtcggaacgggggtgcctgtatcgccgccaacgtctgcgcctgcccccagggctttactggacctagctgcgaaactgacatcgacgagtgctcagacggcttcgtgcagtgtgatagtagggccaattgcatcaatctcccaggctggtaccactgtgagtgccgcgacggttaccatgacaatggaatgttctccccctctggagagagctgcgaggacatcgatgaatgcggtacaggcaggcattcctgtgcaaatgacaccatatgcttcaatctggatggaggctacgattgccgctgccctcacggcaaaaattgcactggggactgtattcacgacggaaaagtcaagcataacggtcagatatgggtgcttgaaaacgatcgatgctctgtctgttcatgccagaatggattcgtgatgtgtcggcgaatggtttgcgactgcgaaaaccccaccgtagacctattctgttgccctgagtgcgatccaaggttatcttctcagtgcctgcaccaaaacggcgagacactgtacaactctggagatacatgggttcaaaattgccagcagtgcagatgcttacagggtgaagtggattgctggcccctgccttgccccgatgtggaatgtgaattttcaattctgcctgaaaatgagtgctgtccccgttgtgttacagatccgtgtcaagctgacaccatcaggaacgacatcaccaaaacatgtctcgacgaaatgaacgtggtcaggtttaccggtagttcgtggataaaacacggaacagaatgcaccctctgtcagtgtaaaaatggacacatatgttgttcagtggatccccaatgccttcaggaactgtag

SEQ ID NO: 248376 - RNA, 2451 nt, synthetic construct
  misc_feature 1..2451: note = Description of Artificial Sequence: Synthetic coding sequence
  source 1..2451: mol_type = other RNA
atggaatctagggtcctacttcgcaccttttgcttaattttcggcctgggagccgtgtggggactgggagtggatccatcactacaaatcgacgtgttgactgaacttgaactcggtgaatccaccactggcgttaggcaggtccctggactgcataacggtaccaaagccttcctttttcaggatacaccgcgctcaatcaaagcttcgaccgccacagcagagcagtttttccagaagctccggaataagcacgaattcactattttagtcacccttaagcagacccacctcaactcaggtgtcattctctctatccatcacctggatcaccggtatctggaactcgagtcatccgggcaccggaacgaggtgcgcctacactaccgatccgggagccaccgccctcacacagaggtctttccttatattctggccgatgataagtggcataaactcagtctggccatctcagcctctcatttgatcctgcacattgactgcaacaaaatttacgaacgcgtagtggagaaacctagcacggatctgcctcttggaactacattctggttgggacagcgcaacaatgcacacgggtatttcaagggcattatgcaggacgtgcagctcctggtcatgcctcaggggtttatagcccagtgccctgatctgaatcgaacatgtcctacctgcaatgacttccatgggcttgtgcagaaaatcatggaacttcaggacatcctggccaaaactagcgccaaattatctcgggctgagcagaggatgaaccggttggatcagtgctactgcgagcgcacctgtactatgaaaggaacaacatatagagagttcgagagttggatcgatggatgcaagaactgcacctgcttgaacggtaccattcaatgcgagacacttatttgtcctaatccagactgtccccttaagtcagcattagcatacgtggacggcaagtgttgtaaggaatgtaaatcaatctgccagttccagggacgaacctactttgagggagaaagaaatacagtgtatagcagctcaggtgtttgcgtgctctacgagtgcaaggaccagacaatgaaactggtagaaagttcagggtgtccagctcttgattgcccggaatcccatcaaataaccctgtctcattcttgctgcaaggtgtgtaagggctacgacttttgttctgaacgccacaattgtatggaaaacagtatatgccgcaacttgaatgatcgcgcggtctgctcctgtcgcgacggctttcgtgccctgcgtgaggacaatgcatactgtgaggacatcgatgaatgcgcagaagggagacattactgcagggagaacactatgtgcgtcaatacacccgggagttttatgtgcatatgtaagaccggatacattcgcatcgacgattactcctgcaccgaacatgatgagtgtataacaaaccagcacaattgcgacgaaaatgccctgtgcttcaacactgtgggtggtcacaattgcgtgtgtaagcccggttacactggaaacggcacaacgtgcaaggccttttgcaaggacggatgcaggaacggtggggcatgtatcgcagccaatgtgtgcgcctgtccccagggtttcaccggtccatcatgtgagaccgacatcgatgaatgctccgatggattcgtgcaatgcgacagtcgggctaactgcataaacctgcccggctggtatcactgtgagtgtcgcgatggctaccatgacaacgggatgttcagcccatctggggaatcctgtgaagacattgatgagtgcgggactggaagacattcgtgtgccaacgacaccatctgcttcaacttggatgggggctacgattgtaggtgccctcatggaaagaactgcactggagattgtatccatgatggtaaggtcaagcacaatggacagatctgggtgctggaaaacgatagatgctcagtttgctcttgccagaacggcttcgtgatgtgcagaagaatggtgtgcgattgcgagaaccccactgtcgatctgttctgctgtcccgagtgtgaccctcgactaagcagtcagtgtttgcaccagaatggagagactctgtacaatagcggcgacacgtgggtccaaaactgtcaacagtgtcgctgtctgcagggtgaggttgattgttggccacttccctgccccgatgtggaatgtgagttttcaatcctgcccgagaatgagtgttgtcctcgctgcgtgaccgacccatgccaggccgacactatcaggaacgatattaccaaaacatgtctcgatgaaatgaatgtcgtgcggtttactggctccagttggataaaacacggtaccgaatgcacattgtgccaatgcaaaaacggtcacatatgctgctcagtcgaccctcagtgtttgcaggaattatag

SEQ ID NO: 248377 - RNA, 2601 nt, synthetic construct
  misc_feature 1..2601: note = Description of Artificial Sequence: Synthetic coding sequence
  source 1..2601: mol_type = other RNA
atggggttccctcctctgttaaagggacaggcctcagctacaagatcctctctagcctcttgcagttgggtggtcttttttctgtcttgcctgtcgagacacgcccccgaaattgagggggggcgccggtggactgaattgataaggactatggagtccagagtactgcttcgcactttttgtctgatcttcggactgggagccgtgtggggcttgggcgtggacccttctctccagattgacgttctcaccgaactggagctcggggagtccactacaggggtgagacaggtccctggcctgcacaacggaactaaggctttcctcttccaggacacacctcgatccattaaggccagcacagcaacagccgaacagttctttcagaagctacggaataaacatgaattcacgattttggtcacgttgaaacagacacacctgaatagcggtgtaattctcagcatccaccatctggaccacagatatttggaactggagagtagcggccaccgcaacgaggtacgattacactaccggagcggaagccacaggccacacacagaagtgtttccatatattcttgctgacgataagtggcacaagctgtctctcgcgatttctgctagccatctgattctccatatcgattgtaacaagatctatgagcgcgtggtcgagaagccatcaacagatctccctctgggaaccactttctggctcggtcaacgtaacaatgctcatggatactttaaaggcattatgcaggatgtgcaactgctggttatgccacagggtttcatcgcccaatgtccagacctcaaccggacctgcccaacttgcaacgacttccacgggctcgtccaaaaaataatggagctccaggatatcttagccaaaacaagcgccaagttgtcccgcgctgaacagcgtatgaatcggcttgatcaatgctactgtgaacgcacctgcactatgaaggggacgacttatcgcgaatttgaatcttggatagatggatgcaagaactgtacgtgcctgaacggaacaattcagtgcgagacactgatctgccctaacccagactgcccactgaaatccgccctggcttacgttgacggcaagtgctgcaaggaatgtaagtcaatctgtcagttccagggccggacatacttcgaaggagagagaaatactgtctattcttcttccggcgtgtgtgttctgtacgagtgcaaggatcaaacaatgaagctggtagaaagctccggatgtcccgctttggactgccccgagagccaccaaattaccctctcccattcctgttgtaaggtctgtaagggctatgacttctgtagtgagcgacacaactgtatggagaactcaatttgccgcaacctcaatgacagggcagtatgttcctgcagggatggttttcgcgccttaagggaagacaatgcttattgcgaggacatcgatgagtgcgctgaaggcagacactactgtagggagaacaccatgtgcgtgaataccccaggttcgttcatgtgcatttgtaagactgggtatattaggatcgatgattatagctgcacggaacatgatgaatgtatcacaaatcagcataattgtgacgagaacgccttatgctttaatacagtggggggacacaactgcgtctgtaagccgggatacaccggaaacggtaccacgtgtaaggctttctgtaaggatgggtgccgcaatggtggtgcttgcattgctgctaacgtttgcgcttgcccacaaggttttaccggaccttcatgcgaaacggatattgacgagtgctctgacgggtttgtgcaatgtgactctcgcgcaaattgcataaacttgccaggatggtaccattgtgagtgcagagacggataccatgataatgggatgttttccccctccggagaaagctgtgaagacatcgatgaatgtgggaccgggcgccattcatgtgcaaacgacactatttgcttcaacttagacgggggatatgattgccgatgccctcacgggaagaactgtactggtgattgcatccacgacgggaaggtcaagcataatgggcaaatttgggttctagaaaacgaccgatgttctgtttgttcatgccagaatggcttcgtcatgtgccgccggatggtatgcgattgtgagaaccctaccgttgatctgttctgttgtcccgagtgcgatcctaggctgtcctctcagtgtctccaccagaatggcgagacactatacaattccggtgacacatgggtccaaaactgccagcagtgtcggtgtctacagggagaagtagattgctggcctttgccatgcccagacgttgagtgcgaattttctatattgccagagaatgaatgttgtcccagatgtgtgaccgatccttgccaggctgacacgatacgcaatgacataacaaaaacatgcctagacgagatgaacgtagtccggttcactggatctagctggattaaacacggcacggaatgtaccctctgccagtgcaagaatggacatatatgttgcagcgtggatccacagtgtttgcaggagctttag

SEQ ID NO: 248378 - RNA, 2451 nt, synthetic construct
  misc_feature 1..2451: note = Description of Artificial Sequence: Synthetic coding sequence
  source 1..2451: mol_type = other RNA
atggaatctcgcgtcctgctaagaacattctgtttgatcttcggacttggtgcagtgtggggattgggtgtagacccctctctgcaaattgatgtcctcacagagctggagctgggggagagtacaaccggtgtcaggcaagtgccaggattgcacaacggtacgaaagcttttctttttcaggatacacccagaagcataaaggcctcgactgcgacagccgagcagttcttccaaaagctgaggaacaagcatgagttcacaattctggtgaccctcaagcagacgcacctgaacagtggcgtgatcctttcaatccatcacctcgaccaccgttacctcgagctggaaagttccgggcacagaaatgaggtgcgcctgcactatagaagcggcagtcatagaccacacaccgaagtcttcccgtatatcctggccgacgataaatggcataagttgtcactggcaatcagtgcttctcatctgattcttcacatcgactgcaataagatctacgaaagagtagtcgaaaaaccttctaccgatcttcctctcgggactactttctggttagggcagcgaaacaatgcacacggatattttaaaggcattatgcaggacgtgcagctcttggtcatgccacagggctttatcgcacaatgtcccgacctgaaccgtacgtgcccaacatgtaatgatttccacgggctcgtccagaaaataatggaactgcaggatatcttggccaagacctccgcaaaacttagccgtgctgagcagcgcatgaatagactggatcaatgctattgtgaacgcacttgcaccatgaagggaacaacctatcgcgagttcgaaagctggattgacgggtgtaaaaattgcacatgcttgaacgggacaattcagtgtgagaccctcatttgcccgaatccggactgtcctcttaagagcgcccttgcttacgtagatggaaaatgctgcaaagagtgcaagagtatatgtcagtttcaggggcgcacatattttgagggggagcgtaacactgtgtactcctcgtcaggcgtctgtgtcttgtacgaatgtaaggatcagacaatgaagctagtcgagtcgtctggatgtcccgcattagattgtcccgagtcacaccaaatcaccctctcacatagctgctgtaaggtgtgcaagggatatgatttctgtagtgaaaggcataattgcatggaaaactcaatctgtcgtaatctcaacgaccgcgccgtttgttcatgtcgtgatggattcagagccttgcgtgaagacaatgcgtactgcgaagatatcgacgagtgcgctgaaggcaggcactactgcagagagaatactatgtgcgtcaatacgcctgggagcttcatgtgcatttgtaagaccggctatatccgaattgacgattactcatgcaccgagcatgacgaatgcataacaaatcaacataattgtgatgaaaatgctctttgtttcaacactgttggaggtcacaactgtgtgtgtaaacccggatatactggaaatggtactacatgcaaagcattctgtaaagatggctgtcgtaatggcggggcctgtatcgccgccaatgtatgcgcctgcccacagggtttcacaggtccatcttgcgaaacggacatcgacgagtgttctgatggcttcgttcagtgcgactcgcgcgcaaactgtatcaacctcccaggctggtatcactgtgagtgccgagatggctatcatgataacggtatgttttcaccatccggagagtcttgtgaggatattgatgagtgtggcacaggcagacattcatgcgctaatgatacaatctgttttaatctcgatggcggatacgattgcaggtgcccgcatggaaagaattgcactggggattgcattcatgatgggaaggtcaagcacaatggtcagatatgggtgctagagaatgatcgctgctctgtgtgtagctgccagaatggattcgtaatgtgccgcaggatggtgtgcgattgtgaaaatccgaccgtggatctcttttgttgccccgagtgtgacccgcgcctgtccagccagtgcctgcaccaaaacggcgagactttgtataactctggagacacttgggtgcagaactgccagcaatgcagatgtcttcaaggtgaagtcgactgttggccgctgccttgcccagatgtagaatgcgaattctcaatcctgcctgaaaatgaatgttgcccccgctgcgtgacagacccttgccaagccgacactatcagaaatgacatcacaaagacatgtctggacgagatgaacgtggttcgctttacaggcagctcttggattaagcacgggacagagtgtactttgtgtcagtgcaagaatggccacatttgctgcagtgtcgatccacagtgtctccaggaattgtag

SEQ ID NO: 248379 - RNA, 1734 nt, synthetic construct
  misc_feature 1..1734: note = Description of Artificial Sequence: Synthetic coding sequence
  source 1..1734: mol_type = other RNA
atggagacagggctaggggctccactgttcaaggcatggctattgattagcgtctggggactgggcgtggacccctccttacaaatagacgtcctgacagagctggagctgggcgaatccacgactggggtacgtcaggttcccgggcttcataatggaacaaaagccttcctgtttcaggacacgccaagatcgataaaggcctcgacagccacagcggaacagttctttcagaaactcagaaacaaacacgagttcacgatactggtcaccttaaagcagactcacctaaattcgggcgtcatattgtcaattcaccatctcgaccacaggtatctggagttggagtctagcgggcacaggaatgaagtacgtctgcattacaggagcggatcccaccgaccccacactgaagtcttcccatacattctcgcggacgataagtggcataagctgagcctggctatttccgcatcccatctgatcctgcacatcgattgcaataagatttacgaaagagtagttgagaagccctcaacagacctgcctcttggcactacgttttggttgggccagcgcaacaacgcacacgggtatttcaaaggaatcatgcaggatgttcaacttttggtaatgccccagggctttatcgcccagtgccccgatttaaatcgaacttgtcccacatgtaatgactttcatggcttggtacagaaaatcatggagcttcaggacatacttgccaaaacttcagcaaagcttagcagagcagagcagcgcatgaaccggctggaccagtgttattgtgagcgaacatgtaccatgaaaggtaccacataccgggaattcgagagctggatcgacgggtgtaagaactgtacatgcctcaacggtacaatacagtgcgaaacacttatatgcccgaacccagactgccctttgaaatctgcactcgcctacgtggatgggaagtgttgcaaggaatgtaaatcgatctgccagtttcaggggcgcacctactttgagggagagcgcaacactgtatattcgtcctccggcgtgtgcgtactctatgaatgtaaggatcaaacgatgaaattggttgaaagtagcgggtgcccagcattagactgccccgagagccatcagatcacattaagtcactcgtgttgtaaggtgtgcaagggctatgacttctgctccgagaggcataactgtatggagaattccatctgcaggaacttgaatgatagggctgtttgcagctgcagggacggctttcgggccctcagagaagataatgcttattgcgaagacatagatgagtgtgccgaaggtcgacattattgtagggagaacacgatgtgcgtgaacaccccaggcagcttcatgtgtatttgcaagacgggatacatccgcatcgatgactactcctgtaccgagcacgacgaatgtataacaaaccagcataattgtgatgaaaatgctctatgctttaacactgtcggtgggcataattgcgtctgcaaaccggggtacaccggaaatggaactacctgtaaggcattctgtaaggatggctgtaggaatggtggcgcctgcatcgcagccaacgtatgtgcgtgcccccagggctttactgggccgagctgtgagacggacatcgacgaatgcagcgacggttttgtgcagtgcgattccagggccaactgcatatgcttagtgccgctctag

SEQ ID NO: 248380 - RNA, 333 nt, synthetic construct
  misc_feature 1..333: note = Description of Artificial Sequence: Synthetic coding sequence
  source 1..333: mol_type = other RNA
atggagaccggattaggcgctccgttgtttaaagcttggctactcatatcagtgtggggcttgggagtcgatccgtcgctgcaaatcgatgtgctgacagagctagagctgggcgagagtactaccggcgttcgtcaagttccaggactccataacggcacaaaagcgttcctgtttcaagatacccctcgctctatcaaagcatctactgccactgctgaacagttcttccagaagctcagaaataaacacgagtttacaatccttgtcaccctgaaacaaacacatcttaacagcggagtaatcttgagcatccaccacctcgatcactag

SEQ ID NO: 248381 - RNA, 2448 nt, synthetic construct
  misc_feature 1..2448: note = Description of Artificial Sequence: Synthetic coding sequence
  source 1..2448: mol_type = other RNA
atggaaaccggtttgggcgcaccgctatttaaggcctggctgcttatctctgtatggggactgggcgtggatccatctttacaaatagacgtactgaccgagctcgaattaggagaatcaacaacaggggtcaggcaggtccctggactgcataacggtaccaaagcttttctgtttcaagatacgcctaggagtataaaagcatctactgccactgcagaacaattctttcaaaaactgcggaacaagcacgagtttaccatactggtgaccctcaaacagacccacctcaatagtggggtgatcttgagtattcatcaccttgatcatcgttatctggagttagagagctcgggccaccggaatgaagtcagactgcactaccgttccggaagccatagaccccacactgaagtcttcccctacattcttgccgatgataaatggcacaaactctcactcgctataagcgcctcccatctgattttgcatatcgattgcaacaaaatatatgagcgagtggtggaaaaaccctccacggacttgccactcgggactacattttggctgggacagcggaacaacgcccatggctacttcaagggtattatgcaggatgtgcagttattagtcatgccgcagggatttattgctcagtgtccagatctcaatagaacatgcccaacctgtaatgactttcacggtttggtccaaaaaataatggaactgcaggacattctggccaaaacctccgcaaagttgtctcgcgcagagcagcgtatgaatcggttggatcagtgttactgtgagaggacatgtacaatgaagggcacaacatatagagaattcgaaagctggattgatggctgcaaaaattgtacatgcctaaacgggaccatccagtgcgaaactcttatatgccccaacccagattgccctctgaaatcagccttggcttatgtagatggcaaatgttgtaaggaatgtaagtctatctgtcaatttcaaggccgaacctacttcgaaggggagaggaatactgtttacagttcgagtggggtgtgcgtgctatacgagtgcaaggatcaaacaatgaaattagttgagtctagcgggtgtccagccttggactgtcctgagagccatcagattacccttagtcactcatgctgcaaggtatgtaaaggctatgacttctgctctgagcgccacaattgtatggagaactcaatctgcaggaacctcaacgaccgcgcggtttgctcctgcagagacggtttccgagctctgagggaagacaatgcctattgtgaagatatcgatgaatgcgccgagggacgacattattgccgagagaatacaatgtgtgtgaacacgcctggctcttttatgtgtatctgtaaaactggttatatacgaatagatgactacagttgcactgaacatgacgaatgcattaccaatcagcataattgcgacgaaaacgctctgtgttttaataccgtcggcggccataattgcgtttgtaagcccggctacactgggaacggcaccacctgcaaggcgttctgcaaggacggttgccgcaacggaggcgcatgtatcgctgccaatgtgtgtgcctgtccacaggggtttacgggcccttcctgcgagacagacatcgatgagtgctctgacggattcgtgcagtgtgattcccgagctaattgcataaatctgccggggtggtaccactgcgagtgcagagatggttatcacgataacggcatgtttagcccatctggggaaagctgcgaggatatagatgaatgcgggacaggaagacattcctgtgcaaacgatactatatgctttaatctggacggaggatacgattgcagatgccctcatggcaagaactgtaccggagactgcattcatgatggcaaagttaaacacaacggacagatctgggttctggagaacgataggtgctcagtatgttcttgccagaatggcttcgtcatgtgccgtagaatggtctgtgactgtgagaatcccactgtggacctgttttgttgcccagagtgcgatcccagactgagctctcagtgtctccatcagaacggcgaaacactttacaattccggtgatacttgggtgcagaactgccaacagtgtcgttgcttgcaaggggaggtagattgttggcccctaccctgtccggatgtggagtgcgagttttcgattctacctgagaatgaatgctgccctcgctgcgtcacagacccttgccaggccgacacgatcagaaacgatattaccaagacttgccttgacgaaatgaatgtggtgcgtttcactgggagctcttggatcaagcacggaactgaatgcacactgtgccaatgtaaaaatggccacatctgctgtagcgtggacccacaatgcttacaggaactctag

SEQ ID NO: 248382 - RNA, 69 nt, synthetic construct
  misc_feature 1..69: note = Description of Artificial Sequence: Synthetic coding sequence
  source 1..69: mol_type = other RNA
atggaatcgcgtgtgcttctgcgaaccttttgtttaatctttggacttggcgccgtgtgggggttgtag

SEQ ID NO: 248383 - RNA, 966 nt, synthetic construct
  misc_feature 1..966: note = Description of Artificial Sequence: Synthetic coding sequence
  source 1..966: mol_type = other RNA
atggaatctcgcgtgctactcaggaccttctgcctgatcttcgggctcggagccgtgtgggggctgggagtggaccccagcttacagatcgacgtcctcactgagttggagctcggagagtccacaactggggttagacaagtccccggcttacataacgggacaaaggcatttctctttcaagatacacccagaagtataaaggcatccacagccacagcagagcagttcttccaaaaactaagaaacaagcacgaatttactatactcgtcaccctgaagcaaactcacttaaacagcggagtcattctttccattcaccacttggaccacaggtacctggaactcgaatctagcggtcaccgcaatgaggtcaggctgcactatcgatccgggtcccatcggccacataccgaagtcttcccatacattcttgccgatgataagtggcacaaactcagtctcgccatctctgcctcccacctgattctgcacatcgattgcaacaaaatttacgagagagtggttgaaaagccgtccactgacctgcctctgggcacgactttttggttgggtcaaaggaacaacgctcatggttactttaaaggaatcatgcaggatgttcagctgctggtgatgccacaaggtttcatcgcccagtgtcccgaccttaatcggacttgtcctacatgtaatgattttcatggtctggttcaaaaaattatggagttgcaagatatcctcgctaaaacctccgccaaactctctagagctgagcaacgaatgaatcgactggatcaatgctactgtgaacggacgtgcaccatgaaaggaacaacttatcgggagtttgagtcgtggatcgatggctgtaagaattgtacctgcctgaacggaacaatacagtgtgaaactctgatctgccctaaccctgattgccctctgaagtctgcgttggcctattag

SEQ ID NO: 248384 - RNA, 246 nt, synthetic construct
  misc_feature 1..246: note = Description of Artificial Sequence: Synthetic coding sequence
  source 1..246: mol_type = other RNA
atggcagcggtggctgctgccagcgccgaacttctgataattggctggtacattttcagagtactgttgcaggtttttctcgagtgctgcatatattgggtcggcttcgcatttagaaatccccctggaacgcaaccaatcgctagatctgaggtcttccgttattccctgcagaaattagcttacacggtttcacgtacaggccgacaggtgctcggagagcgtcgccaacgcgccccaaattag

SEQ ID NO: 248385 - RNA, 513 nt, synthetic construct
  misc_feature 1..513: note = Description of Artificial Sequence: Synthetic coding sequence
  source 1..513: mol_type = other RNA
atgatggctggaatgaaaattcagctggtatgcatgcttctacttgccttctcctcttggtctctgtgctcagattctgaagaagagatgaaagccctcgaggccgattttctaacaaatatgcacacaagtaagatctctaaagcccacgtgccgagttggaagatgactcttctcaatgtatgcagcctggttaataatctaaacagccccgctgaggagaccggcgaggttcacgaggaagaactggtcgctcgaagaaagttgcctactgctcttgacggctttagtctcgaggcgatgctgactatttaccagttacataagatttgtcatagccgagcttttcagcattgggaacttatccaggaggacatcttagatactggcaatgataaaaacggcaaggaagaggtgataaagcggaagataccctatattctgaaacgccaattatacgagaataaacctcgaagaccttatattctgaaaagggactcctattattattag

SEQ ID NO: 248386 - RNA, 348 nt, synthetic construct
  misc_feature 1..348: note = Description of Artificial Sequence: Synthetic coding sequence
  source 1..348: mol_type = other RNA
atgacactcctaaatgtgtgttctctagttaataatctgaattcacctgccgaagagaccggggaggttcacgaggaggaactggtggcacgacgcaagctgccaacagcccttgatgggttctccctcgaagcaatgttgacaatttaccaattgcataagatttgccactccagagcgtttcaacattgggaattaatacaagaggatattcttgatactggaaatgacaagaacggtaaagaggaagtcataaagagaaaaattccatacatcttaaaaagacagttatacgaaaataaacctcgcaggccctatattctcaagagagactcttactattactag

SEQ ID NO: 248387 - RNA, 288 nt, synthetic construct
  misc_feature 1..288: note = Description of Artificial Sequence: Synthetic coding sequence
  source 1..288: mol_type = other RNA
atgatggctggaatgaagatccagcttgtgtgtatgctcctgttagcattctcatcttggtctttatgcagtgacagcgaggaggagatgaaggcactcgaagctgactttctgacaaacatgcatacttccaaactcattcaggaagatatccttgataccgggaacgataaaaacggtaaagaggaggtaatcaagcgaaagataccttatatactaaagagacagctatacgaaaacaaaccccgccgaccatacattctaaaaagagattcttactactattag

SEQ ID NO: 248388 - RNA, 774 nt, synthetic construct
  misc_feature 1..774: note = Description of Artificial Sequence: Synthetic coding sequence
  source 1..774: mol_type = other RNA
atgtctatattgttttatgtcatttttctcgcctaccttaggggtattcagggtaataatatggaccagcgtagcttgcctgaagacagcctgaattcactgatcattaaattaatccaggcagatatcttgaaaaataaactgagtaagcagatggtagatgtcaaggaaaactaccagtctacattgcctaaggctgaggcccccagggagcctgagagaggaggccctgccaaaagcgcatttcagcctgtcattgccatggacactgagctgctccgacaacaaaggcgctataattctccccgggtcctgctctcagactcaacccccctcgaacccccacccctctacttgatggaagactacgtgggtagcccagtagttgcgaacaggacatccagaagaaagagatacgccgagcacaagtcccacaggggtgaatattcagtctgcgactccgagtccttgtgggtgaccgataaaagtagcgcaatcgatatcagagggcatcaggtaaccgtactcggtgaaatcaaaaccgggaatagccccgtgaagcagtatttctacgagacaaggtgcaaagaggccagaccagttaagaacggatgtaggggcatcgatgacaagcattggaactcgcaatgcaagacatcccagacatatgtcagggcactaacatctgagaacaataagctggtgggatggcggtggattcggattgatacaagttgtgtatgcgctctgagccgtaagattggaagaacctag

SEQ ID NO: 248389 - RNA, 813 nt, synthetic construct
  misc_feature 1..813: note = Description of Artificial Sequence: Synthetic coding sequence
  source 1..813: mol_type = other RNA
atggtgacatttgcaacaatcctccaagtgaacaaagtgatgtctatccttttttacgtgatctttttggcctacctgcgcgggattcagggaaacaatatggaccaaagaagtctgcctgaagactcgctgaactctctgatcattaaactgattcaagctgacatcctgaagaataagctctccaagcagatggtcgacgtgaaagagaactaccagagcacactaccaaaggctgaagcaccccgcgagcccgagcgaggaggccctgcaaaaagtgcttttcaacccgtaattgctatggatactgagctgctaaggcagcagcgacgctacaacagtccacgcgtcctgcttagtgattccaccccactggagcctcctcccctgtaccttatggaggattatgttggaagccccgttgtggctaatagaacaagccgcaggaaacggtacgcagagcataaatcacacagaggagagtattctgtttgcgatagtgaatcattgtgggtgaccgacaaatcatcagccatcgacattcgcggacaccaagtgacagtgctcggggagatcaagactggcaactcccctgtcaagcagtatttctacgagaccaggtgtaaagaggcccggcctgttaagaacggatgcagaggcattgatgataagcactggaacagccaatgtaagacttcccagacctatgtacgagcactgacctctgaaaacaacaagcttgtggggtggcgttggattcgcatcgatactagctgcgtgtgtgccctgtcgaggaaaataggccggacgtag

SEQ ID NO: 248390 - RNA, 2754 nt, synthetic construct
  misc_feature 1..2754: note = Description of Artificial Sequence: Synthetic coding sequence
  source 1..2754: mol_type = other RNA
atggctttcatccgcaagaagcagcaagaacaacaactgcaattgtattctaaagaacgtttttctctgctcctgctgaacttggaagagtactatttcgagcagcaccgggcgaatcacatcctccataaggggtcccatcacgaaaggaagattcgaggtagtctgaagatatgcagtaagtccgtcattttcgaacctgactccattagtcagcctattattaagatcccgctgcgcgactgtatcaaaatcgggaaacacggcgagaatggagcaaataggcatttcaccaaagccaagtcaggcgggatcagcttaatcttttcacaggtatactttataaaagaacataacgtggtggccccttataaaatcgaacggggaaagatggaatacgttttcgagctagacgtaccaggaaaagtggaggacgttgtcgagactcttttgcagctccaccgagcaagctgtctggataagcttggagatcagactgccatgatcacagccatcttgcagagccgactcgcaaggacatcattcgacaagaatcgtttccagaacatctccgaaaaactgcacatggagtgcaaagctgagatggtcacaccacttgtaacaaatcccgggcacgtctgtatcactgacacgaatctgtacttccaacccttgaatggctacccgaagcctgtggtccagattacccttcaggatgtgcggcgaatctacaaaagaagacatggcctaatgcccctaggtctggaggtgttctgcaccgaggacgacctatgttctgatatatatttgaaattttatgagcctcaggatcgcgatgacctctacttctatattgccacttacttggaacaccatgtggcagagcacacggctgagagctacatgctacagtggcagaggggacatctgagtaattatcagtacctcctccatctgaacaacctagctgacagatcatgtaacgatctgtctcaatacccggtgttcccctggattatccacgactatagctcttctgagctggatttatcaaatccaggtacatttagggatttatccaagccggtcggggcactgaacaaggaacggttagagcggcttttgactcggtaccaggagatgcctgagcccaagtttatgtacggttcccactattcgtcccccggatacgtacttttctacttagttagaatagcccctgagtacatgctgtgccttcagaacggaagattcgacaatgctgaccggatgtttaattctatcgccgagacctggaaaaattgcctggatggcgcgaccgatttcaaggaattaatacccgagttctacggtgacgacgtatctttcctggtgaactcactgaagctggacttaggtaaacgtcagggtggacagatggtcgatgatgttgaattgcctccttgggcctcctcccctgaggatttcctgcagaagtccaaggacgctttagagagcaactacgtgtctgaacatctccacgaatggatagacctcatattcggttacaagcagaaggggtcagacgccgtgggcgcccacaatgtcttccaccctttgacctatgaaggcggtgtggacttaaacagcatccaggaccctgatgagaaagttgccatgcttactcagatcctagaattcggccagacccccaagcaattgttcgtcactccacaccctaggagaattacacctaaatttaagagtctaagccagaccagcagctataatgcgtcaatggccgatagcccgggcgaggaatctttcgaagatctgactgaagagtctaaaactctggcgtggaacaatatcactaagcttcagctccacgaacactacaaaatacacaaagaagcggtgactggtatcaccgtcagccggaatggatccagcgtgttcactacaagtcaggactccactcttaagatgttttccaaagaatctaagatgctgcagcgatctatttccttctccaacatggctctgtcatcttgtctgctgttacctggcgacgccaccgtcattacctcaagctgggacaacaacgtgtacttttatagcatagctttcggtaggcggcaggataccctgatgggtcacgatgatgcagtttcaaagatttgttggcacgacaacagattgtattccgcctcctgggatagtactgtcaaggtgtggagcggagtaccggcagagatgcccggaaccaagcgacaccattttgacctgctcgctgaacttgaacatgatgtgtcagtggacacaatctctctgaacgcagcttccactcttctcgttagcgggaccaaagaagggacagttaatatttgggatctcacaacagccacgttaatgcaccagattccttgccactcaggcattgtgtgcgacacagccttttcccctgactcacgccacgtgctttctaccggcactgacggctgtctaaatgtgattgacgtgcagactggtatgctgattagtagtatgacaagtgatgagccacagagatgcttcgtgtgggacggcaatagcgtcctgtctgggtctcagagcggggaactgctggtctgggatcttctcggagccaagataagtgaaagaatccaaggccataccggggcagttacctgtatttggatgaatgaacagtgttcttccatcattacagggggagaggacagacagatcatattctggaagctccagtactag

SEQ ID NO: 248391 - RNA, 1188 nt, synthetic construct
  misc_feature 1..1188: note = Description of Artificial Sequence: Synthetic coding sequence
  source 1..1188: mol_type = other RNA
atggtcagcgcggccggcctctcgggagacggcaaaatgcggggcgttcttctcgttctgttgggcttgctctactcaagtacctcttgcggcgtgcagaaggcgagcgtgttttacggacccgaccctaaagaaggactcgtgagttccatggagtttccttgggtggtgagtttgcaagattctcagtacacccatctcgctttcgggtgcatcttgagcgagttctgggtcctcagcatcgcttccgctattcaaaaccgtaaggacatcgtggttattgtgggcattagcaatatggacccatctaaaatcgctcataccgaatatcccgtgaacactatcataattcatgaagatttcgacaacaacagcatgagtaacaacatcgccctcctgaaaactgacactgctatgcacttcggcaatctcgttcagagtatctgctttctcggtaggatgcttcacacaccacctgtattgcagaattgttgggtgtccgggtggaaccctacctccgccaccggtaatcacatgaccatgtccgtgttaagaaagatttttgtgaaagatctggatatgtgccctctgtataaactccaaaaaactgagtgcggatcacacacaaaagaagagacgaagaccgcatgcctgggcgaccccggttctccaatgatgtgccaactgcaacagtttgatttgtgggtcttgcggggcgtacttaactttgggggggaaacgtgtcccggcctcttcttgtatactaaagtcgaagactattcaaagtggatcacttctaaagccgaacgcgccggcccccctttgtcttccctgcatcattgggaaaaacttatctctttcagtcaccatggccctaatgctaccatgacacaaaagacttattccgatagcgaacttggccatgtcgggtcatacctgcagggacaaagaaggacaataactcattcaagactgggcaactcttcgcgcgatagtctcgatgtgagagagaaggacgtaaaggaaagcgggcgctcccctgaagcctcagtgcagccgctgtattacgattattatggaggagaagtgggtgaggggcggattttcgcaggccaaaacagactataccagcccgaggaaatcattttggtttctttcgtgttggtcttcttctgctcttctatttag

SEQ ID NO: 248392 - RNA, 2085 nt, synthetic construct
  misc_feature 1..2085: note = Description of Artificial Sequence: Synthetic coding sequence
  source 1..2085: mol_type = other RNA
atgaaacatcttaaaaggtggtggtccgcaggtggagggttgctccaccttacacttctcctcagcctggccgggctccgtgtcgatttagatctttatctgctgctccctccaccgactttactacaggacgagctcctttttcttggtggccctgcctccagcgcctatgccctgtcaccattcagtgcatcaggaggctggggtagagccggccacctgcaccctaaaggtagggaactcgaccccgcggctccccccgaaggccagctgctcagggaggtcagggcactcggggtaccctttgtccccagaacatccgtggatgcttggctggtgcactccgtggccgcgggctctgccgacgaagctcatggacttttaggagccgcagctgcgagcagtacaggcggcgccggggcctcagtcgacgggggtagtcaggccgtccagggcggcggtggcgaccctcgcgctgcccggtcggggcctctggatgctggcgaggaggaaaaagcaccagccgagccaactgctcaggtaccagacgccggcggctgcgcttcagaagagaacggcgtgctgagggagaaacatgaggccgttgatcacagctcccagcacgaagaaaatgaagaaagagtttccgctcagaaggagaatagcctgcaacagaacgatgacgacgaaaataaaattgcggagaaacccgattgggaagctgagaagacgacagaaagccggaacgagcgtcatctgaatggaactgacacctctttttcattagaggatctattccagctcctgtccagtcaaccagaaaacagcctcgagggaatttcactcggagatattccccttccagggagtatttctgacggcatgaattcttctgctcattatcatgtgaacttctcacaggctatcagtcaggatgtgaaccttcatgaagcaattttgctgtgccccaataacacattccgccgtgaccctaccgcacggactagtcagagccaagagccgtttctccaactcaacagccacactaccaacccagagcagacattacctggtaccaatctcacagggttcctctctcctgtggataaccacatgagaaatcttacgtcacaagacctcctttatgatctggatataaacattttcgacgaaatcaaccttatgagcctggcaacggaagacaactttgatcccattgacgtttctcaactgtttgacgaacccgacagtgacagtggacttagcttagactcttcacataataatacctcagtgataaagagcaattcatcccactccgtgtgtgacgagggggccatcggctactgtacggaccatgagtcttcctcccaccatgatcttgagggcgccgttggaggatattacccagaacccagcaagctctgccacctcgaccagtcagattccgactttcatggagacctcacctttcaacatgttttccacaaccatacttatcatctgcagccgactgccccggaatctacttccgaaccttttccatggccagggaagtcgcaaaagattcgctcccgctacctggaggatacagatagaaacctctccagggatgaacaacgcgcaaaggcactgcacattccctttagcgtcgatgagatagtaggcatgcccgtggactccttcaatagcatgttaagccgctactacttgactgacctgcaggtgtcactcatccgcgatattcgacgacgagggaaaaataaagttgccgcccagaactgccggaaacgtaagttagacatcattctgaatttggaggacgacgtgtgcaatcttcaggccaagaaagagactctcaaacgtgagcaagcccagtgtaataaagccatcaatataatgaaacaaaagcttcacgacctctatcacgatattttttcacgcttaagggacgaccagggacgacccgtgaaccccaaccactacgcattgcagtgcacccatgacggatccattcttatagttccaaaggaacttgtagcctccggacataagaaggagactcagaaagggaaacggaagtag

SEQ ID NO: 248393 - RNA, 1404 nt, synthetic construct
  misc_feature 1..1404: note = Description of Artificial Sequence: Synthetic coding sequence
  source 1..1404: mol_type = other RNA
atgcctggcaggtggcgttggcagagagacatgcatccagcacgcaaactactgtctctgctgtttctgatcctcatggggactgagttgacacaggtgcttccaacgaatccagaagaatcatggcaggtctacagcagtgcacaggactctgagggcaggtgcatctgcaccgtcgtggctcctcagcaaaccatgtgtagccgagatgcaaggactaaacagctgcgacagctgttggaaaaagtgcagaacatgtcccagtctattgaggttctggacaggcggactcagagagacctacagtatgttgagaagatggaaaatcagatgaaaggcttagagagcaaattcaaacaagttgaagaaagccacaaacagcatttggcccgtcagttcaaagccataaaagcgaagatggacgaacttcggcccctgattcccgttctcgaagagtataaggcagacgctaagctcgttctccagttcaaggaggaggtgcagaacctcacatccgtgctcaacgaattacaagaagaaattggcgcatacgattatgacgaactacagtctcgcgtcagtaacctcgaggagcgcctcagggcatgcatgcagaaactggcatgcgggaagctgacaggaatctcggaccctgtgactgtgaaaacaagcggttcaagattcggcagctggatgaccgatcccttggctccagagggcgataatagggtttggtacatggatggatatcacaacaaccgctttgtgagagagtacaagagcatggttgactttatgaacactgacaactttaccagccacagactgccacacccttggtcgggcacagggcaggttgtgtataatggctccatttatttcaacaagtttcaatctcacatcattatccgctttgacttgaaaaccgaaaccatcttaaagacgcgttcactggactacgcaggatacaacaatatgtaccactatgcttggggaggacatagtgacatcgatctcatggtggacgagagcgggctctgggcggtgtacgcaaccaaccagaatgccgggaatatagtagttagtaggctggatcccgttagcctgcagaccctgcagacctggaacacatcatatcctaaacgatctgccggcgaggcttttatcatctgcggaacgctgtacgtcacaaacggatacagtggcggcaccaaagtgcattacgcgtaccaaaccaacgcatcgacctacgaatacatagacattccctttcaaaataagtattcacacatcagcatgctagattataatccaaaggacagagccctgtacgcctggaataacggacaccagatactttacaatgtaacactctttcacgttatacggtctgatgaactctag

SEQ ID NO: 248394 - RNA, 408 nt, synthetic construct
  misc_feature 1..408: note = Description of Artificial Sequence: Synthetic coding sequence
  source 1..408: mol_type = other RNA
atgccaggcagatggaggtggcagagagatatgcatcctgctaggaagttacttagcctattgtttctgatcctgatgggaactgaacttacccaggtactgcccaccaatcccgaagaatcatggcaggtctacagcagcgctcaagatagcgaaggcaggtgtatctgtacagtcgtagcacctcaacaaaccatgtgttctcgagacgccaggacaaagcaattgcgacagctgttagagaaggtacagaacatgagccagtcaatcgaagtactcgaccggcgaacccagcgggatctacaatatgttgaaaaaatggaaaatcagatgaagggcctggaaagtaagtttaaacaggtggaggagtcccacaaacagcacctcgctcggcagttcaaaggatag

SEQ ID NO: 248395 - RNA, 1458 nt, synthetic construct
  misc_feature 1..1458: note = Description of Artificial Sequence: Synthetic coding sequence
  source 1..1458: mol_type = other RNA
atgagtgtgccacttctgaagattggtgtcgtcctctccactatggcaatgataactaactggatgtcccaaacgctgccctcactcgtaggtcttaatactacgaaactgtcagctgctggaggggggacgctggaccgcagcacaggcgtgcttcccacaaaccctgaggaatcctggcaagtgtactcttccgcccaggatagcgagggccggtgtatttgcactgtcgtggccccgcaacagacaatgtgttccagagatgctaggaccaagcagctgcgacagctactggagaaggttcagaatatgtcccagagtattgaagttcttgatcggaggacacagcgggacctacagtacgtcgaaaaaatggagaaccagatgaaagggttagagtccaagttcaaacaagtggaggagagccacaagcaacacctagccagacaatttaaagcaatcaaagctaagatggatgaactgcgacccctgatacctgtgctggaggaatacaaagccgatgctaagctcgtactgcagttcaaggaggaagtccagaacctaaccagcgtcctgaacgagcttcaggaggagattggagcctatgattacgacgagttgcaaagccgtgtctcaaatctggaggaaagattgcgcgcttgtatgcagaaactggcttgcggcaaactcactggaatttccgaccctgtgacagtcaaaaccagcggatccagatttgggtcgtggatgaccgatcctttagcgcctgagggggacaacagagtctggtatatggacggctatcataataatcgtttcgtaagggagtacaagagtatggtggacttcatgaacactgacaactttaccagccacaggcttcctcatccgtggtccgggaccggccaggtggtatacaatggatctatatattttaataagtttcagagccacataattatcagattcgaccttaaaaccgagacaatcctcaagactcggtcgctcgactacgcaggttacaataatatgtatcattacgcctggggcggacacagtgacatagatcttatggttgatgaatccggactgtgggctgtatatgccacaaatcagaacgcaggaaatatcgtggtgtcacggctggatccagtcagcctacagaccctgcaaacttggaacacctcctaccctaaacgaagcgcaggagaagctttcataatctgtgggaccctttacgtgacaaacgggtacagtgggggcaccaaggtgcactacgcctatcagactaacgcatcgacatatgaatacatcgatatacctttccaaaacaagtacagtcatatatccatgttagattacaatcccaaagaccgcgctctgtacgcctggaacaatggccaccaaattttatataacgtcactctctttcacgtgataaggtccgacgaactgtag

SEQ ID NO: 248396 - RNA, 1377 nt, synthetic construct
  misc_feature 1..1377: note = Description of Artificial Sequence: Synthetic coding sequence
  source 1..1377: mol_type = other RNA
atgggggaggcacccggacgggaaggtagaggaccatgcccccaactggagagcccacgcagaaggcgcgtgctgcccacaaaccctgaggaaagttggcaagtatattccagtgcacaggattcggagggccggtgcatttgtactgtagtagccccacaacagaccatgtgttccagagatgcccggactaaacaacttaggcagttattagagaaagtgcagaatatgtctcagtcaatagaggtactggatagaagaacccaacgcgacctacaatacgttgaaaagatggagaaccagatgaaggggctggagtcaaagttcaagcaggtggaggagagccacaagcaacatttggccaggcaattcaaagcgattaaagctaaaatggacgaattaagacccctgatacctgtgcttgaagagtacaaagctgatgctaaactagttctgcaattcaaggaagaggtccagaacctgacctccgttctgaacgagctgcaggaggagattggtgcatatgactacgacgaactgcaatcaagagtgtctaatctagaggaaaggctgcgggcctgtatgcaaaaactcgcttgtggaaaattaaccggaatcagtgacccagtcactgtgaagacgagcggcagccgcttcggttcctggatgaccgacccactcgcccctgaaggggacaatagagtctggtacatggacggttaccacaataatcgcttcgtccgtgagtataaatccatggtcgatttcatgaacaccgacaacttcacatctcacagactccctcatccatggagtggcaccggccaagtggtgtacaatggttcgatctactttaacaaattccagtcccatatcattatccgtttcgacctgaagactgaaactatcctgaaaacccggagccttgattacgccggctacaacaatatgtaccactacgcctggggcgggcacagcgatatcgatctcatggtggacgagtctggcctatgggcagtatacgccactaaccaaaacgccggaaatatagttgtgagcagactcgaccctgtatcactgcagacattgcagacctggaacacgagttaccctaaaaggtccgccggcgaggccttcataatttgcggcactctatatgtcactaatggttactccggtggcacaaaagtacactacgcttatcagaccaatgcttcaacctatgagtacatcgatataccgttccaaaataagtacagccacatcagcatgctggattataacccaaaggatagggcactctacgcctggaataatggtcatcagatcctttacaatgtgaccctgttccacgtgattaggagcgacgaactctag

SEQ ID NO: 248397 - RNA, 462 nt, synthetic construct
  misc_feature 1..462: note = Description of Artificial Sequence: Synthetic coding sequence
  source 1..462: mol_type = other RNA
atgtctgtgcctttattaaagatcggagttgtgcttagtactatggccatgatcactaactggatgtcacagaccttaccatccctcgtgggtctaaacacaaccaagctttctgctgccggaggaggcaccctcgacagatcaacaggcgtgctgccgaccaaccccgaagagagttggcaagtttactcctctgctcaggacagtgaaggtcgttgcatctgtacagtggttgctccacagcagaccatgtgctcccgtgacgctcggacaaaacagctccgccaactgctagagaaagttcaaaatatgtctcaaagcattgaagtcttggataggagaacccagcgcgacctccagtatgtggagaagatggaaaatcaaatgaagggtctcgaatcgaagttcaagcaagtggaggagagccataagcagcaccttgcaagacagttcaaaggttag

SEQ ID NO: 248398 - RNA, 696 nt, synthetic construct
  misc_feature 1..696: note = Description of Artificial Sequence: Synthetic coding sequence
  source 1..696: mol_type = other RNA
atggcttccatggcggcaatcggttcctgttcgaaggagtatcgagtgctgctgggccaactccagaagcagacagatttaatgcaggatacaagccgactgttagatccatatattaggatacaggggctggatgttcccaaattaagagaacactgtcgggagcggcctggagcattcccaagcgaagaaacgttacgagggcttgggcgccgtggcttcctgcagactttaaacgctaccctgggttgcgttctccatcggctggcagatctggagcagaggctgccaaaagcacaggatttagagagaagcggcctgaatatcgaagatctagaaaagctacagatggcacggcctaacattctcggtctgaggaacaacatctactgtatggcacagctgctggacaactctgatacagccgaacccactaaagctgggcgaggcgcatcccagccccccacgcccaccccagcctccgacgcattccagcgcaaactcgagggatgtcgatttctacacggttaccatagatttatgcattctgttgggcgtgtgttttctaaatggggcgaaagtcctaatcgtagtcggcggcatagcccccaccaagcactcagaaaaggcgtccgcagaacccgccccagtagaaaaggaaagaggctgatgacacggggtcagttgcctcgctag

SEQ ID NO: 248399 - RNA, 849 nt, synthetic construct
  misc_feature 1..849: note = Description of Artificial Sequence: Synthetic coding sequence
  source 1..849: mol_type = other RNA
atggctctagtgctgattctccaactactgacactgtggcccctgtgtcacacagacattactccctctgtccctcctgcatcttaccatccaaaaccctggttaggcgcccagccagccaccgtggtgactcccggtgtgaatgtcactttacggtgtcgtgcaccccagcctgcttggcgattcggtctcttcaagcctggcgaaattgccccactgcttttcagggatgtttctagtgagcttgctgagttctttttggaggaagtcacacccgcccagggcggcatctatcggtgctgctacagacggccagactggggtcctggtgtctggagccagcctagcgatgtcctggaactgctggtaactgaagagttgcctcgtccttccctggtggcactgccgggtcctgttgtggggccgggtgcaaacgtgtcgctgaggtgcgctggccggctccggaacatgtccttcgtgttatacagagaaggagtcgcagcccctctgcaatatcgacactcagctcagccctgggccgatttcacactgcttggagctcgcgcacccggaacttactcctgttattatcacaccccctccgcgccctacgtcttgagccagagaagcgaggtactggtgatctcgtgggagggggaaggaccagaagcgagaccagctagcagcgctccaggaatgcaagccccaggcccgccaccttctgatcccggtgcacaggccccctcactgtcaagcttccggccacgaggactcgtcctgcagcccctgttgccccagacacaggattcttgggatcccgccccaccacctagcgatcctggagtttag

SEQ ID NO: 248400 - RNA, 759 nt, synthetic construct
  misc_feature 1..759: note = Description of Artificial Sequence: Synthetic coding sequence
  source 1..759: mol_type = other RNA
atggcattagttctcattctgcagctgctgacactttttcctcctgcatcttatcatcctaagccatggctgggcgctcagcccgcaacggtggtgactcctggggtaaatgtgactctcaggtgtcgtgcgccccagcctgcctggcgcttcggactatttaaaccaggagaaatcgcccctctgttattccgggatgtgtcctccgagttggccgagttcttcctggaagaggtgacacccgcccaaggcggcatataccgctgctgctacaggcgacccgactggggacccggagtctggagccagcccagtgatgtgctcgaactgctcgtgaccgaagaactgcccagaccttctttggttgctctccccggaccagtagttggaccaggcgctaatgtaagtctccgttgcgccggacggctcagaaatatgtcattcgtattatatagagaaggagttgccgcaccattgcagtacagacacagcgctcagccttgggccgattttacgcttcttggcgcgagggcaccaggcacgtacagctgctactatcacacccctagtgcaccttacgtactctcacagcgttcagaagtcctggtgatttcatgggaagactctggctcttccgactatacccgaggtaacctcgtgcggctggggctcgcggggttggtattgatctcactaggtgccctggtcacttttgactggagatctcagaaccgggccccagctggcattcggccatag

SEQ ID NO: 248401 - RNA, 804 nt, synthetic construct
  misc_feature 1..804: note = Description of Artificial Sequence: Synthetic coding sequence
  source 1..804: mol_type = other RNA
atggcccttgtgctcatattacagctgttaaccctctggccattatgccatacagatatcacaccaagtgttgccattatcgttcctccagcctcctaccacccaaaaccatggttgggcgcgcagccggcaacagttgttaccccaggtgtgaacgtgactctgcgttgcagagctccacagccagcgtggaggttcggattatttaagcccggggaaattgcccccctactgtttcgcgatgtgtctagcgaactggccgagttcttcctggaggaggtgacccccgcacaggggggtatctaccgatgctgttataggcggcccgattggggtcctggagtttggtcccaaccatctgacgtgctcgaactgctcgttaccgaggagctgcctcgaccaagcctggttgccctaccgggaccagtggtgggtccgggagcaaatgtctcgctgcggtgcgctgggagactgcgcaacatgtcattcgtactttacagagaaggagtcgcggccccccttcagtataggcactcagcccagccatgggcagactttactcttctgggagctagggcccccggaacctactcctgctactatcataccccttctgccccttacgttctatcgcagcgctcggaagtgctggttatctcatgggaggactcaggaagctcagattacacacggggcaatctcgtcagactcggtttggccggtctggtactgatttctttaggagccttggtgacatttgattggagatctcagaaccgcgcacccgcgggaattcgtccctag

SEQ ID NO: 248402 - RNA, 792 nt, synthetic construct
  misc_feature 1..792: note = Description of Artificial Sequence: Synthetic coding sequence
  source 1..792: mol_type = other RNA
atggcccttgtattaatcctgcaattactgacgctctggccactgtgccataccgatattacaccctccgtgccccctgcaagttatcacccaaagccttggttaggggcacagcccgctaccgtggtgacgccgggagttaacgttaccttgcgatgtcgggctccacaacccgcctggagattcggcctttttaaacctggcgagatcgctccactcctctttcgggatgtttcatcggagctggctgaattcttcctggaagaggtcactcccgcacagggcggcatttaccgctgttgctaccgacggcccgactggggaccaggtgtctggtcacagccttccgacgtgcttgagttactggttactgaagaattgccccgaccaagcctcgtggcccttccaggccctgtcgttgggccgggagcaaacgtgtcacttcgatgcgcaggccgccttcgcaatatgtcttttgtgctgtaccgcgaaggcgtggccgccccgttgcagtacaggcactccgcacagccatgggcagacttcaccctccttggcgcacgcgccccaggcacatattcttgttactatcacactcctagtgctccctatgtcctcagccagcgctctgaggtgctggtcatcagctgggaagatagcggcagttctgattacactagaggcaatctcgtgcgactcggcctcgcaggattggtactgatttccctcggcgcattggtaactttcgactggcggtctcagaatcgggctcccgctggcattcgtccatag

SEQ ID NO: 248403 - RNA, 1716 nt, synthetic construct
  misc_feature 1..1716: note = Description of Artificial Sequence: Synthetic coding sequence
  source 1..1716: mol_type = other RNA
atgaccatccttcccaaaaaaaaaccacctccacccgatgccgacccagccaatgagccccccccacctgggcccatgccaccagcccccagacgcggaggcggcgtaggagtcggagggggcggcacaggagttgggggaggcgaccgcgatcgggatagtggtgttgtcggagcgcgaccccgagcctctcctccccctcaaggccctcttccaggtcctccaggggccctgcataggtgggccctcgccgtaccccctggcgcagtcgccggccccaggccacagcaagcgtcccccccgccgtgtggcggaccgggtgggcccggtggcgggccaggagacgcccttggggcagctgccgccggtgtgggagcagccggcgtggtggtaggagtgggaggtgcggtcggcgtgggtgggtgttgttccggtcccggccacagcaaacgaagaaggcaagctcccggcgtcggcgcggttggcggaggaagccctgaacgagaagaggtgggggccggttataacagcgaagacgaatacgaagccgctgctgccaggatagaggcgatggatccagccacagtcgagcaacaggaacactggtttgagaaagctctaagagataagaagggtttcattattaagcagatgaaagaagatggtgcatgcctatttcgggccgttgcagaccaggtctatggcgatcaggatatgcatgaggttgtcaggaagcattgcatggattacctcatgaaaaacgctgattacttttcaaactatgtgactgaggacttcaccacctatattaatcggaagcgaaaaaataactgccatggaaatcatatcgaaatgcaggccatggctgagatgtacaacagaccggtggaagtataccagtatagtacgggaactagtgctgtcgagccaatcaacactttccacggtatacatcagaatgaggacgagccaatcagggtgtcataccatcgcaatatccactataacagcgtggtaaatccgaacaaggcaaccattggagtgggcttaggcttgccgtccttcaaacccggatttgcagagcaatccttaatgaaaaatgcaatcaaaacttctgaagagtcatggatagaacagcagatgcttgaggataagaaacgcgctaccgactgggaggcaactaacgaggccatagaggagcaggtggcgcgcgagagctatttgcaatggctgcgcgaccaggagaagcaggcaaggcaggtgcggggcccgagccagcccagaaaagcttctgccacatgttcatctgctacagctgcagccagctctggcttggaggaatggacgtctcggagtcctagacagcgatcctcagcatccagtcctgaacaccccgagctccacgctgagttgggcatgaagcccccaagcccaggcaccgtgctggcactcgctaaaccgccaagtccatgcgccccagggactagctcacaattttccgccggtgcggaccgcgccacgtccccgcttgtgtcactttatcccgccctcgagtgtcgtgcactgattcagcagatgagtccctctgcctttggactcaacgattgggatgatgacgagatcctggcctccgtgctcgctgtctctcagcaggagtaccttgacagcatgaagaagaacaaagtgcaccgggaccctcccccagacaaatcctag

SEQ ID NO: 248404 - RNA, 2529 nt, synthetic construct
  misc_feature 1..2529: note = Description of Artificial Sequence: Synthetic coding sequence
  source 1..2529: mol_type = other RNA
atggacttccaggagcgcgaccctcctttcctgcccgagagcgcacaatcctctaaacctagttcagcccagcaagcttctgagttatgggaggtggtggaggagcctcgagttcgactaggtactgaaggggtcatgcccgaaaggcaggagggtcatctgcttaagaagaggaaatggccgctcaaaggatggcacaaaagatattttgtgctggaggatggcatactacactacgcaacaactcgacaagatattaccaaagggaaactgcatggaagtatagacgtccgtctttctgtaatgagtataaacaaaaaggcccagcgcattgacttagacaccgaagataacatctatcacctgaagataaagagtcaggaccttttccagtcttgggtcgcacagttgagggctcaccgccttgctcaccggctggacatgcctcgcggatccttgcccagcacggcacacagaaaggttccaggcgcacagcttcctacggccgctacagcatcagcccttcctggcctcgggcccagagagaaggtcagttcctggcttcgcgacagtgacggattggaccggtgtagccatgagctgagtgagtgccaaggaaagctccaggagctccacagattactgcaaagccttgaaagtctgcacaggattccatctgcccccgttatccccacgcaccaggcaagtgttaccaccgagcggcctaagaagggaaaaagaacatcccgaatgtggtgcactcagtctttcgccaaggatgatacaatagggcgagttggcagactgcatggctccgtcccaaatctctctcggtacctagagagtagggattcaagtggcacaagaggtttaccccccacagattatgcacatctgcagcgcagcttctgggccctggcccaaaaagtgcacagttcattgtcttccgttcttgctgctctgacaatggagagagaccagctacgcgacatgcatcagggcagtgaattatcaaggatgggtgtttcagaggcctctacaggccagcgacgcctacactcactctctacatctagtgacacgaccgccgactctttctcctcacttaatcctgaagagcaggaggctctgtatatgaaaggaagagaacttactcctcaattgagccagaccagtatactatcattagcagacagccataccgagttctttgacgcctgcgaggtgctgttgagtgcctcttcctccgaaaacgagggtagtgaagaagaggagtcatgcacgtccgaaataaccactagtctgtccgaggaaatgctggatcttcggggcgctgaacgctgtcaaaaggggggctgtgtgcccggtcgaccaatgggaccacctagaaggagatgcttgccagctgctagtgggcccggtgcagatgtgtccctgtggaacattctgagaaataacattggcaaggacttgtccaaggtcagcatgccagttcagctcaatgagcccctgaacactttgcaaaggctgtgtgaggagttagagtatagttccctgcttgatcaagcaagccgtatcgcagacccttgtgagaggatggtttatatagcagccttcgccgtttcagcctacagctccacttatcaccgggcaggctgcaagcccttcaatcccgtgttgggagagacgtacgagtgtgagcggccagatcgggggtttagatttataagcgagcaagtgtctcatcaccccccaatttctgcctgtcatgccgagtctgaaaatttcgccttttggcaggacatgaagtggaaaaacaaattttgggggaaatcccttgagatcgtccccgtgggaaccgtcaacgtgtcgcttccaaggttcggcgaccactttgagtggaataaggttacttcatgtattcacaacgtcctatcaggtcagcgctggattgagcactacggcgaagtacttatcaggaatacccaggacagttcgtgtcactgcaagattaccttctgcaaggccaagtactggtcttcaaacgtccacgaggtacagggggccgttctcagcagatctggccgtgtgctgcaccggttattcggaaagtggcatgaggggctttacagaggaccaacacctggaggtcagtgtatatggaagcctaattccatgccacctgatcatgaacggaattttggttttactcaattcgcgctggagttgaacgagctgacagccgagctgaagcggtccttgcccagcacggacacaaggcttaggccagaccagcggtacctggaggagggcaacattcaggctgctgaagcccagaaaaggaggatcgagcaattacagcgcgacaggcggaaagtcatggaggagaacaacattgtacaccaggcccgcttcttcagaaggcagaccgactcctctggcaaagaatggtgggtcacaaataacacctattggaggttgcgggcagaaccaggttacggaaacatggacggcgccgtgctgtggtag

SEQ ID NO: 248405 - RNA, 816 nt, synthetic construct
  misc_feature 1..816: note = Description of Artificial Sequence: Synthetic coding sequence
  source 1..816: mol_type = other RNA
atggcttcccccggttgcctgtggctcctagccgtcgcactgctcccttggacatgtgccagccgagctctccaacacttggacccccctgcccccttaccattggttatctggcacggcatgggaagcaggtatgtcgcccagaccggactcgaacttcttgcttccagcaacccaccagcctctagttaccagtcagcaggtatgatcggcgactcatgctgcaatcctctttccatgggagccataaaaaaaatggtggagaagaagatccctggcatttatgttttatccctggagatcggcaagacactcatggaggatgtcgaaaattcttttttcctaaatgtgaattcccaggtcaccacagtatgccaggccctggctaaagacccaaaacttcaacagggatacaacgcaatgggcttctcacagggcggtcagtttctgagagcggttgcgcaacggtgtccatctccacctatgataaacttaattagcgttggtggtcagcatcagggcgtcttcggactacctaggtgtcctggagagtcatcacacatctgtgatttcatccgaaaaaccttgaatgctggcgcttactctaaggtagtgcaggaaagactagtgcaagcagaatactggcacgaccccatcaaagaagacgtgtatcgtaaccactctatcttcttagcagatatcaaccaggagaggggaataaacgagtcttataaaaaaaatctcatggccctcaagaagtttgtgatggtaaaattccttaatgatagcatcgttgaccccgtggactcagagtag

SEQ ID NO: 248406 - RNA, 921 nt, synthetic construct
  misc_feature 1..921: note = Description of Artificial Sequence: Synthetic coding sequence
  source 1..921: mol_type = other RNA
atggcttcccccggctgcctgtggctgctggccgtcgccttactcccgtggacttgcgcatcaagggcccttcaacatctagatcctcctgcccctttacctcttgtgatctggcatgggatgggcgacagctgttgtaaccctctgagcatgggagcgatcaagaagatggtcgagaagaagatccccgggatctacgttctgtcactagaaatcggaaagacactgatggaggatgttgaaaattcattcttccttaacgtaaacagtcaagtcactaccgtttgccaggcgctggctaaggatcctaaactgcagcagggctataatgcgatgggttttagccagggaggccaatttctgagagcagtggcccagcgttgtccgagcccccccatgatcaaccttattagtgtgggtggtcagcaccaaggtgtatttggcctgcctagatgcccaggcgaatcctctcatatctgtgattttattcggaaaactttaaacgccggagcctacagcaaagttgtgcaagaacgccttgtgcaggccgaatattggcatgatccaattaaggaggacgtgtacagaaaccattctatatttttggcagacattaaccaagaaaggggaatcaacgagtcttataagaaaaatcttatggccttgaaaaagttcgttatggtcaagtttctgaatgatagtatagtcgatccagttgactcggagtggttcgggttttaccgcagcggccaagccaaggaaactatcccgttacaggagaccagcctatacactcaggatcgtctcggcctaaaggaaatggacaatgctggacagctcgtctttttagcaactgagggcgatcacttacagttaagcgaagagtggttttatgctcacattatcccctttttaggctag

SEQ ID NO: 248407 - RNA, 612 nt, synthetic construct
  misc_feature 1..612: note = Description of Artificial Sequence: Synthetic coding sequence
  source 1..612: mol_type = other RNA
atggcatcacctgggtgtctgtggctcctggccgtcgcgctgctcccatggacttgtgcctccagagcgctgcagcatctggatcctcctgcgcccctgcccttggtgatttggcatggcatgggagtcttcggccttcctcggtgccccggggagtcttcccatatctgcgactttataagaaaaaccctgaacgcgggcgcttacagcaaggtggtacaagagaggctcgtccaggccgaatactggcacgatcccatcaaggaagatgtgtacaggaatcatagtatttttctagcggacatcaatcaagagaggggcattaatgaatcctataaaaaaaatttgatggccctgaagaaattcgtaatggtgaagttcttgaacgatagtatagtggatccagtggattcagaatggtttggcttttaccggtccggtcaggctaaagagaccatccccctccaggagacatcgctgtacacccaagaccgcctgggtctgaaagagatggataacgccggacaattggttttcctagcaaccgaaggagatcacctccagctttctgaggaatggttctatgctcatattattccattcttgggctag

SEQ ID NO: 248408 - RNA, 921 nt, synthetic construct
  misc_feature 1..921: note = Description of Artificial Sequence: Synthetic coding sequence
  source 1..921: mol_type = other RNA
atggcctcaccaggatgtttgtggctgcttgccgtcgcgcttcttccctggacatgcgcctccagagcccttcagcacctggacccccctgccccactgccacttgtaatctggcatggaatgggcgacagttgctgcaaccctctgtccatgggcgccattaagaagatggtggaaaagaagatacccgggatatacgtgctcagccttgagataggcaagaccctgatggaggacgtcgagaacagtttctttctaaacgtgaacagccaggtgaccacagtgtgccaagccttggcaaaagacccaaagctacagcaggggtacaacgcaatgggattcagtcaaggaggccaatttctgagggcagttgcccagcggtgtccgagccccccaatgatcaatctcatttccgtgggcggccaacaccagggggttttcgggttgcctagatgccctggtgagagttcccatatctgtgacttcatcaggaagactctcaatgcaggcgcctactccaaagtagttcaggagagactggtgcaagcagaatattggcatgatcctataaaagaagacgtatacaggaatcactcaatcttcttggcagacatcaaccaggaacgcggtatcaacgaatcatacaaaaaaaatctgatggccttgaaaaaattcgtgatggtgaagttcctaaacgatagtatcgtcgaccctgtagattcggaatggtttgggttctataggtcaggtcaagcaaaagaaactattcctctccaggagacttctctctatacacaagatagactgggactgaaggagatggacaacgccgggcagctggtgtttctggccactgaaggggatcatctgcagctgtccgaggagtggttctacgcccatattatccctttcttgggctag

SEQ ID NO: 248409 - RNA, 2310 nt, synthetic construct
  misc_feature 1..2310: note = Description of Artificial Sequence: Synthetic coding sequence
  source 1..2310: mol_type = other RNA
atgggctgtaatatgtgcgtagtgcagaaacccgaagagcagtacaaagttatgctccaggtgaatggcaaagagctgagtaagctgtctcaggagcaaacactgcaggccttacggtccagtaaggaacccttggttatccaggtcctcagacgctctccaagacttaggggagattcttcctgccacgacctccagctggttgattccggcacacaaaccgacattactttcgaacacatcatggctctaggcaaactcaggcccccaacccccccaatggtaattctcgagcctcccccaattagtcacgagtactacgaccctgcagaattcatggagggtggccctcaggaggcagacagactggacgagctggaatacgaagaggtcgaactgtataagagtagccacagagacaaactgggattgatggtatgttaccgcacagacgatgaagaagatctcggaatctatgtgggagaggtgaacccgaacagtattgctgctaaggacggccgcattcgcgagggcgacaggattatccagatcaacggtgtggacgttcaaaatagagaagaagccgtagctatactgtcccaggaagaaaacactaacatcagtcttctagtggcccgcccagaaagccagctcgccaagcggtggaaagattccgacagagatgacttcctagatgattttggatctgagaacgaaggagagttgcgggccaggaaattgaagtcacctccggcacagcagccaggtaatgaggaggaaaaaggggcaccggatgctggtcctgggttgtccaactcccaggagcttgactccggagtcggtcgcacagacgaatccacccggaacgaggagtctagcgagcatgatctgttgggagacgagcccccttcaagtacaaacacaccggggtcattgcgcaaatttgggctccagggagacgccttacagtcaagggatttccacttctcaatggactctctgctcgccgaaggtgccggacttggagggggagatgtccccgggctcacagatgaggaatacgagcggtatcgtgaactgcttgagatcaagtgtcatttggagaacgggaatcagctgggcctactgttccctagagcatccgggggcaatagcgcattggacgtgaatcggaacgagagcctgggccacgagatggctatgctggaagaggagctgcgccatctggaattcaagtgtagaaacatcctccgtgctcagaagatgcaacagttgcgagaacggtgcatgaaggcctggctgttagaagaggaaagtctgtatgacctagcagcctccgagcccaaaaaacatgagctttccgacatcagcgaattgcctgaaaaaagcgacaaagatagtaccagcgcatacaatacaggagaatcctgccgctctaccccattgttggtcgagcccttgcctgagtctcccctccggagagctatggccggaaatagcaacctgaaccgcacgcccccaggtccagccgtggctacccctgctaaagctgcccccccacccggaagccccgcaaaattccgatcccttagccgggaccccgaggccggccgacggcagcacgctgaagagaggggccgccgtaacccaaaaaccggacttaccctagaacgagtcggaccggagtcttctccatacctctcacgccgacatcgcggccagggccaagagggggaacactaccactcatgtgtgcagttggctcccactcgtggattagaagaattgggccacgggccgctgtccctcgcgggcggccccagggtcggcggtgttgccgcggccgccaccgaggccccacgtatggaatggaaagttaaagtgcggagcgacggcactcgatatgtcgccaaacgaccagttagagacagactgttgaaagctcgcgcacttaagattagggaagaacgcagtggtatgacaacggacgacgatgcggtctctgagatgaaaatgggccgatattggtctaaagaggagcgcaaacagcatcttattcgtgcccgggaacagagaaaacggcgcgagttcatgatgcagagtagattagagtgcctacgcgagcaacagaacggcgattccaaaccggagctgaacataattgcacttagccaccgtaaaaccatgaaaaagaggaacaaaaaaatactcgacaattggataactattcaggagatgttggctcacggtgcccgatctgcggatgggaaacgggtatacaatcccttgctgtccgttacgacagtgtag

SEQ ID NO: 248410 - RNA, 477 nt, synthetic construct
  misc_feature 1..477: note = Description of Artificial Sequence: Synthetic coding sequence
  source 1..477: mol_type = other RNA
atgctcgaggccatggccgagcccagtcctgaagaccctcctcctacccttaagcctgaaacacaacccccagaaaaacgtagacgaactatagaggattttaataagttttgttcttttgttctcgcctacgctggatatatacccccatcaaaagaagaatctgattggcccgcctccggatcttctagtccattaaggggcgaatccgccgccgactcagacggatgggattccgcacctagtgatctacgcactatacaaacatttgtcaaaaaagcgaaatcctccaaaagaagggccgctcaggccggacccacacagccaggcccaccccgcagcaccttcagccgactgcaggcaccagattcagcaaccctgctcgagaaaatgaagctaaaggactctctgtttgaccttgatgggccaaaggtcgcaagtcccctctcacccccttgcgccgcaaataccccttag

SEQ ID NO: 248411 - RNA, 1665 nt, synthetic construct
  misc_feature 1..1665: note = Description of Artificial Sequence: Synthetic coding sequence
  source 1..1665: mol_type = other RNA
atgcgccgacctctaagtaaatgcgggatggagcctggaggcggggatgcctctctaactttgcacggtttgcagaaccgtagccatggcaaaatcaaattgcggaagcgcaagagcaccctctactttaacactcaggaaaagtcggccagacgccgtggagacctcctcggagaaaacatctacctcctgctgttcacgattgccctccgaattttgaactgtttcctcgttcagacctcctttgtccccgatgagtattggcagtccctggaagttagtcaccatatggtgttcaactatggctatctgacttgggagtggaccgaaaggctgagatcctacacctaccccctcatctttgcaagcatctacaaaatcttacaccttctcggcaaggattccgtgcagttgctgatttggattccacggctggcgcaagctctgctctccgccgtagcagacgtccggctgtacagtctgatgaaacagctcgagaaccaggaggtggcccgctgggtgttcttctgtcagctctgttcttggttcacatggtattgttgcacacgcaccctcaccaatacaatggaaacggtgctcacgatcatcgcccttttctactaccctctggagggcagcaaaagtatgaacagtgtcaaatactcatccctggtggcacttgcctttatcatcaggcctaccgctgtgatcctatggacccctctgctgtttcggcacttctgccaggagcccaggaagctggatcttatcctccaccactttcttcctgtgggctttgttaccttgtcactctcactgatgatcgacaggatcttcttcgggcagtggacattggtgcaatttaactttcttaagtttaacgtcctgcagaactggggaaccttctacggctcccacccctggcactggtacttttcacaaggattcccggtgattttgggtacacacctcccatttttcatccacggttgttacctggctcccaagaggtaccggatactcctcgtcactgtactgtggactttgctcgtatacagtatgctgtcccacaaggagtttaggttcatctacccagtgcttccattttgcatggtcttctgcggctactccctgacccatctaaagacttggaagaagccagcattgtcgtttcttttcttgtccaatttattcttagctctctacaccggactcgtgcatcagcgggggaccctcgacgtgatgtctcatattcaaaaagtttgttacaataaccccaataagtcttctgcatcaatattcatcatgatgccctgccactctacaccctactactcacatgtgcattgccctctgccaatgcgtttccttcaatgccctccggacctcactggcaagtcccattacttagacgaagccgacgtgttctacctaaacccgctgaactggctgcatcgtgagtttcatgatgatgcttccttgcccacccacttaatcacattttctatcctcgaagaggaaattagcgcatttttaatttcatctaattacaagcgcaccgctgtcttctttcatacacacctgccagagggccggatcggatcccatatatatgtctatgaacggaagctgaagggtaaatttaacatgaaaatgaagttttag

SEQ ID NO: 248412 - RNA, 1482 nt, synthetic construct
  misc_feature 1..1482: note = Description of Artificial Sequence: Synthetic coding sequence
  source 1..1482: mol_type = other RNA
atgtggccccaggatcccagccgcaaggaggtacttcgattcgcagtatcctgtcgaatcctgactcttatgctacaggcactcttcaacgccatcatccctgatcaccacgccgaagcattctctccgcctaggctggcaccttccgggttcgttgatcaattggtagagggcctactaggtggcctgagtcattgggacgcagaacacttcctgtttatcgccgaacacggctatctgtatgaacacaatttcgctttttttccagggtttcccttggctcttctggtgggaactgaactcctccgcccactccgagggctgttgtccttgcgcagttgcctgcttatatctgtagcctctctgaacttcctgttttttatgctggcagccgtggcgctccatgatctcgggtgccttgtactccactgtccgcatcagtctttctacgccgccctgctattctgcttatcgcctgccaacgttttcttagctgccggctacagcgaggcactgtttgctctacttacttttagtgccatgggccagctcgaacggggtcgggtttggacatcagtccttctattcgcttttgcaaccggcgtacgctcaaacggccttgtgtcggtcggttttctcatgcactcacagtgtcagggcttctttagcagcttgacaatgcttaaccctctgaggcaactgttcaaactgatggcgtccctctttctctccgtgtttactctgggattgccctttgcacttttccagtactatgcttacacacagttttgtcttccgggaagcgcccgccccatcccagaacccctggtgcagctggcagtggataaggggtatcgaattgcggagggcaatgagccgccttggtgcttttgggacgtgcctctgatttactcttatatccaggatgtatattggaacgtaggattcctgaagtattacgagctaaaacaggtgccaaactttcttcttgccgcaccggtggccattctggtggcatgggcaacctggacgtacgtcacaacacacccgtggctgtgcctcaccctgggactgcagagatcaaaaaacaacaaaacactcgagaagcctgacctgggttttctgagccctcaggtgtttgtctatgtggtgcatgctgccgtccttttgctctttggaggactgtgtatgcatgtgcaagtgctcaccagatttcttggcagcagcacaccgattatgtactggttccccgcacatctcctccaagatcaggagcctttgctgaggagcctcaagaccgtgccatggaaacccctggccgaggattctccacctgggcagaaagtgccacggaatcctataatgggcctcctttaccactggaaaacatgctcacctgttacacgatacatccttggatacttcttaacctactggcttttgggcctactgctgcactgtaactttcttccctggacatag

SEQ ID NO: 248413 - RNA, 2529 nt, synthetic construct
  misc_feature 1..2529: note = Description of Artificial Sequence: Synthetic coding sequence
  source 1..2529: mol_type = other RNA
atgtcaaggcctctgagcgaccaagaaaaacggaagcagatttcggtgagggggctcgccggcgtagagaacgtaactgagctgaagaaaaattttaatagacatctccatttcactctcgtaaaggatagaaacgtggccactcccagggactattacttcgccctggcccacaccgtaagggatcacctggttggcaggtggataaggacccagcagcattattacgagaaagacccaaaaagaatctactatttgtcattggaattttatatgggcaggaccctgcagaatacaatggtgaatttggcccttgagaatgcatgcgacgaggcaacctatcagttgggcttagatatggaggagctagaggaaattgaagaagacgccggacttgggaatggagggctcggccgcttggccgcatgtttccttgacagtatggccaccttaggtttggctgcttacggatacggcatacggtacgaatttggcatcttcaatcagaaaattagcggtggatggcaaatggaagaggcagatgattggcttagatatggcaacccatgggaaaaagcccgcccagaattcactttaccagtgcatttctacggtcatgtcgaacacacttcgcagggcgccaaatgggtggacactcaagtcgtcctggccatgccctatgacaccccagttccggggtatcgcaataacgtcgtgaacactatgaggctgtggtccgccaaagctccaaacgacttcaacctcaaggacttcaacgtggggggctacattcaggctgttttggaccggaacctggccgaaaacatttctagggtgctctaccccaatgacaatttcttcgaagggaaagagctgagactgaagcaggaatacttcgtagttgctgctactctgcaggacattataagaagattcaaatccagtaaattcggctgcagagatcctgtgcggacgaacttcgatgccttcccggacaaagtcgccatccagctgaacgatacacatccatcactggcaattcccgagctcatgcgaatcctggttgatctggaacgcatggattgggacaaggcctgggacgtgacagtccgtacctgcgcctacacaaatcacaccgttctaccagaggctctggaaaggtggcctgtccacctgttggagacactactgcctcgtcacctccagatcatatacgagatcaatcagcgcttcctcaatagggtggccgccgcgtttcccggtgacgtcgaccgccttaggcgaatgtctctcgttgaagaaggcgccgtgaaaaggatcaatatggcccatctgtgcatagccggatcccacgccgtgaatggagttgcgcgcatccacagcgagattttgaaaaaaactatttttaaggacttttatgagttagagccccacaagttccagaataagaccaacggcataactccaagacggtggctggtactgtgtaatccgggtctcgctgaagtaatcgccgaaaggattggggaggattttattagcgacctggaccagctccgcaaactcctgtccttcgtcgacgacgaggcctttatccgggatgtagcaaaggtgaaacaagaaaataaactgaagtttgccgcgtacctcgaaagggaatacaaagtgcacattaatcctaacagcctgttcgatatccaggtgaagcggatccatgaatataagcgccagcttttaaactgcctgcacgtcatcactctgtacaacaggataaaaagagagcctaacaagttcttcgtacccaggactgtcatgatcggcgggaaggctgctccaggataccatatggccaaaatgataattcggctggttaccgccattggcgatgtcgttaatcatgatccagctgtcggcgacagactcagagtcatcttcttggaaaactacagggtatcgctagccgagaaagtcatcccggccgccgatctctcagagcagatcagcaccgccggaaccgaggccagtggaacaggtaatatgaagtttatgctcaacggagctcttactattggcaccatggacggcgcaaacgtggagatggccgaggaggccggggaagaaaacttttttatattcgggatgagagtggaggacgttgataaactggatcagagggggtataatgcacaggagtactatgacaggattccagagcttcgtcaggtgattgaacagctgagctccggttttttcagccccaagcaacccgacctgtttaaggacattgttaacatgctcatgcaccacgatcggttcaaagttttcgctgattacgaagattacatcaagtgtcaggagaaggtgtccgcactgtacaagaatccccgggaatggaccagaatggttatccggaatatcgctacttcaggaaaattcagtagcgaccggacaatcgctcaatacgctcgcgagatttggggagtggagccaagtaggcagcgtctgcccgctcctgacgaagccatttag

SEQ ID NO: 248414 - RNA, 2646 nt, synthetic construct
  misc_feature 1..2646: note = Description of Artificial Sequence: Synthetic coding sequence
  source 1..2646: mol_type = other RNA
atggctgcgccaggcgccccggctgaatacggatacatcagaaccgtgttaggccagcagatcctaggtcagcttgattcctcctcgctcgctctccctagcgaggctaaactgaagctcgcaggcagcagtggtagaggtggccagacagtaaagagtctgcgcatccaggagcaggttcagcagacactcgcccgaaagggcaggagttccgtgggaaacggcaacctgcataggacgtcctctgtgccggaatatgtctataatctgcacctcgtagaaaacgatttcgtgggtggaaggtccccggtccctaagacctacgacatgttgaaagccggcaccacagccacatacgaaggaaggtggggaagggggactgcccagtatagttcccagaaaagcgtggaggagaggtctcttcgccaccccctacgccggcttgagataagtccagattccagtccggagagagcccactatacgcatagcgattatcaatacagccagagatcacaggccggacacacattgcaccaccaggagtctagacgggccgcgttgctcgtgcctccaagatatgccaggtcagaaatcgtaggagtctcgagggccggcaccacatcaaggcagcgccatttcgacacctatcatcgccaatatcagcacggtagcgtatctgacactgtgtttgacagtattcccgcaaatccggccctgctgacatatcctcgccccggcacgagtagaagtatggggaatctgcttgaaaaggaaaactacctgacggccggactcacagtgggacaggtgagacccctggttcctttgcagccagtaactcaaaatcgagcctcacgtagttcatggcatcagtcatcatttcactctacccgtacactgagagaagccgggccctcggttgctgttgacagtagcggacgaagagcccatttgactgttgggcaggctgcggctgggggctccggcaatctcctcacagaaaggtcaacctttaccgacagtcagctggggaacgcggacatggagatgacactggagcgggctgtaagtatgttagaggcagaccatatgctgccaagccgcatctctgccgccgccacgtttatccaacacgaatgctttcagaagtcggaagctagaaagagagtcaaccaactgagggggatcttgaaactcttgcaactgcttaaggtacagaatgaggatgtgcagcgcgccgtttgcggcgccctcaggaatttagtatttgaggacaacgacaacaagttagaggtggccgagttgaatggagtgcctagattactacaggttctgaagcagacccgcgacttagagacaaaaaagcagatcactgaccataccgtaaacctgaggtcccgtaatggctggcccggtgcagtggctcatgcgtgtaacccttccacactggggggacagggtggcagaataacccgatctggagtacgcgaccagcctgaccagcacggtctgttgtggaacctcagttctaatgataaactgaagaatctcatgatcaccgaggctctgctgacactcaccgaaaatattattattccctttagcggatggcccgaaggggattaccccaaggcgaatggactgttagattttgatattttttacaacgtcaccggctgccttcgaaacatgtcgtcagcaggcgcagatggtcggaaggccatgcgcagatgcgacggcctgattgactccttggtacactatgtccgtggcaccattgctgattaccaacccgacgacaaagccacagaaaactgcgtgtgtatcctacacaatctgtcctaccaactggaggctgaactgcccgaaaagtattcccaaaatatttatatccagaaccgcaacatccagacagacaataacaaatccataggctgttttggttctaggagccgcaaagtcaaagagcaataccaggatgtgcccatgcccgaagagaagagcaaccccaaaggggttgagtggctgtggcactctatcgtaatccggatgtacttatctctgattgcaaaatccgtgcgtaactacacccaggaagcctcacttggagctctccaaaatttaacagctggtagcgggccgatgcctacaagcgtggcacagacagtcgtgcagaaagagtccggcctccagcacactagaaaaatgttacatgtcggcgatccatcggtcaagaaaaccgctatctctctacttaggaacttatcccggaatctcagtctgcagaacgaaatagcaaaagagacactgccagacctcgtaagcattatcccagatactgtgccttctactgacctcctcattgagaccaccgcctctgcttgctacacgctgaacaacatcatccagaacagctatcagaacgccagggacttattgaacactggcggtattcagaagatcatggccatttccgctggggacgcctacgcctcaaacaaggcaagcaaggccgccagcgtgctgctttattctctgtgggctcatacagagctgcaccatgcctataagaaggcccagttcaaaaaaacggactttgtaaactctagaacagccaaggcctaccactccctgaaagattag

SEQ ID NO: 248415 - RNA, 291 nt, synthetic construct
  misc_feature 1..291: note = Description of Artificial Sequence: Synthetic coding sequence
  source 1..291: mol_type = other RNA
atggaacataaagaagtggttttgttgctcctgttgttcctcaaatctggacagggcgagcctctcgacgactatgtgaacacacaaggaccgtcattgttcagcgtgacaaaaaagcaactcggcgccgggtcaagagaggagtgtgccgctaagtgtgaagaagacaaggagtttacttgtagagctttccaataccactcaaaggagcagcaatgtgtaattatggcagaaaacagaaagtcatccatcatcatccgaatgcgcgacgctgtgctcttcgaaaagtag

SEQ ID NO: 248416 - RNA, 291 nt, synthetic construct
  misc_feature 1..291: note = Description of Artificial Sequence: Synthetic coding sequence
  source 1..291: mol_type = other RNA
atggaacacaaagaagtggtgctcttgcttttgttgtttctcaaatctggccaaggtgaacctctggacgactatgttaacactcaaggccccagcctcttcagtgttacaaagaaacaactgggagcaggcagcagggaggaatgtgcagcaaaatgtgaggaagacaaagaattcacatgcagagcttttcagtaccattccaaagaacaacagtgcgttataatggcagaaaataggaaaagcagcattataattagaatgagagacgccgtgctcttcgaaaagtag

SEQ ID NO: 248417 - RNA, 291 nt, synthetic construct
  misc_feature 1..291: note = Description of Artificial Sequence: Synthetic coding sequence
  source 1..291: mol_type = other RNA
atggagcataaagaagttgtgctgctgctactcctgtttctaaaatccgggcagggcgagccattagacgactatgtgaacacacaaggacccagtctgttctccgtaacgaaaaagcagctaggagctggatccagagaagagtgcgccgcaaaatgtgaagaggataaggagttcacctgtcgcgccttccagtatcactctaaagagcagcaatgtgtaataatggcggaaaatagaaagtcttctatcatcattaggatgagagacgcggtgcttttcgaaaaatag

SEQ ID NO: 248418 - RNA, 405 nt, synthetic construct
  misc_feature 1..405: note = Description of Artificial Sequence: Synthetic coding sequence
  source 1..405: mol_type = other RNA
atgaagtccctgacttggattctcggcttgtgggctttagcagcttgtttcaccccaggcgaatctcagagaggcccacggggcccgtacccgcctggcccacttgcaccccctcctccaccctgctttccatttgggaccggattcgtgccaccgccccatcctcctccttacggcccaggcaggtttccacctccactgtcccctccgtatggcccaggtagaatcccacccagtccccctcctccttacggacctggccgaatccagagccactcccttcctcctccctacggaccaggatacccccagccaccatcacagccaaggccctatccaccaggccctccttttttccctgtgaacagtcccacagaccctgccctaccaacacctgcaccttag

SEQ ID NO: 248419 - RNA, 3075 nt, synthetic construct
  misc_feature 1..3075: note = Description of Artificial Sequence: Synthetic coding sequence
  source 1..3075: mol_type = other RNA
atggcgcagggcgcaatgcggttctgttcggaaggagactgtgcgatttccccacccagatgcccacgccgatggctccctgaaggaccagtcccacaatctccgccagccagcatgtacggatctacgggctcactcctcaggcgcgtggccggtcctggcccgagagggcgcgagcttggcagagtgacagccccctgcaccccattgcgcgggcctccaagcccaagggtggcccctagcccgtgggccccatcctctcctaccggccaacccccaccgggcgcacagtcctccgttgtaatttttagattcgttgagaaggccagcgtgaggcccctcaacgggcttcccgctcctggaggcctgtcaagatcctgggaccttggcggagtttctccgccccggcctaccccagctctgggacctgggagtaatagaaagctgcggctggaagcaagtacctccgatcctcttccagcgcgtggagggtcagcactgccgggaagccgcaacctagtgcacggacctcctgctccaccacaggtcggcgctgacgggctgtactcctctctccctaatgggttaggcggcccacccgaaagactggccactttgtttggaggccccgctgataccggctttctaaatcagggagatacctggtcatctcctcgtgaggtgtcatcccacgcacaacggattgctagggcaaagtgggagtttttttacggatccctagatcctccctccagcggcgccaaacccccagaacaagctcctccaagccccccaggtgtgggctcccgccagggctctggggttgcagtgggccgggctgctaaatactctgagaccgatcttgacaccgtgccactgagatgttacagggagactgacatcgatgaagttctcgccgagcgcgaggaggcagacagcgccatagaatcccagccctcaagtgagggacctcccggcacggcgtatcctccagctccacgccccgggcccctaccgggacctcacccttccttaggatccggaaatgaagatgaggacgatgatgaagcggggggagaagaggacgtagacgatgaggtgttcgaagcttccgaaggcgccaggccggggtcgagaatgccacttaagagtccagtgccttttctgcctggcacatctccatcagccgacggacctgatagcttctcatgcgtttttgaggccattctggagtcacaccgtgcgaagggtacgagctacactagcctggccagcctggaggcactagcctcaccggggccaacacaaagtccattttttacattcgagctcccaccccagccacctgcaccacggccagacccacctgcccccgcacccctcgcccctctggagcctgatagcggcacaagttctgcagcagacggcccctggactcagcgaggcgaagaagaggaggccgaggccagggccaaattggctccaggaagggaaccccctagcccatgtcactctgaagatagcttaggtctgggggctgcccccctggggtcagagcctccactgtctcaactcgtctctgacagtgatagcgagctcgacagcaccgagaggttggcattaggcagcaccgacactttgtcaaacggacagaaagccgacttagaggctgcccagcgacttgccaagagactgtatcgccttgatggattcaggaaagccgacgtcgcccgccatctgggcaagaataacgacttcagcaagttggtggccggcgaatatttaaaatttttcgtcttcacaggaatgaccctcgaccaagcactgcgggtgtttcttaaagaattggccttgatgggcgaaacccaggaacgagagcgcgtcctggcacacttttctcagagatactttcaatgtaatcccgaagccctcagttctgaggacggagcacacaccctgacatgcgccctcatgttactgaatacagacttgcatggtcacaacatcgggaagcgcatgacatgcggcgacttcattggaaacctggaggggctcaatgacggcggggattttccacgagagctgttaaaggccctgtactcgtccataaaaaatgagaaactgcagtgggcgatagatgaggaggaattgagaagatccctgtccgagttggcagacccaaatcctaaagtaatcaaaaggatttctggcgggtctggatcaggcagctctcccttcctggatctcacaccagagcctggggccgccgtctataaacatggtgccttggtgaggaaggtgcatgccgaccccgactgcagaaagacccctagaggtaaaaggggctggaagtctttccatgggatcctaaaagggatgatactgtacctgcaaaaggaggagtacaagccagggaaagccctttcagagaccgaactcaagaacgccatttctatacaccatgcactggctacccgagccagcgactattccaaacggcctcatgttttctacctgcggacagccgactggcgcgtgttcttatttcaagcaccaagtctggaacagatgcagtcttggatcacacgtatcaacgtcgtggcagcaatgtttagtgccccaccttttccagccgctgtctcctcccagaagaaattcagtagaccactgttgccatcggctgccacacggttgagccaggaggagcaggtccggactcacgaggcaaaattgaaagccatggctagcgagcttcgcgagcacagagcagcccagttaggaaaaaaggggcgcgggaaagaagctgaggagcagcggcagaaggaagcctacctcgagtttgagaaaagcagatacagcacatacgctgccctgctaagagtcaagttaaaggcaggaagcgaggagcttgacgctgtggaagccgccctagcccaagctgggtcaaccgaggatgggttacccccatcacacagtagtccttctctccagcccaaaccaagcagccaacctcgcgcccaaagacactccagcgaacctcggccgggtgcggggagcggtcggaggaaaccgtag

SEQ ID NO: 248420 - RNA, 2373 nt, synthetic construct
  misc_feature 1..2373: note = Description of Artificial Sequence: Synthetic coding sequence
  source 1..2373: mol_type = other RNA
atgaaagcgttcggtccgccccacgagggaccattgcagggccttgtcgcatccagaattgagacttatggaggccggcatcgtgccagtgctcagtcaacagccggtcggctttaccctcggggataccctgtgctggacccctctagacggcgcctccaacagtatgttccatttgcccgtggttccgggcaggcaagagggctttcacccatgagactacgagaccccgaacccgagaagcgccatggggggcacgtgggtgctggactgttgcacagcccgaaactgaaagaacttaccaaggctcacgagttggaagtgcgactgcacaccttttctatgttcggcatgcctcgcctgccacctgaagatcgtcgccactgggagatcggcgagggcggcgactctgggcttacgatcgagaaatcttggagagagctcgtccctggtcataaggaaatgagccaagaactatgtcaccaacaagaagccctctgggaacttctgacaacggagcttatttacgtccggaagctgaagatcatgacagacctgttggccgccggattgctgaacctgcagcgggtagggctgcttatggaagtgtccgccgaaacactttttggtaacgtgccttccttgatccgcacccacagatcattctgggacgaagttttgggcccgaccctcgaagagaccagagcttctggccagcccttggatccaatcggcctgcagagcggatttctgactttcgggcagcgctttcatccctatgtccaatattgtctgcgcgtaaagcaaactatggcctacgcccgggaacagcaggaaaccaaccccctgtttcatgcttttgtgcagtggtgcgaaaagcataagcgcagcggtcgtcagatgctgtgcgacttacttatcaaaccccatcaaagaatcaccaaatacccacttttactgcacgctgtgctgaagcgaagccccgaagctcgggctcaggaagcactgaatgcaatgattgaagccgtggaaagcttcctacgacacataaacggccaggtccggcaaggggaggaacaagaatctctcgccgccgcagctcagcggataggaccatacgaggtgctcgagccgccctctgacgaagtcgagaagaatctacgaccattcagcacactggatctcacctcacctatgcttggggtggcaagtgagcacactcgtcagctgctgctcgaaggacctgtcagggttaaagagggcagggagggaaagctggatgtgtatttgttcctcttttctgatgtactgcttgtgacaaagcctcagaggaaagctgacaaggccaaggtcatcaggcctccactgatgctagagaaacttgtgtgtcagcccctacgcgaccctaactcttttctgttaattcacctgaccgagttccagtgtgtatcatcagccttgctggtacattgtccaagtcctacagatcgggcccagtggttggaaaagactcaacaggcccaggccgctctgcagaagctgaaggctgaagagtatgtccagcagaaaagagagttgctcaccttatatagagaccaagatcgggagagcccttcaaccagaccaagcaccccctctctcgaaggctcccagtcttcggccgagggccgcacccccgagttcagtaccatcattccccatctcgtagttaccgaggatactgatgaagatgcgccactggttcccgacgacacttcagacagcggatacggcacattgataccgggaacaccaactgggtccagatcccctctcagtcgcctgcgacaacgtgcactgcggcgagaccctaggctaacgtttagcaccctggagctgcgtgatattccattgcgacctcatccgcctgacccccaggccccacagagacgatccgcccccgagcttccagagggcattctgaaaggcggctcgttaccccaggaggatccccctacttggagcgaggaggaggacggtgcctctgaacgcgggaatgtggtcgtcgagacactccacagagcaagactgaggggacagctcccatcttccccaactcacgcggactccgccggggaaagcccttgggaatcatccggcgaggaggaagaggagggccctctctttctgaaggcgggacacacgtcactgcggcccatgcgcgccgaagatatgctgagagagattcgcgaggaactcgcctcccaaaggatagagggcgccgaggaacctagggatagccgccccaggaagcttaccagggcccaactacagagaatgagaggtcctcacatcattcagctcgatactccgttatcagccagtgaggtatag

SEQ ID NO: 248421 - RNA, 819 nt, synthetic construct
  misc_feature 1..819: note = Description of Artificial Sequence: Synthetic coding sequence
  source 1..819: mol_type = other RNA
atggtgttgcttactgccgtgctccttttgctggctgcctacgctggtccagcccagagtctagggtccttcgtgcattgtgaaccctgtgatgaaaaggctctgtctatgtgccctccctcaccactgggttgcgaactggttaaagagcccgggtgtggctgctgcatgacctgtgccctcgccgaaggccagagttgcggagtgtacaccgagcgatgtgcccaggggctgaggtgtcttcctagacaggacgaagagaaaccgctacatgctctcttacacggaagaggggtctgtctgaatgagaaatcctaccgtgaacaggtgaaaatcgagagagattcgagagagcacgaggagccaaccacaagcgaaatggcagaggaaacctactcccctaagattttcaggccgaagcatacaagaatctccgagctcaaggctgaagcagtgaaaaaggataggcgaaaaaagctgactcaaagcaaattcgttggaggcgcagagaataccgcccaccctaggataatatccgcacccgaaatgcggcaggaaagcgaacagggaccttgccgtagacacatggaagcttccctgcaggagctgaaagctagccccagaatggtaccccgagccgtgtatcttcctaattgtgaccggaaggggttctacaaacggaaacaatgtaagccttcaagggggcgtaagcggggcatttgttggtgtgttgataagtacggaatgaaattaccaggcatggagtacgttgacggagattttcagtgccacacatttgattcatccaacgtggagtag

SEQ ID NO: 248422 - RNA, 2031 nt, synthetic construct
  misc_feature 1..2031: note = Description of Artificial Sequence: Synthetic coding sequence
  source 1..2031: mol_type = other RNA
atggctgccgcttctagcccaccgcgcgccgagaggaagagatggggatggggcaggctccctggggcaagaagggggtctgctggcctcgcgaaaaagtgccctttcagtttagagctggcagaaggaggaccagccggaggcgccctctatgcacccatagcacccggggcgccgggacctgcccctcccgccagccccgctgcccccgctgccccccctgttgcctccgatctcggaccacgcccacccgtcagcctggacccgcgagtatccatttattctaccagacgtccagttctcgcgcggactcatgtgcagggaagggtctacaacttcctcgagaggcccaccggctggaagtgtttcgtgtaccacttcgccgtgtttctgattgtattggtgtgccttatctttagtgtgctgtctactatcgagcaatatgccgccttggctactggaactctgttttggatggagatcgtgttggtggtcttttttggcaccgaatacgttgttaggctttggtctgccggttgcagaagtaaatacgtcgggttgtgggggcggctccgttttgccagaaaaccaatctccatcatagacctgatagtcgtggtggcttctatggtggtgttgtgcgttggatccaaaggacaggtgttcgccactagcgcaatcaggggcatacgttttctgcaaatactgagaatgctacacgtggacaggcaaggaggaacatggagactccttgggtcagttgtgttcatccatcgccaggagcttatcactacactttatatcgggtttttgggccttatcttctcttcttatttcgtatacttggccgaaaaagacgctgtgaatgaatcaggtagggttgaatttgggtcctacgctgatgccctttggtggggcgtagtcacagttaccactatagggtacggtgataaagtgcctcagacatgggtgggcaagacgattgcatcctgttttagtgtgttcgccatcagcttttttgcacttccagccggcattctcgggagcggcttcgccctgaaagtccagcagaagcagcggcagaagcactttaatcgccagataccagctgccgcctcactgatacagaccgcttggagatgctatgcagctgagaaccccgacagctcaacctggaaaatttatattagaaaggcacctagaagtcatactctcttatccccttctccgaaacccaaaaaatcagtggtcgtgaagaaaaagaaatttaagctagacaaggataacggggtaaccccgggggaaaagatgctgacagtcccacacataacctgcgaccctccagaggagcgaaggctggaccatttcagcgtggatggatatgactcgagtgtacgcaaatcacctactctactcgaagtgtctatgccccatttcatgagaaccaactcttttgcggaggacctggacctagagggcgaaacactgcttactcctattacgcatatttcacagctgagggagcaccacagagccacaatcaaggtgataaggcgaatgcaatattttgttgctaaaaaaaaatttcagcaagctcggaaaccctacgacgtgcgcgacgtaattgaacagtattctcagggccacttgaatctcatggtgcggataaaggaattacagcgacgactggaccagagcatcggcaagccttcactgtttataagcgttagtgagaaatcaaaagaccgcggatctaataccattggggccaggctgaaccgggtggaagacaaggttacccagctggaccaaaggctggccctcatcactgacatgctacatcagctgctgtccctgcacggaggctccacacccggtagcggaggacccccaagggaaggtggggcccacattactcagccgtgcgggagcgggggcagtgtagatccagaactttttttgccatccaacaccctcccaacttacgaacaactcaccgtccctaggcggggacccgacgagggctcctag

SEQ ID NO: 248423 - RNA, 1104 nt, synthetic construct
  misc_feature 1..1104: note = Description of Artificial Sequence: Synthetic coding sequence
  source 1..1104: mol_type = other RNA
atgtaccccgagagtacgaccggatcccctgcccgactctctctccgacagacagggtcacccggaatgatttactccacccgctacggctcacctaagcggcaactgcagttctatcgcaaccttgggaagtccggcctgagggtgtcatgccttggccttggcacttgggtcacgtttggcggtcagatcacagacgaaatggctgaacagctgatgaccctcgcttacgacaacgggattaatttatttgataccgccgaagtttacgctgctggcaaggcagaagttgtgctgggaaacatcataaagaagaagggatggagaagaagctctttagtcattactaccaagattttctggggcggcaaggcagagacggaacgaggattgagtagaaagcacatcatcgagggactcaaagcttcattggaaagattacagctagagtatgtagatgttgtgtttgcaaaccgaccagaccctaatacacctatggaagaaacggtgagagccatgacccatgtgatcaaccaaggaatggccatgtattgggggacctctcgctggagctcaatggaaattatggaggcctactccgtggcgcggcagttcaatctgactcccccaatatgtgaacaagccgaataccacatgtttcagcgcgaaaaagttgaagttcaattaccggaacttttccataaaatcggcgttggtgccatgacatggagtcctctggcctgtggcatcgtgtccgggaaatacgactccgggatcccaccttactctagggctagtctgaagggctatcaatggctgaaggataaaatcctgtccgaagaggggcgccgtcagcaagccaagttgaaggaacttcaggccattgctgagagattaggatgtaccctgccccagttggcaattgcttggtgcctgaggaatgaaggtgtgagttctgttcttctgggtgcatcaaatgccgaccagctgatggaaaacatcggcgctattcaggttctgccaaaactctcttcaagcatcattcatgaaatcgactcaattctcgggaataaaccttacagcaaaaaagattatagatcctag

SEQ ID NO: 248424 - RNA, 1209 nt, synthetic construct
  misc_feature 1..1209: note = Description of Artificial Sequence: Synthetic coding sequence
  source 1..1209: mol_type = other RNA
atggggccattgcctgcaccttcttgtactcagaggatcacatggaaaggcctgctcctgaccgctagcttgctgaacttttggaaccccccaacaaccgcagaagtcactatcgaggcccagccccccaaagtatctgagggaaaagatgtgctgctgctcgtccataatctgccgcagaacctgcctgggtacttttggtataaaggtgaaatgacggacttgtatcactacatcatctcatatattgtggacggcaagattattatctatggaccagcgtactcaggcagagaaactgtgtactccaacgcatccctgctaattcagaacgtaacaaggaaagatgctggcacctataccttacacatcatcaagaggggcgacgaaacacgcgaggaaattaggcatttcactttcaccctatacctggaaacccctaagccttacatttcaagctccaatctcaatccccgcgaggctatggaggctgtccgcctgatctgcgaccccgagacattagacgccagttacctctggtggatgaatggtcagtctctacccgttacccaccggttgcagctgagcaaaactaacagaaccctgtacctgtttggcgtcacaaagtatattgcaggtccatacgagtgtgagatcaggaatccagtgtccgccagcaggagtgatccagtaaccttaaacctcctccacggtcccgatctgcccagaatttatcctagtttcacatactaccgtagcggagagaatcttgatctttcttgctttaccgaaagtaatccccctgccgagtatttttggactattaacggcaagttccagcaatctggccagaaactgttcatcccccaaattactagaaaccattccgggctgtacgcttgttccgttcataattctgctacaggcaaagaaatatcaaagtctatgacggtgaaagtcagtggtaaatggatccctgcgtcactagccgtgggattttacgttgaatccatttggttgagtgaaaaatcccaagaaaatatttttattccgtctctttgcccgatgggcacatccaaatcccagatactcttactgaatcccccaaatctctcattacagacattgttctccctcttcttttgcttccttatggctgatctggtgtcagggcttaaaaaggtggggagagggctctatcagccttag

SEQ ID NO: 248425 - RNA, 1281 nt, synthetic construct
  misc_feature 1..1281: note = Description of Artificial Sequence: Synthetic coding sequence
  source 1..1281: mol_type = other RNA
atgggcccactgccagcaccttcatgtacgcagcgcattacctggaagggcttactcctgacagcctccctgctgaacttttggaatccacccaccacagccgaggtgaccatagaggcacagccccccaaagttagcgaaggaaaagatgtcttgttgctcgtgcacaatctgccccagaacttacccggctatttttggtacaaaggagagatgacggacctttatcactatatcatctcatacattgttgatgggaagataattatttatgggcctgcatattcagggagggagacagtgtacagcaatgcctctctgcttattcaaaatgtcacccggaaagatgctggcacatatactctgcacatcatcaaacgaggggacgaaactagagaagaaatcaggcattttacctttactctgtacttggaaaccccaaaaccttatatctcctcctccaacctaaatccacgtgaagcaatggaagctgtcaggctgatttgcgatcctgagaccctggacgcatcatacctgtggtggatgaacggccagagcctacccgtcacccaccggttgcagttatctaagaccaatcggaccctatatctcttcggggtgaccaaatatattgcaggaccctacgaatgtgaaatcaggaaccccgtcagtgcttcccggtccgatcctgtcacccttaacctgctcccaaagctccccataccctatattaccattaataatcttaacccccgtgagaacaaggacgtcctagcattcacttgcgagcccaagtctgaaaactatacctacatttggtggctcaacggtcaatctctgcccgtctctccaggcgtcaaacgtccgatcgaaaatagaatccttatcttacccagcgtcacaagaaacgaaacaggcccttatcagtgcgaaattagggatagatatggtggcttgaggagtaaccctgtgattttgaatgtactgtacggacccgatctgcctcgtatctatccatccttcacctactaccgaagcggagaaaatctggacctcagctgctttactgagagtaaccctccagccgaatatttttggactataaatggaaaatttcaacaaagcggtcagaagctatttattccacagatcacccggaatcacagtggactgtatgcgtgcagcgtccacaacagcgctacgggaaaggaaatctccaagagcatgacggttaaggtctctgggccatgtcacggtgacctcacagagtctcagagttag

SEQ ID NO: 248426 - RNA, 723 nt, synthetic construct
  misc_feature 1..723: note = Description of Artificial Sequence: Synthetic coding sequence
  source 1..723: mol_type = other RNA
atgggacccctgccagccccctcctgcacacaaagaataacctggaaaggcctgctcctgactgcaagcttacttaacttttggaatccccccacaactgccgaggtcaccatcgaagcccagcctcccaaggtgtccgaggggaaagacgtactgttgctagtccacaacctccctcagaatctgcctggctacttctggtacaagggcgaaatgaccgatctgtaccactacattatttcctatatcgttgacggcaagatcataatttatggcccagcctactccgggagggagacagtttacagcaacgcctccctcttaatccaaaacgtgaccagaaaggacgcaggcacatatacccttcacattataaaacgtggcgatgagacacgcgaggagatcaggcacttcacttttaccctgtattacggcccagatctgccgagaatctatccaagttttacatactatcggagcggagagaaccttgacctgtcctgtttcacagaatcaaaccctcccgcagagtacttttggacgattaatggcaagtttcagcagtctggacagaaactttttatcccacagataacaagaaaccattctggtctgtacgcctgctccgtacataattctgccactggaaaggaaataagcaaatcaatgactgttaaagtgtccggtccctgccacggagacctaacggagtcacaatcatag

SEQ ID NO: 248427 - RNA, 1164 nt, synthetic construct
  misc_feature 1..1164: note = Description of Artificial Sequence: Synthetic coding sequence
  source 1..1164: mol_type = other RNA
atgggcccacttcccgcaccctcctgcacccaaagaattacctggaagggactgctcctgactgctagcctcctgaatttttggtacaaaggggagatgacagatctgtatcattacatcattagctacattgtagatggcaaaattattatatatggcccggcatacagcgggagagagaccgtatacagcaatgcttcattactgattcagaatgtaacacgtaaggacgccggaacttacacccttcatataattaagcgcggagacgaaactcgggaggagataaggcacttcacgtttactttatacctcgagacaccaaagccgtatatctcatcttccaacctcaaccccagggaggctatggaagccgtgcgccttatttgcgatcccgaaaccctagatgcgtcttacttgtggtggatgaacggtcaaagccttccagtgacacaccgcctgcaactttctaagactaaccgaacactttatctttttggcgtcacaaagtatatagctggtccttacgaatgcgaaatcagaaatccagtcagtgcttctagaagtgaccctgtgactctaaacctccttccaaagctgccgatcccatacataaccattaataaccttaacccccgagagaacaaggacgtattggcctttacttgcgagccaaaaagcgagaactatacttacatttggtggctgaacggccagagtctgcccgtgtcgcccggggtaaaacgtccgattgagaacaggatactgattctgccatccgttaccaggaatgagacgggcccgtaccagtgtgaaattagggatagatacggtggactccggtcaaaccccgtaatcctgaacgtgttgtacggacctgacctgccaaggatatacccatcctttacatattatagatccggcgaaaatctggacctgtcgtgcttcacagaatctaatccacccgccgagtatttttggacaatcaatggcaagtttcagcaatctggacaaaagctttttatcccacaaatcacacgtaaccattctgggctgtatgcttgttccgtgcacaacagcgccacagggaaggaaattagcaaatcaatgaccgtgaaggtgtcagggccgtgccatggagacctcacagaatcacagtcttag

SEQ ID NO: 248428 - RNA, 1002 nt, synthetic construct
  misc_feature 1..1002: note = Description of Artificial Sequence: Synthetic coding sequence
  source 1..1002: mol_type = other RNA
atgggcccactcccagcaccatcctgcacccagaggatcacatggaaaggcctcctcctcacggcctcactgctaaatttctggaacccacccaccaccgctgaggttactattgaagctcagcctcccaaagtgtcagaggggaaagacgtgctgctactggtccataatctcccacagaaccttccagggtacttctggtacaaaggcgaaatgacggatctttatcactatatcatcagctacatcgtcgatgggaaaataatcatctatggccctgcgtacagcggtagagaaacagtttactctaacgcttcacttctgatccagaatgttactaggaaagatgccggcacttatacattgcatattatcaaacgaggcgacgagacccgggaagaaatccgccattttacattcactctgtactcaaagcttcccatcccctacataacaatcaacaacctaaaccccagggaaaacaaagacgtactggcctttacatgtgagcctaagagcgaaaactacacatatatctggtggctcaacggccagtccctgccggtgtccccaggcgtgaaaaggcctattgaaaatagaattcttatcctcccctccgtgacccgcaatgagacagggccctatcaatgcgaaattagggacaggtatggcggcctgagatccaaccctgtcatactcaacgtgctatatgggcctgacctgccgagaatatatccttcgtttacatattacagatcgggcgaaaatctggacctgagctgcttcacagagagcaaccctccggctgaatatttctggactatcaatgggaaattccagcagtctgggcagaaattattcattccacaaattacaagaaatcatagtggactctacgcttgttcggtgcataacagtgccaccggtaaagaaatctctaagagcatgaccgtgaaggtgtcaggaccctgtcacggagaccttacagaatctcagagctag

SEQ ID NO: 248429 - RNA, 1485 nt, synthetic construct
  misc_feature 1..1485: note = Description of Artificial Sequence: Synthetic coding sequence
  source 1..1485: mol_type = other RNA
atggcccgagctgccccgctccttgccgcattgaccgcactgctcgcagcagccgcagctggaggggatgctccccccggcaagatagctgtcgtgggcgctggcataggcggatccgcagtggcacactttctacaacagcattttggccctagagtgcagattgacgtttacgagaagggaaccgtgggcgggcgcctagctacaatctctgtgaataaacagcattatgagtcgggagcagcctccttccactccttatcactgcacatgcaggattttgtcaagttactcgggctcagacatcgcagggaagtggtgggacgatcggcgatttttggcggggagcacttcatgctggaagaaacggactggtatctcttaaatcttttcagactttggtggcactatggaatcagtttcttacgattacaaatgtgggtggaggaggtcatggaaaagtttatgaggatttataagtaccaggcccacggctatgcgttttcaggtgtggaagaactactctacagcttaggggaatctacttttgtcaatatgacacagcatagtgttgccgaatctctactccaggttggcgtaactcagagatttatcgacgatgtggtgagcgctgtcctaagggcttcgtacggtcagtccgctgccatgcccgcctttgctggggccatgtccctggccggagcccaaggctcgctgtggagtgtagagggggggaataagctagtctgctctggcctgctgaaactcaccaaagccaatgttatccatgcgacagtgacatccgtcacactgcactctacagaagggaaggccctatatcaggtggcatatgaaaacgaggttggcaattcctctgacttttatgacatagtcgtcattgctacccccctgcacctagacaatagctcctccaatcttaccttcgcaggatttcacccacccatcgacgatgtgcagggctcctttcagcctaccgtcgtgtcactcgtgcacggttatcttaatagctcgtattttggctttcctgatcctaaactctttcccttcgccaacatcttaactaccgactttccctctttcttctgtaccttggacaatatttgccccgtaaacatctcagctagcttccggaggaaacagccccaggaagccgccgtgtggagggttcagtctccaaagccactctttcgtacacagttaaagactctgtttcggtcctattactcagtccaaactgccgaatggcaagcccacccgttgtatggttctcgtccgaccttgccaaggttcgctctgcacgatcaactgttctatctaaacgcattggagtgggccgcctcttctgtggaggtcatggcggtggccgctaaaaacgtggcccttctggcatataaccgctggtatcaggatttagataagatcgatcagaaagaccttatgcataaagtaaaaaccgagctgtag

SEQ ID NO: 248430 - RNA, 2277 nt, synthetic construct
  misc_feature 1..2277: note = Description of Artificial Sequence: Synthetic coding sequence
  source 1..2277: mol_type = other RNA
atgggcggctgcaccgtaaaaccccaacttcttctgctcgcactggtgcttcacccctggaacccttgcctgggcgccgacagcgaaaagccttcaagcattcctaccgataagctcctggtgatcaccgtggcaactaaagaatcagacggcttccataggttcatgcagtcagctaagtattttaactacactgtcaaagtcctagggcagggagaagagtggcggggaggagacggaataaacagcattggggggggacaaaaagtcaggctcatgaaggaggtgatggaacactacgccgatcaagacgacctggtggtgatgtttacagagtgttttgatgtgatttttgctggtggcccagaagaggttttaaagaagttccagaaagcgaatcacaaagttgtgttcgcagctgatggtatcctgtggccagacaaacgactcgccgataagtatcctgtcgtgcatataggaaagcgctacctcaattccggcgggttcatcggctacgctccctacgtgaacaggatagtgcagcaatggaacctccaagataacgatgacgaccagctattttatacaaaagtttacatagaccctttgaagcgcgaggcaataaacataacgctggatcacaagtgtaaaatcttccagacactcaacggagccgtagatgaagttgtcctgaaatttgaaaatggaaaagctagagctaaaaatactttctacgaaacactgcccgtggccatcaacggtaatggcccaactaaaatattgttgaactattttgggaattatgtgcctaattcctggacacaagataacgggtgcacactctgcgaattcgacaccgtggatttgtccgccgttgatgtgcaccctaatgtgagtatcggggttttcattgagcagcctacaccatttctccccagattccttgatatcctgctaacgctggactatcccaaagaagccttaaagctctttatccataacaaggaggtctaccatgagaaggacatcaaggtgttcttcgacaaggccaaacatgagattaaaacaattaagattgtgggccccgaggagaatctgtcgcaggccgaagcccgaaatatgggcatggatttttgccgacaggacgagaaatgcgattattattttagtgtggacgcagacgtagtcctcaccaatccacgcaccctgaagatattaatcgagcagaatcggaaaatcattgcgcccctggtcactcgacatggaaagctgtggagcaatttctggggtgcactctctcctgacggctactacgccaggtccgaagattacgttgacatcgtgcaggggaaccgcgtcggagtgtggaacgtgccctacatggcaaatgtctatctaatcaagggcaaaaccctccgaagtgaaatgaatgaaagaaattactttgttagggataaactggaccctgacatggccctgtgtagaaacgctagggagatgacactacaaagagaaaaagacagtccgactccagagacgttccagatgctgagcccaccgaagggagtgttcatgtacatctctaataggcacgagtttggacggctcctgagtacagccaattacaacaccagtcattataacaacgatctgtggcagattttcgagaatccagtggactggaaggagaaatatatcaaccgtgactacagtaagatctttaccgaaaacatcgtcgagcaaccctgccctgatgtgttctggttccccatattctccgaaaaggcctgcgacgagctagtggaagaaatggagcactacggcaaatggagcggcgggaaacaccatgacagtaggattagtggaggttacgagaatgttccaactgacgatatacatatgaaacaagtcgacctcgaaaacgtttggctgcattttattcgggagttcatcgcccctgtcacccttaaggttttcgcaggctattatacaaaagggtttgctctgctaaactttgtcgtcaagtactcaccagagagacaacgaagcttgaggccacatcacgacgcgagcacattcactatcaacatcgccctgaataatgtcggcgaagatttccaaggcggggggtgcaagtttctccggtacaattgtagcatcgaatctccaagaaaaggctggtcttttatgcatcccggcaggctcacccacctccacgaaggactgccagtgaaaaatggaacacggtacatcgccgtgtcatttattgacccctag

SEQ ID NO: 248431 - RNA, 2214 nt, synthetic construct
  misc_feature 1..2214: note = Description of Artificial Sequence: Synthetic coding sequence
  source 1..2214: mol_type = other RNA
atgggaggatgcacggtgaaaccacagctgctactgttggcattggtacttcatccatggaacccttgtctgggggccgattccgaaaagccttcctcgatccccacagataaactgctcgtgattactgtggcgacaaaggaatccgacggcttccatcgcttcatgcaatcagcgaagtactttaattacactgtgaaggtgcttggccagggggaggaatggagaggaggcgatggtatcaatagcatcggtggaggccagaaggtacggctcatgaaagaggtcatggaacattacgccgatcaggacgaccttgtcgttatgttcacggagtgcttcgatgtcatttttgcaggtggcccagaagaagtgttaaagaagtttcagaaggcgaatcataaggtcgtgtttgctgccgacggcatcttgtggcccgataagcgcctagccgataaatatccagtagtacacatagggaaacggtacctgaatagtgggggcttcattggatacgcgccatatgtcaacagaatcgttcaacaatggaacttgcaggataacgacgatgaccagctcttttatactaaagtgtacatagacccattaaagcgtgaagcaataaatattacactggaccacaagtgcaaaatcttccaaactcttaatggagcggtcgatgaagtggtgttgaaatttgagaatggcaaagctagagcaaagaacaccttctacgagactttgcccgtagctatcaatggcaatggaccaacaaagattcttctaaactatttcgggaactatgttcccaattcttggactcaagataatggatgtaccctttgcgagtttgatacagtcgatttatctgctgtggacgtgcatcctaacgtctccattggggtattcatcgagcagcctacacctttccttccccgctttctggatatattactcaccttagactatccaaaggaggctttgaaacttttcatacataataaagaagtgtaccacgaaaaagacataaaggtgttctttgacaaagccaaacatgaaattaagacaatcaaaattgtcggtccagaggagaacctctcgcaggccgaagctcgcaatatgggaatggatttctgccgccaggacgagaagtgtgactactacttttccgtagatgcagacgtggttctcaccaaccccagaactctgaagatactcattgaacagaacagaaagatcatcgctccgctggttacacggcatggcaaattgtggagcaatttttggggcgctcttagccccgacggatactacgctcggtcagaagattatgtcgatatcgtgcagggaaaccgcgtaggagtgtggaacgtaccttatatggccaatgtctatctcatcaaaggtaagactctgagaagcgaaatgaatgaaaggaattatttcgttagagacaaactcgaccctgacatggctctttgccggaacgctagagagatgggggtgtttatgtacatttctaaccgccacgagttcggcaggctgctaagtactgcaaattacaatactagccattacaataatgatctgtggcagatcttcgagaatcctgttgactggaaagaaaagtatatcaaccgtgattattctaagatttttacagaaaatatcgtggaacagccatgtcctgacgtgttctggttcccgatcttttctgagaaagcatgtgatgaactcgtagaagagatggagcactatggtaagtggagtggaggcaaacatcacgacagcagaatctctggaggctacgagaacgtaccaacagacgacatccacatgaaacaggtggacctcgagaacgtgtggctccattttatccgagaatttattgcgcccgtgactctgaaagtgttcgcgggttattacaccaaagggttcgccttgcttaactttgtggttaagtattctcctgagcgccagaggagtctcagaccccatcacgacgcttcgacattcacaatcaatatagcactcaacaatgttggagaagattttcaaggcggcggttgcaaattcctgcggtacaactgctcgatcgagagccctcgaaagggttggagctttatgcatccaggaaggctgacacacctccacgaaggattgcccgtcaagaatggcacccgctatattgccgttagcttcattgatccatag

SEQ ID NO: 248432 - RNA, 1257 nt, synthetic construct
  misc_feature 1..1257: note = Description of Artificial Sequence: Synthetic coding sequence
  source 1..1257: mol_type = other RNA
atgctggaaaaccacatcctgcacaagcgtatatatatactgaccttcttttcgcagcagattttcattctctgtcatgctcactttatatttttcttcaccgttcgtgatttctgtcgccaggacgaaaaatgtgattactattttagcgtggacgccgatgtcgtcttgacaaaccctcggactctgaaaattttaattgagcagaaccgcaaaattatcgcaccccttgtaaccaggcacggaaaactgtggtccaatttctggggcgccctatccccggacgggtattatgcccggagtgaagattacgttgatatcgtgcagggcaaccgagttggagtatggaatgtgccttacatggcgaacgtgtatctcatcaaagggaaaactctgcgaagcgaaatgaatgagcgaaactattttgtgagggacaagttggatcccgatatggctctgtgtcgcaacgcccgcgagatgacattacagagggagaaggatagcccaacaccagagacatttcagatgctgagtccgccgaagggagtgttcatgtacatttcaaatagacatgaattcgggaggctcctgtccacggccaattataatacctcccattacaataacgacctctggcaaatctttgagaaccccgttgactggaaagaaaagtacattaatcgagattattccaaaatcttcacggagaacatcgtcgaacagccatgccctgacgtcttctggttccccattttttctgagaaggcctgtgacgagctcgtggaggagatggagcactatggcaagtggtcgggtggtaagcaccatgacagtagaattagtggaggttatgagaatgtacccacagacgatatacatatgaaacaagtggatctggaaaacgtgtggctccactttatccgggaattcatcgcccccgttaccctaaaagtattcgcgggttactatacaaaaggatttgccctgctaaattttgtggtgaaatactcccctgagagacagagaagtctccggcctcatcatgacgcgtcaaccttcaccattaacatcgctcttaataacgttggggaagacttccagggtgggggctgcaagttcctccgatataattgctctatcgaaagccctcggaagggatggtcgttcatgcaccccggacgtctgacccatctgcacgagggtctgccagtcaaaaacggtacccgatacatcgccgtttccttcatcgacccttag

SEQ ID NO: 248433 - RNA, 2112 nt, synthetic construct
  misc_feature 1..2112: note = Description of Artificial Sequence: Synthetic coding sequence
  source 1..2112: mol_type = other RNA
atgcagtctgccaaatactttaattacactgtcaaggtccttggacagggggaggaatggcgcggcggggacgggattaacagcattggaggaggccagaaagtgagattaatgaaggaggtgatggagcattatgcagatcaagatgatttggtagtcatgttcacagagtgtttcgatgtgatcttcgcaggcggacctgaagaggtcctaaaaaagtttcagaaggctaaccacaaggtagtttttgctgccgatggcattttatggccagataagcgcctcgccgataaatatcccgtggttcacattggaaaacggtatctcaactccggtggcttcatcggctatgctccttacgtgaacagaattgttcagcaatggaacctacaggataatgacgacgaccagttgttttacaccaaagtgtacattgatcctcttaaaagagaggccatcaacatcacgttagaccacaaatgtaaaatttttcaaactttgaatggagcagttgacgaggtcgttctgaagtttgaaaatggtaaagccagggcaaagaacaccttttatgagacacttccagtcgccattaacgggaatggacctaccaaaattttactgaattatttcggcaactacgtccccaactcatggacgcaagacaacggttgcacgctctgtgaatttgataccgtggacctcagcgctgtcgatgtgcacccaaacgtcagcatcggtgtgttcatagaacaacccacccctttcttgccaagattcctggacatcctactgacactcgattaccccaaagaagcattgaagctcttcatacacaacaaagaggtataccatgaaaaggatattaaggtgtttttcgataaggctaaacacgagatcaaaacaattaaaatcgtcggccccgaggagaatctgtcacaggccgaggcacgaaatatgggcatggacttttgtagacaggatgagaagtgcgactactactttagtgtggatgcagacgttgtcctcaccaacccaagaaccctgaagatcttaatagagcagaataggaaaattattgccccactagtgacaagacacggcaaactgtggagtaatttctggggggccctctcgcctgacggctattatgccaggtccgaagactatgttgatatagtccagggtaatcgagtgggcgtgtggaacgtcccctacatggctaatgtgtatctgatcaaagggaagacgctcaggagtgaaatgaatgaacgaaactacttcgttcgcgacaaactagatcccgatatggccttatgtagaaacgcccgagagatgacgctccagagggagaaagacagtccaaccccggagactttccagatgctgtccccgcccaagggcgtgtttatgtacatttctaacagacacgagtttggccggctactgtctacagctaactataatacgtctcactacaacaacgacttatggcagattttcgagaatccggtggactggaaagaaaaatatatcaatagggactatagtaagattttcactgaaaacattgtggagcagccgtgtccagacgtcttctggtttccaatattcagcgagaaggcctgtgatgagttggtggaagaaatggagcactacggtaaatggagcggggggaaacatcacgacagccggatcagcggtgggtacgaaaacgtgcccacagacgacatccacatgaagcaggtggacctggaaaatgtttggctccactttattagggagttcattgcacctgttaccctgaaggtgtttgcaggctactatacaaagggattcgccttactgaattttgtggttaagtactctcctgagcgccagaggtctttgcggccacaccatgacgcatctacttttactatcaatattgcacttaataatgtcggcgaggattttcagggaggcggatgcaagtttcttcgatacaactgttctatcgaaagccccaggaaaggatggtcctttatgcacccagggagactgacacatcttcacgaagggttgcctgtgaagaatggaacaagatatatcgctgtgagcttcatcgatccttag

SEQ ID NO: 248434 - RNA, 1608 nt, synthetic construct
  misc_feature 1..1608: note = Description of Artificial Sequence: Synthetic coding sequence
  source 1..1608: mol_type = other RNA
atgaagctgtgggttagcgccttgctgatggcatggttcggagtgctttcttgtgtccaggcagaattttttacatcgatagggcatatgactgacctgatatatgctgagaaagaactcgtgcagtctttgaaagagtatattctggtggaggaagcaaagctatccaaaatcaagtcgtgggctaacaagatggaagccctcacttccaagtccgccgccgacgccgaaggatacctggctcaccctgttaacgcatacaagctggtcaaacggcttaatacagactggcctgcgctggaagacctggtgcttcaggactcggccgctgggtttatcgcgaacctctctgtccagcgacagttttttccgaccgacgaggatgagattggagccgcaaaggcactcatgcggctgcaggatacatatagactcgacccgggaacgataagtcggggtgagctgcctggcacaaagtatcaagcaatgcttagcgtcgacgattgcttcggaatgggtaggagcgcatataatgaaggggactattatcacacagtactgtggatggaacaggtcctgaaacagttagacgcaggggaggaggccactacaacaaaaagccaggtgctggattatctgtcctacgctgttttccagctcggcgatctacaccgggctctcgagttgacaagacgtttactttccttggatccatctcacgagagggctggcggaaacctaagatattttgaacagttgttggaggaggagagggagaagaccctgacaaatcagactgaagccgaactggctacacccgaaggcatttacgagcgccctgtggattacctccccgagcgtgacgtctacgagagcctgtgtcgaggtgagggcgtgaaattgacaccaaggagacagaagaggcttttctgcagataccaccacggtaaccgtgccccacagctgcttatcgcaccatttaaggaggaagacgaatgggattctccccacatagttcggtattacgacgtgatgtcagacgaagagattgaacggatcaaggagatcgcaaagccgaaactcgctagagccaccgtgcgagatcccaaaaccggtgttctcacggttgcttcctacagggtgagtaagagttcctggctggaggaagatgacgatccagttgtcgcccgcgttaatagacggatgcagcatattactggtctgacagtaaaaaccgctgaactgctccaagtcgcaaattatggggttgggggccagtacgaacctcattttgatttttcacgcaacgacgaacgagacacctttaagcatttgggtaccggaaaccgggttgccacttttctgaattacatgagcgatgtagaggccgggggggctacagtgtttcccgacctgggggcggccatctggccgaagaagggaaccgcagttttctggtacaacctcctccggtccggcgagggggactatcgaactaggcacgctgcttgcccagtgttagttggatgcaaatgggtcagcaataaatggtttcacgaaagaggccaggaattcttgagaccctgtggttcaacagaggtggattag

SEQ ID NO: 248435 - RNA, 1635 nt, synthetic construct
  misc_feature 1..1635: note = Description of Artificial Sequence: Synthetic coding sequence
  source 1..1635: mol_type = other RNA
atgggacctggagcccgactggcagccctgctcgccgtcctagcattgggcacaggcgatcctgaacgcgctgctgcgaggggcgatactttctcggcactcaccagtgtagctcgcgcattggctccagagcgacgccttttgggtctgctacgtagatacttgagaggtgaggaggcaaggctgcgcgacctcacacggttttacgataaggtcctgtcattgcacgaggattcgaccacccccgtagctaaccctttgcttgctttcaccttgattaagcgacttcagtcagactggagaaacgtcgtccactcactagaagctagtgagaatatcagggcattgaaagacggctatgaaaaagtcgagcaagacttacccgctttcgaagacctggagggggccgcccgtgccctaatgcgcctgcaggatgtgtatatgctgaacgtcaaagggttggcacgaggcgtgtttcaaagagtgaccggatccgccatcactgacctgtattctcctaagcggctgttcagtctaacaggcgatgactgctttcaggtgggcaaggtggcttatgatatgggtgattattatcacgcaataccttggctggaagaggcagtgagcttgttccgaggaagctatggggagtggaagaccgaagacgaggcttcactggaggatgctctcgaccacctggccttcgcttattttcgggccgggaatgtgagttgcgccttatctcttagtcgtgaattccttctttactcaccagataacaaacgaatggctcggaacgtgctgaagtatgaacggctcctggcggagtcccctaaccacgtcgtggcagaggctgtgattcagaggcccaacattcctcacttgcagactagagatacctatgaggggttgtgccagacgctcggctcacagcctacactttaccaaattccatccctttattgttcttacgaaactaacagcaatgcctatttgctcctgcagccaatacggaaggaagtgatccacctcgaaccctacatcgcgctgtatcatgattttgtgtccgattccgaagctcagaaaatcagggagctggcagaaccttggctccagagaagtgtggtagcctctggggagaagcagctccaggtggagtacagaatctctaagagcgcctggctaaaggataccgtggaccctaaactcgtgaccttgaaccatcggattgctgcgttgactggcctagatgtcagacctccatatgccgagtacctgcaagtcgtgaactatggaatagggggtcattacgaacctcatttcgatcatgccacttcgcccagctcaccactgtaccggatgaaatctgggaaccgtgtagcgaccttcatgatttacctgtcctctgttgaggcaggcggcgcaaccgctttcatctatgctaacttgtctgttcctgttgttaggaacgccgctctcttttggtggaatctgcataggtctggagaaggtgattctgataccctacatgctggatgtccagttctcgtcggcgacaaatgggtagcaaacaagtggatacacgaatacggccaagaattccggcgcccctgtagtagctctcctgaggactag

SEQ ID NO: 248436 - RNA, 1815 nt, synthetic construct
  misc_feature 1..1815: note = Description of Artificial Sequence: Synthetic coding sequence
  source 1..1815: mol_type = other RNA
atgggacccggggcacgcctcgccgccctgctggccgtactggctctcggcacgggcgacccagaacgcgctgctgcccggggcgataccttctcagcacttacttccgtagccagggcactggcaccagaacggcgcctcctgggcctgctgcggcgatatctgaggggggaggaagctagactacgggatcttacacggttttacgacaaggtcctaagcttgcatgaggacagcaccacgcccgttgctaatcctctcctcgccttcacactgattaagaggctgcaatctgattggagaaacgtggtgcatagcttggaggcatccgaaaacatcagagcattgaaagacgggtacgaaaaagtggagcaagatttaccggctttcgaggacttagagggagccgcacgggcacttatgagacttcaagacgtgtacatgcttaatgtgaaagggctggcccggggagtgttccaaagagtgacaggcagtgccatcactgacctctacagcccaaaacgactgttttctttaaccggtgatgactgtttccaagtcggaaaggtggcatacgacatgggcgactattatcacgccattccatggctggaggaggccgtgtccctgttccgcggatcatatggggaatggaaaacggaggacgaagcttccctcgaagatgcccttgaccacttagctttcgcctattttagagccggtaacgtgtcctgtgctctgtccctgagtagagagtttctcttatatagccctgataataaacgaatggcccgtaatgtcctaaagtacgagaggctactagcggagtctccaaaccatgtggtggctgaggccgtgatccagaggccgaacattccgcatctgcagactcgtgatacttacgaggggttgtgtcagaccctgggctcacagccgacattataccagattccatccttatactgctcatatgaaaccaactccaacgcctacctgctgctgcaacccatccgtaaagaagtgatccaccttgaaccttacatcgcattgtatcacgatttcgtatccgactccgaagctcaaaaaatccgcgagctcgccgaaccctggttgcagagaagcgtggtggcctcaggagaaaagcagctccaagttgagtacagaatctcaaaatccgcatggctgaaagacaccgtggaccccaagctggtcacgcttaatcatcgaatcgccgccctcaccgggctagatgtgcgccctccctatgccgagtatctgcaggtggtcaattacggcatcggaggacactacgaaccccactttgaccatgccacctcaccttcaagtccactgtatagaatgaaaagcggtaatagagtagcgacattcatgatctacctgtccagcgtcgaagccgggggagctactgctttcatctacgcaaacctgtccgtgccagttgtgcggcattgttttggaggcacatgtactggggttgtgaaggggactgtcactcactttatgctcgcagtgctgtcgtggtgggaaattagcggctggcctacttcaggatatatgtcaatggaccgtaacagtgctgacccagccgcaccggcgctcaaaactgaattactggcagagagatcttggtggtcaccggtggcatttcagaggtcccaagaacctaaggctggagtcggagaggagaaggcggaacagccacctggaaggcgcccctgtcaactgtgtctttgcttggccaaccaacgtcagggacgcgggtgttatcagggcacactcaggatgtatatatag

SEQ ID NO: 248437 - RNA, 417 nt, synthetic construct
  misc_feature 1..417: note = Description of Artificial Sequence: Synthetic coding sequence
  source 1..417: mol_type = other RNA
aatataagcctgtgtcccgaaatttgctttcagaaaattgagtcacaagtttacttcgttagagtggatagtggaattcagccaggctctgatatctcgatttactacgaccccatgataagcaaactaataacttacgggtctgaccgcactgaggctcttaaaaggatggccgacgcgctcgataattacgtaataaggggggtcacccataatatagcactgcttagagaagtgattattaattctagattcgtgaagggcgatatatctactaaatttttatcagacgtctatcccgatggtttcaagggacacatgctgacaaagtctgagaagaaccaattgcttgctatcgcctccagcctgtttgttgcttttcagctcagagctcaacacttccaggagaattcttag

SEQ ID NO: 248438 - RNA, 363 nt, synthetic construct
  misc_feature 1..363: note = Description of Artificial Sequence: Synthetic coding sequence
  source 1..363: mol_type = other RNA
atgagcatacagtttttaggcacagtatacaaggtgaatattctgacccgcctggccgccgaactcaacaagtttatgttagaaaaggtcaccgaagacacgagtagcgtgctgcgtagtcccatgcctggtgtggtggttgctgttagcgttaaacccggtgatgctgccacttcctccctgagtgtagagatctgccttttttggactttccaggtggctgaaggtcaggaaatttgtgtaatcgaggccatgaaaatgcagaacagcatgaccgccggcaaaaccggtacagtaaaaagtgttcactgtcaggccggcgataccgtcggtgaaggagacctgcttgtggaattggaatag

SEQ ID NO: 248439 - RNA, 2046 nt, synthetic construct
  misc_feature 1..2046: note = Description of Artificial Sequence: Synthetic coding sequence
  source 1..2046: mol_type = other RNA
atggcaggcttttgggtggggacggcaccgctggtagcggccggccgtaggggcaggtggcctcctcagcagttgatgctgtctgcggcactccggaccctaaagcatgtcttatactactccagacaatgcctcatggtgtcacgaaacctgggctccgttggatacgaccccaatgaaaagacgtttgataaaatattggtggcaaaccgaggggaaatcgcgtgccgagtgatccgaacttgtaaaaagatggggatcaagacagtcgcaatccactccgacgtggacgcctcatcagtgcacgtaaagatggcggacgaagccgtgtgcgtgggacctgcccctacatcgaaatcttatttaaatatggatgcaatcatggaagctatcaagaagacgcgcgctcaggccgttcatcccggatacggtttcctctccgagaacaaagaatttgcccgatgcctggccgccgaagatgttgtatttattggccccgatacacatgccatacaggccatgggtgataagatcgagtcgaagctgctggccaaaaaggccgaggtaaacaccattccaggttttgatggagtcgttaaagatgctgaggaagctgtgcggattgcccgagagattgggtatccagtgatgataaaggcctcagccggggggggggggaaagggatgaggattgcttgggacgacgaagagactagagatggcttccgcctgtcctctcaggaggccgcctcttcatttggtgacgaccgcctgctgatcgagaagttcattgacaaccctcgccacattgagatccaggtgctaggcgataagcacgggaacgctctttggctaaatgaacgcgagtgctctatccagcgtcggaatcagaaagtcgtggaagaggcgccaagtatattcctggacgcagaaactagaagggctatgggcgagcaggctgtcgcactggcgagagccgtcaaatacagctccgctgggactgtcgaattcctcgtggattcaaaaaaaaacttttacttcctggagatgaacacaaggcttcaggtcgaacatccggttactgagtgcattaccggactggatctagttcaggagatgattcgcgttgcgaagggttacccactgagacataaacaggccgacatccgaattaatgggtgggctgtcgaatgtagagtctatgccgaagacccatataagtcgtttggcttaccatctatcggcaggcttagtcagtaccaagaacccctacacctcccaggcgtgcgggttgattcgggcatccagccgggatcagatatcagcatttactacgacccgatgatttcgaagctaataacctacggaagcgacaggactgaggcgctcaaaagaatggcagatgcgcttgacaattatgtcatccgaggtgttacccacaacatcgcactgctaagggaggtcataattaactctagattcgtcaagggagacatctcaaccaagttcctgtcggatgtgtatccggatgggttcaaaggacatatgctgacaaaatcggaaaaaaatcaactgctggcaattgcctcctctctgtttgtggcttttcaactccgagcccagcacttccaggaaaatagtagaatgcccgttatcaaaccagatatcgctaactgggagctctccgtcaaactgcacgacaaggttcacacagtcgttgctagtaataatgggtctgtattctcagttgaagtagatggctcaaagctgaacgtcacaagcacctggaatctcgcaagtccacttttgtccgtctcagtcgatggtacccagcgtacagtccaatgcttgagcagggaagccggaggaaatatgtctattcagttccttggtaccgtggtagccgaagggcaggagatctgcgtaatcgaggctatgaagatgcagaatagcatgacagctggaaaaacagggactgttaagtcggtacactgccaggcgggtgatacagttggagaaggcgacctcctagttgaattggagtag

SEQ ID NO: 248440 - RNA, 2187 nt, synthetic construct
  misc_feature 1..2187: note = Description of Artificial Sequence: Synthetic coding sequence
  source 1..2187: mol_type = other RNA
atggccggattctgggtggggaccgctcccctcgtggcagcagggagaaggggtaggtggccacctcagcagttgatgcttagcgcagctctgagaaccctaaagcacgtcttgtattactcaagacagtgtcttatggtctctaggaatctgggttcagtcgggtacgatcccaacgagaagacattcgacaaaatcctggttgcaaatcggggcgagatcgcttgtagagtcatcagaacgtgcaaaaagatggggataaagaccgtggcaattcacagcgacgttgacgcttccagtgtccacgtaaagatggccgacgaggcggtgtgtgtagggcccgcgccgacatctaagagttacttgaacatggacgcgattatggaggccattaagaaaaccagagcgcaggccgtgcatccaggctacgggttcttgtcggaaaacaaggagttcgccaggtgtctagccgctgaagatgtagtgttcattggacccgacactcacgccattcaggcaatgggagataaaatcgagagcaagctgttggcaaagaaggcggaggtcaatacaatccccgggttcgatggggtggtgaaagatgcagaggaggcggttaggattgcgcgggaaatcggatatcccgttatgatcaaagcaagcgccggtgggggcggcaagggtatgagaattgcttgggacgacgaggaaaccagagacggttttagacttagctctcaggaggctgcaagcagttttggcgatgacagattgttaatcgaaaagtttattgacaacccccggcatatcgaaatccaggtgttaggagacaaacacggcaacgcgctctggctgaacgagcgagagtgtagtatccagaggaggaaccagaaagtggtcgaggaggctccttctatatttctggacgcggagacaagacgtgctatgggcgaacaggcagtagcgctggcgcgggcggtcaaatactccagcgccggaaccgtggagtttctggttgactcaaagaaaaatttttacttcctcgagatgaacacacggctccaggtggaacacccagtgacggaatgtataactggactggacctcgtgcaagaaatgatacgagttgccaaaggctatcccctccgccacaaacaggccgatatacggataaacggctgggcagttgagtgtagagtgtacgcggaagatccgtacaagagctttggcctaccatcaatcggcaggttgtctcaatatcaggaacccttgcatctgccgggcgtgagggttgatagcggcatacaaccaggatcagacattagcatctactacgacccgatgatttctaagctaattacctacggctcggatagaaccgaagccctgaagcgaatggccgatgccttggacaattacgttattaggggggtcacacataacatcgctctcctacgcgaggtaatcatcaatagccgattcgtgaaaggcgatatctctaccaagttcctgagcgacgtataccctgatggttttaagggtcatatgctcactaagtctgagaaaaatcaattactggccattgcgtcctccctctttgtcgcatttcagctgagggcccagcactttcaggagaattccaggatgcctgtgatcaagcccgatatcgccaattgggaactatccgtgaagctacacgacaaagtgcacacagtggtggcttcgaacaacgggtctgtttttagtgttgaggtcgacggctccaaacttaacgtcacctccacctggaatttggctagtcccctgttgagcgtctcagtggatgggactcagaggacagttcagtgcctgtccagggaggccggcggaaatatgtctattcaattcttgggaaccgtgtacaaggttaacatactgacccggctggcagccgaactgaataaattcatgctggaaaaggtaactgaagatacctcatcagtacttagatcccccatgcctggggtggtggtcgcagttagcgtgaagcccggggatgctgtagccgaggggcaggaaatctgtgttatcgaagcgatgaagatgcagaattcgatgacagccggaaaaacgggaacagtaaaatccgtccattgccaggccggtgacacagtcggcgaaggagaccttttggtcgaattggaatag

SEQ ID NO: 248441 - RNA, 2109 nt, synthetic construct
  misc_feature 1..2109: note = Description of Artificial Sequence: Synthetic coding sequence
  source 1..2109: mol_type = other RNA
atggccggtttctgggttggcactgcgcctcttgttgcagccggaaggagaggcagatggcctccacagcaactgatgctatccgccgcacttcggactctgaagacctttgataagattctggtggcaaacagaggcgaaattgcttgtagggtaatccgtacgtgtaaaaaaatgggaataaagacagtggcaattcactccgatgtcgacgcaagcagcgtccacgtaaaaatggccgacgaggcagtctgtgtcgggcccgcccctaccagtaaatcctacctcaatatggacgcaatcatggaagcaattaaaaagacccgggctcaagctgtgcatccaggatatggtttcctctccgagaacaaagagttcgcgagatgtctggcagcagaagacgttgtgttcatcgggccggatacccacgcaatccaggcgatgggcgataagattgagtccaagctactggccaagaaagcagaagtaaacactatacctggttttgatggagtcgtgaaggatgcagaagaggcggtacgcatcgcccgtgaaatagggtaccctgtgatgattaaggctagcgccggcgggggcggcaagggtatgagaatcgcatgggacgatgaggagaccagagatggcttccgcttgagctcgcaagaggctgcttcatctttcggcgacgaccggttactcatcgagaagttcatcgacaatcctagacacattgaaatccaggtgctgggcgataagcatggtaatgctttgtggctcaacgagagagagtgtagtatccagaggaggaatcaaaaagttgtcgaagaggctcctagcatcttcctggacgccgaaacccggagagcaatgggcgagcaagccgtagcactggctagggctgtaaagtactcatctgccgggactgttgagttcctggtggatagcaaaaaaaacttctactttttggagatgaacactcgcttgcaagtggaacacccagtgactgaatgtataacaggccttgatttggtgcaggagatgatcagagtcgcgaagggctaccccctgcgacataagcaggccgatattcgcattaacggctgggccgtagaatgccgtgtgtacgctgaagatccctacaagagtttcggccttccgtccatcgggcgcctaagtcagtatcaggaaccgttacatctgccaggcgtgagggttgactctggtatccagcccgggtcagacatttctatctattatgacccaatgatttccaaactgatcacctatggctcagaccggaccgaggccttaaagagaatggctgacgctctggacaactatgtgataagaggagtcacacacaatattgccctcctacgcgaagtcatcataaactctaggttcgtaaagggcgacatttcaacaaaatttctctcagatgtttatcccgacggatttaaaggtcacatgcttaccaaaagcgaaaaaaaccaactattagccattgcttcttctctgtttgtggcttttcagctgagggcccagcatttccaagaaaactctagaatgccagttatcaagccagatatcgctaattgggaactgtccgtcaagttacatgacaaggtacataccgttgttgcctcaaataatgggtctgtcttctctgtggaagttgatggaagcaaacttaacgtaacaagtacatggaatttggcgtcacctctgcttagcgtgagcgtagatggaactcagcgcaccgtgcaatgtctgagtcgagaagctggcggaaatatgtccatccagttcttaggaactgtatataaggtgaacatactgacaagactcgccgctgaattaaacaaattcatgctggaaaaggtaactgaagatacaagtagcgtcctgagaagccctatgccaggcgttgtcgtggcagtgtccgtgaaacctggagatgcagtcgccgagggacaagagatctgcgtaattgaggctatgaaaatgcaaaactccatgaccgccgggaagactgggacagttaagagtgtccactgtcaggctggggacaccgtgggggagggcgacctgcttgtcgaactggaatag

SEQ ID NO: 248442 - RNA, 255 nt, synthetic construct
  misc_feature 1..255: note = Description of Artificial Sequence: Synthetic coding sequence
  source 1..255: mol_type = other RNA
tagaattgggagctgagtgttaagctgcacgataaggtgcacaccgtcgtagctagtaacaacggaagcgttttcagtgttgaagtcgatggatcaaagctcaatgtgacctccacttggaatctagcctcaccactcttgtctgttagtgttgacggtacacaaagaacagtgcagtgcctgtcccgggaggctggcggcaacatgtctatccagtttctcggcaccgtaccatggagaaagttattagattag

SEQ ID NO: 248443 - RNA, 336 nt, synthetic construct
  misc_feature 1..336: note = Description of Artificial Sequence: Synthetic coding sequence
  source 1..336: mol_type = other RNA
tataaagttaatattcttacacgactggccgctgagctcaataagtttatgctagaaaaagtgacagaagatacgtcaagcgtcctcagatcccctatgcctggtgtagtcgttgcggttagcgtaaaacccggagacgcagcaacttcctccctatctgtcgagatctgtctgttttggacttttcaagtagcggaaggacaggaaatttgcgtgatcgaggcgatgaagatgcagaatagcatgacagcgggcaagacgggaaccgtgaaatcagtgcattgccaggcaggggacaccgtgggcgagggagacctactggttgaactggaatag

SEQ ID NO: 248444 - RNA, 405 nt, synthetic construct
  misc_feature 1..405: note = Description of Artificial Sequence: Synthetic coding sequence
  source 1..405: mol_type = other RNA
taaatgcctgtgatcaagcctgacattgcgaactgggagctctccgtaaagctgcatgacaaagtgcatacagttgtagcctcaaacaacgggtctgttttctccgtcgaagtggatggatccaaactgaacgtcactagcacttggaatctcgccagcccgttattaagcgtttccgtcgacggcacccagcgcacagtgcagtgcctgagcagagaagcagggggaaacatgtccatacaattcctgggaactgtggtagccgaaggccaagaaatttgtgtgatcgaagcaatgaagatgcagaactccatgaccgcagggaagaccgggactgtgaaatcagtgcattgtcaggccggcgatacagtcggtgaaggagacctgctggtggaactcgagtag

SEQ ID NO: 248445 - RNA, 309 nt, synthetic construct
  misc_feature 1..309: note = Description of Artificial Sequence: Synthetic coding sequence
  source 1..309: mol_type = other RNA
tcagatgtttatcccgacggtttcaaaggccacatgctgaccaaaagcgaaaaaaaccagttgctggcaatcgcatcttcactgttcgttgccttccagcttagagcacagcattttcaggagaattcgcggatgccagttataaagccagatatagcgaattgggaactgtctgttaagctgcatgacaaagtacacactgtggtggcgtccaacaacggttccgttttttcagtggaggtggatggatccaaactgaacgtcacttcaacatggaacttatttgctctcattgtttgtcagagatag

SEQ ID NO: 248446 - RNA, 483 nt, synthetic construct
  misc_feature 1..483: note = Description of Artificial Sequence: Synthetic coding sequence
  source 1..483: mol_type = other RNA
atggcaactcaccatacactctggatgggactggcactgctcggtgtcttaggcgatctccaggccgcccccgaagcacaagttagcgtacaacccaatttccagcaggacaaattcttggggagatggttctccgctgggctagccagcaacagtagttggctgcgtgagaagaaagctgccctgagcatgtgtaagagtgttgtggctcccgcaaccgatggcgggctaaatctcacatccacgtttctgcggaagaaccagtgcgaaacccgcaccatgctgttacaacccgccggtagcctcggaagttactcctacagaagtccacgtgaatgggggttacaccgtcctccagggccgtcactcggtgctacactagctggcactactctaggtcagcctcccgcagccgaaatccatggcgtcggaggtgatggatgccctacttccgtaaggggaaaagggcaggcttgggcatag

SEQ ID NO: 248447 - RNA, 573 nt, synthetic construct
  misc_feature 1..573: note = Description of Artificial Sequence: Synthetic coding sequence
  source 1..573: mol_type = other RNA
atggcaactcatcacaccctgtggatgggcctcgcactgctcggagtactgggcgacctgcaagccgctcccgaagcacaagtctcagtgcagccaaattttcaacaagataagtttctggggcgttggttcagcgccggattggcctccaatagtagctggttacgcgagaaaaaagcagctctgagtatgtgcaagtctgtggttgcgccggcaacagacggcgggcttaatttgacttcaaccttcctccgcaagaatcagtgcgagacacgaacaatgctgctgcagcctgccggaagccttggatcatactcctacaggtccccgcactggggctcaacctacagtgtgtccgtggtagaaaccgattacgaccagtatgctctcctatatagccagggatcaaagggccccggtgaagacttcaggatggcaactctttacagcaggactcagacccccagggccgagctcaaggaaaaattcaccgctttctgcaaagcgcaagggtttactgaagacacaattgtatttctgccccaaaccgataaatgcatgactgagcaatag

SEQ ID NO: 248448 - RNA, 189 nt, synthetic construct
  misc_feature 1..189: note = Description of Artificial Sequence: Synthetic coding sequence
  source 1..189: mol_type = other RNA
tagggttaccactgcttgcctgcccccaatcgagcccaaggcgaggtaggtggagacggtggctcggtgcagtttggcggttctgttaagactagtagcgccctgagggaggaacaagaagcacagtgggagaattggcccaagagcggagtactgacaaccgcccccggattttttcttggcagatag

SEQ ID NO: 248449 - RNA, 642 nt, synthetic construct
  misc_feature 1..642: note = Description of Artificial Sequence: Synthetic coding sequence
  source 1..642: mol_type = other RNA
tagctgaggggaggtgggcagtttctaggaaggggcgtgcgcggtgtggccgcgagagggattggacggggagggggcgcggggttagaaacaggcggagtggatggccggggcgcacctgcagggcgcaggagatgggtgcgcagagttctggcagatgcgggcggcggacgaagtccacaatttttgggaagatggtttagcgctggcctggcctcgaatagcagctggctgcgggagaagaaggcggctctgtccatgtgtaaatccgtggtggcgccagctacagacggcgggttgaacctgacttctaccttcttgaggaaaaatcaatgcgaaactcgcacaatgttgctccaacccgctggaagcctgggctcatacagttacagaagtccccattggggctctacctactcagtctctgtggtggaaaccgactacgaccaatacgccttgctgtattcgcagggctctaagggacctggagaagactttagaatggccacactctatagccggacccagactccgcgcgctgagctgaaggagaaatttacggccttctgcaaagcccaggggttcactgaagacaccatagtgttcctgccacagacagataagtgcatgacagagcagtag

SEQ ID NO: 248450 - RNA, 588 nt, synthetic construct
  misc_feature 1..588: note = Description of Artificial Sequence: Synthetic coding sequence
  source 1..588: mol_type = other RNA
atggcgacacatcacaccctatggatgggacttgctcttttgggcgtcctcggcgatctacaggctgcccccgaggcacaggtcagcgttcagcccaattttcagcaagacaaatttctggggaggtggttctctgcgggcttagcatctaattcatcttggctccgggaaaaaaaagccgctctctccatgtgcaagagtgtggtggcacccgcaaccgatggcggcctaaatctgactagtacatttctgcgcaagaaccagtgcgaaactcgtactatgctgctgcagcccgctggctccttgggatcttatagctatcgatcacctcgcgagtgggggctgcacagaccacctggaccctcattgggtgccacactggctggaaccacactcgggcagcctccggctgctgaaatccacggagtgggggattggggatcgacttatagcgtctcagtcgtggagactgactacgaccagtacgccttattatattcgcaaggaagcaaaggcccaggggaggattttaggatggctactctgtactctcgtacgcagactcccagagccgagctcaaagaatag

SEQ ID NO: 248451 - RNA, 573 nt, synthetic construct
  misc_feature 1..573: note = Description of Artificial Sequence: Synthetic coding sequence
  source 1..573: mol_type = other RNA
atggccacacatcataccttatggatgggactcgctcttctgggcgtccttggagacttgcaggctgcgcccgaggctcaggtgtctgtacagcctaacttccagcaggataagttcctcggacggtggttctcagcaggcctcgcctctaacagtagttggcttagagaaaagaaagcagccctgtcaatgtgtaagtccgttgtcgcccctgcgacagatgggggcctgaacctgacctctaccttcttacggaagaaccagtgtgaaaccaggaccatgttactgcagcctgcaggctcgctaggttcttactcgtatcgtagccctcactggggaagcacatatagcgtttcagtagttgagactgactatgaccagtacgcactgctatacagccagggttctaagggaccaggcgaggacttccgcatggccaccctgtacagccggacacaaaccccaagagctgagctgaaagaaaaattcacagccttttgcaaagcacagggctttaccgaagataccatcgtgtttttgccccagaccgataaatgcatgaccgagcagtag

SEQ ID NO: 248452 - RNA, 489 nt, synthetic construct
  misc_feature 1..489: note = Description of Artificial Sequence: Synthetic coding sequence
  source 1..489: mol_type = other RNA
atgaaaggtttcacagcaaccctgttcctctggacccttattttcccatcttgttcaggtggaggtggcgggaaagcatggcccacccatgtggtatgtagtgactccggcctcgaggtcctgtatcagtcttgcgatcccctgcaggatttcgggttctcagtcgagaagtgcagcaagcagctgaaatctaacataaacattcggttcggaattattttgcgagaggacattaaggagctctttttggatttggccctgatgagccaaggttcatccgtactgaacttctcttatcctatatgcgaggctgctctacccaaattctcattttgcggacgacgaaaaggcgaacagatttattatgcaggtcctgttaacaaccccgaattcacaatcccgcaaggagagtaccaagtcttacttgaactatacactgagaagaggagtacagttgcatgcgcaaacgcaaccattatgtgttcttag

SEQ ID NO: 248453 - RNA, 945 nt, synthetic construct
  misc_feature 1..945: note = Description of Artificial Sequence: Synthetic coding sequence
  source 1..945: mol_type = other RNA
atgggcgcccgaggcgctctgctgcttgcactcctgctagcccgagcaggattaaggaagcctgaatcgcaggaagcggcccctttatcaggaccctgcggaaggagagtcattacgtcccggattgttggaggcgaggatgccgagctgggccggtggccctggcagggctccctgcgcttatgggacagtcacgtttgtggagtttctcttctgtcacatcgatgggcattaacggccgctcactgttttgagacctatagtgacctgagtgatccttctggatggatggtccagtttggacagttgacaagtatgccctccttctggtcattgcaggcttactacacgaggtactttgtgtcaaatatatatctgagcccaagatacctgggaaactccccctatgacatagcactagtgaaactctccgccccagtgacgtacaccaaacacatacagccaatctgcctgcaagcatcaacttttgaattcgaaaaccggactgactgttgggtaaccggttggggctacataaaagaggacgaagctttaccgagccctcacacgctgcaggaagtgcaggttgctatcatcaataactcaatgtgcaatcatctcttccttaaatactcttttcgaaaggacattttcggagatatggtgtgtgccggaaatgctcaggggggaaaggacgcatgctttggtgatagtggtggtcctttagcctgcaacaagaacggtctctggtaccagatcggagtcgtctcctggggtgtaggatgtggcagaccaaatcgcccgggggtgtatactaacatcagccatcacttcgaatggattcagaagctcatggcccaatctggtatgtcccagcctgacccgtcttggcccttgttgttctttcctctgctgtgggctctgccactgttaggacctgtgtag

SEQ ID NO: 248454 - RNA, 954 nt, synthetic construct
  misc_feature 1..954: note = Description of Artificial Sequence: Synthetic coding sequence
  source 1..954: mol_type = other RNA
atggtagtgtccggagctcctcctgccctggggggggggtgcctggggaccttcacctctctacttctgctggcaagcaccgctatcctgaacgccgctaggatacccgtaccacctgcttgcgggaagcctcagcagctcaatcgagtcgtcggcggcgaagattccacagattctgagtggccttggatcgtgagtatccagaagaatggaacacatcactgcgccggatctctgcttacctcccggtgggttataacagccgcacattgcttcaaagacaatctaaacaagccatatttgttcagcgtcctcctcggagcttggcagctcggcaaccccggctcgcgctcccagaaagtcggcgtcgcatgggtcgaaccacaccctgtttattcttggaaagagggagcttgcgccgacatcgcgctcgttcggctcgaacgttccatccagttttctgagagggtcttgcctatatgcctgcccgacgcttctatccacctcccccctaatactcactgctggatcagtggctgggggtctattcaggacggtgttcccttgccacacccccagaccttgcagaaactgaaagtgccaatcatcgatagcgaggtgtgctctcatctttattggaggggagctggccaggggcctataaccgaagatatgttatgtgctgggtatctcgaaggagagagggacgcatgcttgggcgactccggtgggcccctgatgtgtcaggtggatggcgcttggctactcgcgggaattatttcctggggtgagggatgcgctgaaaggaaccggccaggcgtgtacatttctctgtctgcccatcgctcttgggttgaaaaaatagtgcaaggcgtgcaactgcgaggaagagctcaaggcggcggggccttgcgagcaccgtcccagggatctggagccgctgctcgctcctag

SEQ ID NO: 248455 - RNA, 1257 nt, synthetic construct
  misc_feature 1..1257: note = Description of Artificial Sequence: Synthetic coding sequence
  source 1..1257: mol_type = other RNA
atggaagagatcggaatcttggtagaaaaggcccaggatgagattcctgccctaagcgtcagccgccctcagacaggtctgtccttcctgggaccggaacccgaagacctcgaagatctctacagcagatacaagaaactgcagcaggaactggaattccttgaggtgcaggaagagtatatcaaagacgaacaaaagaacctgaaaaaagaatttctacacgcgcaggaagaagtgaaaaggattcagtccatcccactggtgattggtcagtttctcgaagccgttgatcaaaatactgcaatagttggatccaccaccgggagtaattattacgttcgaatactcagcactatcgatagggagctcctgaaacctaacgcttctgtcgccctgcataaacattccaatgctctggtggacgtgctgccccctgaagctgattctagcattatgatgcttacctctgaccaaaaacctgacgtaatgtacgccgatattggcggcatggatatccagaagcaggaagtccgagaagctgtggaactacccctcacacactttgaactctataaacagatcggcattgaccccccacgcggcgtgttgatgtacggtccacccggctgcgggaagacaatgctggcaaaggctgttgcccaccacaccaccgccgccttcattagagtggtgggatccgagtttgtccaaaaatatttgggcgaggggccccgcatggttcgagatgttttccgcctggcaaaagaaaacgcacccgccattattttcatagacgagattgatgctatcgccaccaagcgtttcgatgctcaaacgggtgcagatcgggaggtacaacggattcttctggagttactgaatcagatggacggttttgatcagaatgtcaatgtaaaggttatcatggccacaaacagagctgatacacttgatcccgcattgctgcgacctggccggctcgatcgaaaaatcgagttcccactgccagatagaaggcagaaaaggctgatcttcagcacaattacctccaagatgaatctgagtgaggaagtggatttggaagattatgttgctagaccagacaaaatatccggagctgatatcaattctatctgccaggagtccggcatgttggccgtgagagaaaatcgatacattgtcttggcaaaggatttcgagaaggcttataagacggtgatcaaaaaggatgaacaggagcacgagttctataagtag

SEQ ID NO: 248456 - RNA, 786 nt, synthetic construct
  misc_feature 1..786: note = Description of Artificial Sequence: Synthetic coding sequence
  source 1..786: mol_type = other RNA
atgagccgaagatatgattcccggacgaccattttctcccccgaagggcgtctctaccaggttgaatatgcaatggaggcaatcggacatgcagggacttgcctgggaatcttggctaatgatggtgtgctgctggcagcagagaggcgaaatatacataagctacttgacgaagttttcttttccgagaagatatataagttaaacgaggacatggcatgttcagtcgcagggatcactagtgacgcaaatgttctgacgaacgagttgcgactgatcgcccagagatacttgctacaataccaagaacctattccttgcgaacaacttgtcaccgcactctgtgacatcaaacaggcttatacacagttcggaggaaagaggccattcggagtgagtttactgtatattggatgggacaaacattatggattccaactctatcaaagcgacccctcgggtaattacgggggttggaaggcgacctgtattggcaacaatagcgcagccgctgtttcaatgcttaagcaggactacaaagaaggagaaatgaccctgaagtcagccttggctcttgccattaaggtgctgaataaaacaatggatgtgtccaagctgtccgcagagaaagtggagattgcaactttaacaagagaaaatggaaagaccgtgatccgggtcctcaagcagaaagaggtagagcagctgattaagaagcatgaagaggaggaggccaaagcagagagagagaagaaagagaaagaacaaaaggagaaagacaaatag

SEQ ID NO: 248457 - RNA, 4551 nt, synthetic construct
  misc_feature 1..4551: note = Description of Artificial Sequence: Synthetic coding sequence
  source 1..4551: mol_type = other RNA
atggacaaccaacaagataaagcgatcgtggcttctgccaatggcgagaatacccttattaatggagtcaaggagaacgattccgaggaccaagatgtcgcgatgaaaagttttgctgctttagaggccgctgcacctatacaacctactccagtggcccagaaggaaacgctcatgtacccgcgaggcctactgccgcttcccagcaaaaaaccctgcatgcaatcccctccatcccccctgggtctgatcgaagcccctgaacacgccgccaattctgctagtgttaacgctatatctctgacttctgggatcgccaagggtctcaatacctggtccctccccaatgaatgtgaaaaagcaccatttgccatcatggagcctgccggcatgtccgcactcaacggggattgtcttatgcagccatccagaacttgtcttggctgtttcatggagtctaaagacgccgtggatcctgagccagggatatcccttaaggtgggtgatctcaaccgagactacgaaacttgtgcagtctctgatattggaatccagtgcattaacgcaggagagaacatgaaatatggggaacagctcctgtccgatcaattgcttggatttcccctccacaagagccgcgcaggcgatcgccgtgaaacagagaagcccgatatagatctggaggatccagcgcagaaatcgtactacgaggccctgctcttagacaagtgtaacactgaagaagcgctactggcaaatagcaaccaggactgggggtacttcgaaacttttatatctgagagcaagatcgaactgctcgatctgtgtagcaaaaacgaacttagcgtaaatctgttttccgaggaggatgtggataattatatgttcgatgacgacgaaagcactttgggctccgacgtgtgttcactcaagattagatatgaaagcttccaggataatgtgagggacaagactaccctgcttatgcaggaagatgcacaatttaacttcttcccgtctgttttcactacatgcccaaagagagagagtaagagtggtgcactgaagcagtccagcgactttagtcaattcaaggtgcctgatgtttctatcatctggggggaagaagataagaatctggacaagaagaaagggaaggaagaaggtcaggaggataaaggcgtggagaaaaaagatggcaaggacaacggggaaaagcccgcattaaacaagccctgttctggaaccgaggtggaacagctgaaaaatcctaagcagggccacctcgcaaattcattggagacaagcgggtcattcagcgatgatagctcgttcatcgaaatttcctacgatgctatgggcgagataaaagattgtagccgctacatggcaagagatactaattcaggcagttcttcctcccagcagaattatggattgagggccaagagaaaggttaggtattccgaagattatctgtatgatgtggatagcttggagggcgaaaaagtaaatgagagaaaggagtggctgccagtgggcagtaaggaagaagatgatgacgaatggtgccctaagaaacgcagaaaggttacaaggaaagagccacctgtcatcattaagtacatcattatcaataggttcaaaggcgaaaagaacatgctggtcaaacttggcaaggtggacgcatctgaaactacagtgaacctaagcgagaaccagctgaacaagtacgcgaagctagcccccctaaagggtttctggcagaagaagaaaaagcagcgaaacacgaataccgactccattaagaccccatttagtcagaaacagtcatttgaacccggcagtttcgaagtttccttcttacctcccgctcgcaaaaggaagagtaagctgggcaatcgccatcggatccagcgcattccttcaatcgagattagtgctagtagtaagcaaatctcactgtgcaatgatcagcggcatgcatcaaaccataaggaggacggtggcctgaaaggaaccttgaagtcagcacccctcggtgccccttcttgtgccaatgggtcacatctaaacgacatcacaggcccagattctgttaaggtgaaagcccaggatactgagttcaaaggacccgaacgaaaggtgctgaataagattaaattcaagtctgaagctcgattgaagtcaaaaaaggtgaaagccgcaggacaggagagcaaacctatcgtacagatgtcccccctgttagagaatcagtcgagtaaggcaaacctcaagaacgaagtcataccagggacatccaatagcagtcgactgtctgagttccatgaagccaaggctgcgaaatctagtacctttctgcctacgacttgctcgagcgaaatgccattgtccagcgcaaatgtaacaaccaacatcccagtgatccctggaggttatctgcagactctactcgatgctagcgatttgagcaataacaccagcatatcatacttctcgcaccactcgcctgagcagaacgagggatccctgacacaaaccgaaaaatcctttgttcccctgcaaccaacccaggattgtgtccttacctcttctagcgattctgagttgcagcagagcagtcataactttaagatggaaagctctaactatcgcaatgtatggccgaataaagccacctctggcacccaagaattcatggcagaggtcagccgagagatcgcgcccacccaatcatctgagttcggagcctcccaggtcgtatcaatggagaacaacttaacacccacaacatataatccaatctgcctgaattccggggggtccaactgcaataaggtcttgtacgattccatgcaggatacgcagctgcccagcgacgattcttaccagttatgccactttaataacggagagatctgtttcccgtttcagcagggtccagtaaacatggacgacgggcggctgttcagcttcgacagcatggctccgcttagtgtgtcctcatcgaattactgtagtctgtcattgaagtcttgtgagaaagatggtgatgacgatatcacggacgatttccttgctcactgtagtcccaagctggtgatccagcagagcatcgacgagattgcccctcttaaagaaagcactgacctattggatatatccaattttactcctgataagtttcgtcactccagcttaagcgaaatgtccccccccgacacaccttctttatctccccaaatcacacgctgcgagtctatgaagacactcgggaccctgaaaggcttccaggagggggtgcctgggcccctcgattctgtggaaaaaataaagtgggactgctctacgctgagccgccaagtgcagatggaggacggcttcactctcaataaccatcaattccagttccatatgttcaatgacgaggatagcgtgagcttgctgcagaaaaacccatgcctgtctaccttcaacgacccttccggccagatctccaccaacaacaaggtgtccaagtcccgtaaaaaaagctcaccatctaaaagcggagccatgaatcagagctcatcccagaaaaacacaagaaagaagagcctgaagggaaacaacaagggaattgaaaagccgccaggtaaaaactctcggcaggtccctaaatctaccaagaaagggaagtacatggcggccatcaacggcgaaaaaatgcaaattggcatcggtcggggcggatcacagacaaacaccatttcatctacgggcaaaacactcgccgagtgtatccagcacggtggcccaatggcttccatgaaaatgccgtctcagaagggactatccggggattgggctctcgggaaggaaagtagcccaggttggtcagatatgtctatgggcacaaataccaacagcctgcttgatgacgaccagagggaattccaagagcctagctatatcctatccaatatcgcaagtgggatggccgacgtgcagaggttcatgatggcttctatcgagcctttgtgggagcccatggagcatcatggagaccctaacatattttactccccagaaagtaacagcctgaagttaaaaacccttaaaattttggcaggcacacctcaagaaagcaaaaagaaaatcaatagcggaagtcagggagccactaaaaatcaccggtcgattaagggcgtcagcaaaagcaacgggaaaaccgccatcggtgaccctggccgtgctaatatgccgggttacaatgaagattcccgcagtacattcttcgacaagaaatactctaatatgagtacccttggcaacaatgggcccactcacaaaaagctgtatcgccacaagagttccagtaaggcacttagggacgaaaagtgtaaaggaaagcatatggagagagagcaggtgcataaggacgaatccggcactgcttctttcgaaaagctgcgtgattccgactacaacttgctgaaagctgagacaaccttttgggtgctccctgttttcgaggaagagacacgcattttccaaaaagatatttag

SEQ ID NO: 248458 - RNA, 1494 nt, synthetic construct
  misc_feature 1..1494: note = Description of Artificial Sequence: Synthetic coding sequence
  source 1..1494: mol_type = other RNA
atggaaactaagctgcctcctgcctccactccgacatctccttcatctcctgggctatcaccagtgcctccccccgataaagtagacggatttagcagaagaagtctcaggcgcgccaggcctagaagatcacacagctcgagccagttcagataccagtcaaatcaacaggagttgactcccttgccactgttaaaagacgtaccagcctcagagttacacgagctgctcagtcggaagctcgctcagtgtggggtcatgttcgattttctcgattgtgtcgcggacctgaaaggcaaagaggtcaaacgggcagctttgaatgagctcgtcgagtgcgtgggatcaacaaggggcgtgctcattgagcctgtttacccagacatcatacgaatgatctctgtcaatattttccgcacgttgccaccttctgaaaatccagaattcgatcctgaagaggatgagcctaaccttgaaccctcctggccccacctccagcttgtttacgagttcttcctccgctttcttgaatcccctgactttcaaccctcggtagccaaacggtacgtagaccaaaagttcgtgctcatgctcctggagttgtttgacagcgaagacccaagagagcgagagtacttgaaaaccatcctgcaccgggtgtatggcaaatttctgggactcagggcatatatccgaaaacagtgtaaccacatattcctgagatttatttatgagtttgaacactttaatggagtagcagaactgctggagatacttgggagcatcataaatggtttcgcactgcctttgaagaccgagcacaaacaattcctggttcgtgtgctgatccccctgcactccgtgaaatcccttagtgtcttccacgcacagttggcttattgcgtcgtgcaattcttagagaaagatgctacactcaccgaacatgttatccgaggtttgttgaagtattggcctaaaacatgcacacagaaggaagttatgttcctgggtgagatggaggagatcctggatgtcatcgagccgtcccaatttgtcaaaattcaggagccattattcaagcaggttgcccggtgcgtgtccagtccacactttcaagtcgccgagcgagctctgtacttttggaataacgaatatatactatcgctgatagaggacaactgtcacaccgtgcttccggccgtattcggcacactctaccaagtcagcaaagagcattggaaccagacaatcgtcagtttaatttataatgtgcttaaaacctttatggagatgaacggtaaactgtttgatgagctgaccgcaagctacaaacttgagaagcaacaagagcagcagaaggcacaggagcggcaggaactgtggcaaggcctggaggaactgagactccggcgtctccaaggtacccaaggtgccaaagaggcccccctacaaaggttgaccccacaagtggccgcttccggcgggcaaagctag

SEQ ID NO: 248459 - RNA, 1500 nt, synthetic construct
  misc_feature 1..1500: note = Description of Artificial Sequence: Synthetic coding sequence
  source 1..1500: mol_type = other RNA
atggccatggccgagggcgaaaggacagagtgcgccgagcctcccagggatgaacctcccgcagacggagctctcaagcgcgctgaagagctgaaaactcaagcaaacgactacttcaaggcaaaagactacgagaacgcaatcaagttctacagccaggctattgaactgaaccccagcaatgcaatatactatggaaacagaagcttagcatatctccgcacagaatgctatgggtacgccttgggcgacgcaactcgtgctatcgagctggataaaaaatatatcaagggttactacagacgagctgccagcaacatggctctgggaaaatttcgggctgccttaagggactacgagacagtggtgaaagtgaagccccatgataaagatgccaagatgaagtaccaggagtgcaataaaattgtgaaacagaaggccttcgagcgggcaattgcaggcgatgagcacaaaagatctgtggtggactctctagatatcgaaagcatgacaattgaggacgagtattcagggcctaaactggaggatggcaaagtaactatcagcttcatgaaagagttaatgcagtggtacaaagaccagaaaaagctgcacagaaaatgtgcatatcaaatcctggtacaggtgaaggaggtgctatctaaattgtctactctggttgaaaccactttgaaagagaccgaaaaaattactgtttgtggcgatacccatggacagttttatgatcttcttaatattttcgagctgaatgggctccccagcgagacgaatccctacatttttaatggtgattttgtggaccgcggttccttcagtgtggaagttatcttgacgctcttcggtttcaagctgctttacccagaccattttcatctgctccgcggcaatcatgagaccgataatatgaaccagatctacggtttcgagggcgaggtcaaggccaagtacaccgcccagatgtatgagctgttctctgaagtcttcgagtggctacctctcgctcagtgcattaatggtaaagtcctcatcatgcatggaggactgttttccgaggatggtgtgaccctagacgatattaggaagattgaacgcaatagacaacctcctgactcaggcccgatgtgtgatctgctttggagcgacccccagcctcagaatggaagaagcattagtaagagaggcgttagttgtcaatttgggccagatgtaacaaaagccttcttggaagaaaataacctcgattacatcatcagatcacacgaggttaaggctgaaggctacgaggtggctcacggaggtagatgtgtgactgtgttttccgccccaaactactgcgatcagatgggaaacaaggcatcttacatacaccttcagggctccgatcttaggccgcaattccatcagttcaccgctgttccccaccctaacgtgaaaccaatggcatacgctaataccttgttgcaactgggcatgatgtag

SEQ ID NO: 248460 - RNA, 696 nt, synthetic construct
  misc_feature 1..696: note = Description of Artificial Sequence: Synthetic coding sequence
  source 1..696: mol_type = other RNA
atgcgggtcctcggaggacgatgcggtgcgctgcttgcctgcctgttacttgtgctgcccgtgtcggaagccaatttttgcctgtacttccgtaacgattttatctataatcgcgcttgtattagtgtcctggtcggtttgtccggatgcaacttcttttattcaatatgttttctgtccaagcagcaggcctcccaggttctggtccggaagcgccgcgcgaacagcctcctcgaagaaactaaacaggggaatctagaacgcgaatgcattgaggaattgtgcaacaaggaggaagcgagagaagtatttgagaacgatcctgagactgactacttttatccaaaatacctggtgtgtcttaggtccttccaaacaggactatttacggccgcgcgccagtcaacaaatgcttatcctgatctaaggagctgtgtaaacgccatcccagatcaatgttctcctcttccatgcaatgaggatggctatatgagctgcaaggatggtaaggcctcttttacctgcacctgtaagcctggatggcaaggtgagaaatgtgaattcgacattaacgaatgcaaggacccaagtaatattaatggcgggtgtagtcaaatttgcgacaacacaccgggctcttatcactgttcctgcaagaacggatttgtgatgctcagcaacaaaaaagactgctag

SEQ ID NO: 248461 - RNA, 2031 nt, synthetic construct
  misc_feature 1..2031: note = Description of Artificial Sequence: Synthetic coding sequence
  source 1..2031: mol_type = other RNA
atgcgcgtgctcggcggcagatgtggtgcgttgctcgcttgccttctcctggtcctccctgtctcagaagcaaacttcctgtctaagcagcaggccagtcaagtgctggtcagaaaacgacgcgccaactccctgttggaggaaaccaaacaaggaaacctggaaagagaatgtattgaggagctgtgcaataaggaagaggcacgcgaggtttttgagaacgaccccgaaaccgattacttctacccgaagtatctggtgtgcctccggtcctttcagactggtttgttcaccgcggcccgccaaagtacgaacgcgtacccagatctcagatcctgtgtgaacgctattcctgaccagtgcagccctctgccttgcaacgaagacgggtacatgagttgcaaggacggaaaagcctctttcacatgtacatgtaaacctgggtggcaaggggaaaagtgtgagttcgacattaatgaatgcaaagaccccagtaatattaatggtggttgttctcagatttgtgataacactcccggcagttatcactgctcatgcaagaatggctttgttatgctaagcaacaaaaaggactgtaaagacgttgatgagtgctcattaaagccatcaatttgtggaacagccgtgtgtaaaaacatccccggagacttcgaatgcgagtgccctgaagggtatagatacaatttaaagagcaaaagctgcgaagacatcgatgaatgtagcgagaacatgtgcgctcaactgtgtgtcaactaccctggcggctacacctgttactgtgatggaaagaaagggtttaaactggcccaggatcagaagagctgtgaggtggtatcagtctgtctccccctgaatttggatacaaagtatgaactgctgtacttggctgaacagtttgctggcgtagttctgtatctgaagtttcgcctaccagagatctcccgctttagcgccgagttcgactttaggacctatgactccgaaggggtcatcctgtatgccgaaagcattgatcattctgcctggctcctgatcgcgctgcggggtggcaagattgaggtccaacttaagaatgaacatacatccaaaattactactggtggcgacgtcatcaacaatggcttatggaatatggtgtccgttgaggagctggaacattcgatttcaatcaaaattgcaaaagaagctgttatggacattaataaaccgggtccactgtttaagccggaaaatggccttcttgagacaaaagtctactttgccggattcccccgtaaggtcgaaagtgagctgatcaaacccattaacccccgccttgacggttgtatccggtcttggaatctgatgaagcaaggtgcaagtgggattaaggaaatcatccaggaaaaacagaacaaacattgtttagtaactgtggagaagggctcatattaccctggatccgggattgctcagtttcacatcgactataacaatgtgtcgtcagctgagggatggcacgtcaacgttaccttaaacattcgcccatctacaggaaccggggtgatgcttgctttggtgagcgggaataatactgtccctttcgccgtgtctctagtggactcaacctctgaaaaatcccaggacatcctcctgtccgtggaaaacactgttatttacaggatccaagccctaagcctctgttcagaccaacaatctcacctcgagtttcgcgttaataggaacaacctggagttaagtactccactcaagatcgagactatctcgcatgaggatttgcaaaggcagcttgcagtgttagacaaagccatgaaggcgaaggtggcgacatatctggggggcctccccgacgtgcccttctcagcaacacctgtgaacgcattttacaacggctgtatggaggtcaacatcaatggggttcagctcgatctcgacgaagctatatccaaacacaacgatatccgtgcccactcgtgtccgtcagtctggaagaagaccaaaaattcatag

SEQ ID NO: 248462 - RNA, 1269 nt, synthetic construct
  misc_feature 1..1269: note = Description of Artificial Sequence: Synthetic coding sequence
  source 1..1269: mol_type = other RNA
atggcaggctgcgtccccttactccagggcttagtgctcgttctcgcgttgcacagagtggagcctagcgcgactagcctcaaggagcgacacggcttgcattcagactccgcttgcacaggagtgcaggagtccctgttcttacctgcctctaaagctaacgacgtattggtaagatggaagcgagccggcagttacctgctggaggagctgtttgaaggcaatctggagaaggagtgctacgaagagatctgtgtgtacgaagaagctagggaggttttcgagaatgaggttgttaccgacgagttttggcgacggtataaaggaggatcaccatgtatttcacaaccctgcctccacaatggttcctgccaagattccatttggggatacacctgtacatgctcccctggctacgaaggatcgaattgtgagctcgctaagaatgaatgccatccagaaagaaccgatgggtgtcagcacttttgcctgcccggacaggaaagctatacttgttcctgcgcccagggataccgactgggagaagatcataaacagtgcgtccctcacgaccagtgcgcttgtggggtcctgaccagcgagaagagagcgccagatctgcaggatctgccatggcaggtaaaactaacaaactcagagggtaaagacttctgtggcggggtcatcatccgggagaatttcgtgcttaccaccgccaaatgcagcctgctacatagaaatattactgtcaagacgtactttaataggacctcccaggatccccttatgataaaaataacccacgttcacgtgcacatgaggtatgacgcagacgccggggaaaacgacctgtcactcttagagctggagtggccaatccagtgcccaggcgccggccttccggtatgcactccagaaaaagacttcgcagagcacttgctaataccacgcacgagggggctgctttctggctgggccagaaatgggaccgatctggggaattcgctaacaacccgccccgtgacccttgtggagggagaagagtgtggccaggtgctgaacgtcacggtaacgacgcggacatattgcgaaagaagctctgtggccgccatgcattggatggacgggagcgtagtcacacgagagcatcgtggatcctggttcctaacaggtgtgctgggcagtcaacccgtaggcgggcaagcccatatggtcttggttactaaagtgtccaggtattcactgtggtttaagcagattatgaactag

SEQ ID NO: 248463 - RNA, 1203 nt, synthetic construct
  misc_feature 1..1203: note = Description of Artificial Sequence: Synthetic coding sequence
  source 1..1203: mol_type = other RNA
atggcaggatgtgtcccactgctccagggcctcgtgctcgttttagctcttcacagagtggagccatccgtcttccttcccgcctccaaggctaatgatgttctggtgcggtggaaacgagctggatcatacctcctggaagaattgtttgaaggaaatctcgagaaggagtgttacgaagaaatatgtgtttatgaggaagctcgggaggtttttgaaaacgaggtcgtgaccgatgagttttggcggaggtacaaaggaggaagtccatgcatctctcaaccttgcctgcacaacggctcctgccaagattcaatttggggttacacgtgcacatgctcccctggctatgagggttcaaattgcgagttggctaaaaacgaatgtcatccagagcggactgatggttgccaacacttctgtttgcccggacaggagtcctacacttgctcctgcgctcagggctatcgtcttggagaggatcacaagcagtgtgtgcctcatgaccagtgcgcatgcggagtactgacctccgagaaaagggcgccagatcttcaggatctgccttggcaggttaaactgaccaattccgaaggcaaggacttttgtggcggtgtgattatacgcgaaaactttgtcctgacgaccgctaagtgctctctgctgcacaggaacatcacagttaagacctacttcaataggacctcacaagaccctcttatgataaagattacacacgtgcatgtgcatatgaggtatgatgcagatgccggcgagaatgacctgtctctgctggaactagaatggcctattcagtgccccggtgctggtctccctgtgtgtacaccagaaaaagactttgcagagcacctactgatccctcgcacgcgcggtttactgtccggctgggccagaaacggcacggacctaggaaattcattgaccacacgacctgtgaccttagtggaaggcgaagaatgcgggcaggttttaaatgtcaccgtgacaaccaggacttattgcgaaagaagctccgtggccgctatgcactggatggacggaagtgttgtaactagggaacataggggctcttggtttctcacaggagtgttggggtcccagccagtggggggtcaggcccacatggtactcgtcacgaaagtaagccgctacagcctctggttcaagcaaatcatgaattag

SEQ ID NO: 248464 - RNA, 1053 nt, synthetic construct
  misc_feature 1..1053: note = Description of Artificial Sequence: Synthetic coding sequence
  source 1..1053: mol_type = other RNA
atggagcctaaacgcatccgggaaggatatctggtgaaaaagggcagtgtgtttaatacctggaagccaatgtgggttgtgcttttggaggatgggatcgaattttacaagaaaaaatccgataatagcccaaaaggtatgatccctctgaaaggtagcaccctaacaagtccctgccaggacttcggcaagcgaatgttcgttttcaaaattacaaccacaaaacagcaggatcatttttttcaggcagctttcctagaggaaagagatgcttgggttagagacatcaagaaggccataaagtgcatcgagggtggccagaagttcgcacggaaaagcacacggaggtctatccggctgcccgaaactattgatctgggcgcactttatttgtctatgaaggatacggaaaagggaatcaaggagctgaacctggaaaaggataaaaaaatttttaaccactgtttcaccggaaactgcgttatcgattggctagttagcaaccaatctgtgagaaatcgccaggagggcctgatgattgcatcttcacttctgaacgaaggctacctacagcccgctggggacatgagtaaatccgccgtggacggaaccgccgaaaaccccttcctcgataaccccgatgctttttactactttccagactcaggttttttctgcgaggagaacagcagcgatgatgatgttatcttgaaagaagaatttagaggagtaatcatcaaacaaggctgcctgctgaaacaagggcacaggagaaaaaattggaaagtcagaaagttcatcctgcgagaggaccccgcatacctgcactattatgacccagctggggccgaggatcctcttggagccatccacttgcggggttgcgtggttacctccgtcgaatctaacagtaacgggcgcaaatctgaggaagagaatcttttcgaaatcataactgccgatgaggtgcattattttctgcaggctgctaccccaaaagagcgcacagagtggatccgggctatacagatggctagtcgtaccggaaagtag

SEQ ID NO: 248465 - RNA, 1236 nt, synthetic construct
  misc_feature 1..1236: note = Description of Artificial Sequence: Synthetic coding sequence
  source 1..1236: mol_type = other RNA
atgaaggccgctagatttgtcttacgcagtgcagggtcgttgaacggagcagggctggtgcctagggaggtggagcactttagcagatattccccgtctccgctgagcatgaagcagcttttagacttcggtagcgagaatgcatgcgagcggacatcttttgcgttcttaaggcaggaactgcccgtgaggctcgccaatatcttaaaggaaatcgacatattgccaactcagctggtcaacacctccagtgtgcagctggtaaagtcctggtacatccagagcttgatggaccttgtcgagttccacgaaaagagtcctgacgatcagaaagcgctgtccgatttcgtagatacccttataaaagtccgaaacaggcatcacaacgtcgtacccactatggctcagggaattatcgagtacaaggatgcctgcactgtcgatcccgttaccaatcaaaacctccagtacttcctcgatcgtttttatatgaaccgaatttccacacggatgttgatgaatcagcatatcctcatttttagcgattctcagaccggtaaccccagtcatataggatcaatcgatccaaactgcgatgttgtggctgtagtccaagacgcgtttgaatgttctcgtatgctgtgtgaccaatactatctgtcaagtcccgagctgaaactgacccaagttaacgggaagtttcctgaccagccaatccatatcgtgtatgtaccgagccaccttcaccatatgctatttgagctgttcaagaatgccatgcgcgccaccgtggaacaccaggagaaccaacctagtctcacacccatagaggtaattgtggttttgggcaaagaagatctaactatcaaaattagcgataggggcgggggcgtgccactgcggattattgatcgcttgttctcttacacatacagcactgctcctactcccgtcatggacaattcgagaaatgcacctttggcgggcttcggatatgggctccccatttctaggctgtatgcaaaatattttcagggagatctcaacttatactcactcagcggctacggtaccgatgccataatctatctcaaggcattgagtagtgagtccatcgaaaagttgcccgtttttaataaaagcgccttcaaacattaccaaatgagctcagaggcagacgattggtgtattccaagtagagagcctaagaatcttgcaaaggaagttgctatgtag

SEQ ID NO: 248466 - RNA, 1968 nt, synthetic construct
  misc_feature 1..1968: note = Description of Artificial Sequence: Synthetic coding sequence
  source 1..1968: mol_type = other RNA
atgacagagtgtttcctccccccaaccagctccccctccgagcatcggagggtggaacacgggagcggactgaccaggacacctagcagcgaggaaatttcccctaccaagtttccaggtctgtacaggacaggagagccaagcccaccgcacgatatcttacacgaaccacccgacgtcgtatccgacgatgagaaggatcacggaaaaaagaagggaaagtttaagaagaaggaaaaacggactgaaggatatgccgcgtttcaagaagattcgtctggggacgaggctgagagtccctcaaagatgaaacggagtaagggaattcatgtttttaagaaaccatcattttctaagaagaaggagaaagattttaagataaaggagaagccaaaagaggagaagcataaagaagaaaaacacaaggaggagaaacacaaagagaaaaaaagcaaagatctcaccgccgcggatgttgttaagcaatggaaggagaaaaaaaaaaaaaagaaacctattcaggaacccgaggttccccagatcgatgtgcccaacctaaaaccgatcttcggaatcccgctggctgacgccgtggagagaactatgatgtacgatggcattcgactgcctgccgtcttcagagaatgcatcgattatgtggagaagtacggcatgaaatgtgagggcatctatagggtttcaggtattaagagcaaagtggatgagctgaaagcagcctacgaccgtgaagagtccaccaatctcgaggactatgagccaaacacagtagcaagtttgctgaaacaatacttaagggaccttcccgagaacctgctcactaaggaacttatgccaagatttgaagaggcctgtggacgaaccactgagactgaaaaggtccaagagttccaacggttgctcaaagagttgccagagtgtaactatctacttatctcatggctgattgtgcacatggaccacgtgatagctaaggaattggaaacaaagatgaatatccagaacatctccatcgtcctctcacccacagtccagatctccaaccgtgttctatatgtcttcttcactcacgttcaggagctgttcgggaatgtggttctcaaacaggtcatgaagccgctgagatggagcaatatggcaaccatgcccaccctccctgaaacccaagcaggcataaaggaagaaatccgccggcaggaatttttgttaaattgcttgcatcgagaccttcagggaggaatcaaggacctgtctaaggaggagcggctatgggaggtgcaaaggatcctgacagccctgaaacgaaaactgcgcgaagcgaagagacaagagtgcgagaccaaaatagcccaggagattgcctcactgagtaaagaggacgtgtccaaggaggagatgaatgaaaatgaagaagtgatcaatatccttttagctcaagaaaatgaaatccttactgaacaagaggagctgttggccatggaacagtttctgcgccgccagatcgctagcgagaaggaggaaattgagcgactgagagcggaaattgcagaaatccagagcagacaacaacacgggagaagcgaaaccgaggagtattccagcgaatccgaatctgaatccgaagacgaagaggaactgcagataatcctggaagacctccagcggcagaacgaggaactggagatcaagaataaccatctcaaccaggcaatccacgaagagcgcgaggctatcatcgaattacgcgtccagttacgattgctgcaaatgcagagggctaaggccgagcagcaggcacaggaggatgaggaacccgaatggcgcggcggcgcagttcagccccctcgggacggggtgctcgaacccaaggccgccaaagagcaacctaaggccggaaaggagcccgcgaaaccttctccttctcgggaccgtaaagagaccagcatatag

SEQ ID NO: 248467 - RNA, 1500 nt, synthetic construct
  misc_feature 1..1500: note = Description of Artificial Sequence: Synthetic coding sequence
  source 1..1500: mol_type = other RNA
atggccgacctggccaatgaagaaaagcccgcaatcgcgccacctgtctttgtgtttcagaaggacaaagggcaaaagcgaagtgctggggggagctcacctgagggaggcgaagattctgatcgggaggacggcaactattgtccgcctgtaaagcgagagcgaacgagtagtttaacccagtttcctcccagccaatccgaagaacgctcttctggatttagattaaaaccccctactttgatccatggtcaggctcctagcgccggtctaccctcgcaaaaaccaaaagagcaacagcgcagtgtcttgcgtccagccgtcttgcaagcgcctcagcctaaggcactgagccagaccgtgcctagctctgggactaatggcgtgtcactaccagccgactgcacaggcgccgtgcccgccgcttcgcctgatactgccgcttggcggagtccttccgaggcagccgacgaggtctgtgcgcttgaagagaaggaacctcaaaagaacgagtcttcgaacgccagtgaggaggaagcttgtgaaaaaaaagatccagcgactcagcaggcatttgtgttcgggcaaaatctgagagacagagttaagcttattaatgaatccgtagacgaggcagacatggaaaatgccggacatccatccgccgatacaccaacagccaccaattatttcctacagtatatctcctcatcactggagaactcaaccaacagcgcagatgcttcaagtaacaaatttgtttttggccagaatatgtctgagagggtactaagccctcctaagctgaatgaggtgagctctgacgcaaatcgggagaatgctgcggcagaatctggatcagaatccagctcacaagaagcgacgcctgagaaggaatctctggctgaaagcgcagctgcgtataccaaggctaccgcacgtaagtgtctactagagaaggtcgaagtgattaccggcgaggaagcggaaagcaatgtccttcagatgcagtgtaagctgtttgtgtttgacaagacaagccagagttgggttgaacggggaaggggtctcctgagactcaacgacatggcctccactgacgatggcaccttgcagagtcgattggtcatgcgcacccaaggaagtctgcgcttgattctgaacactaaactgtgggcacaaatgcagatcgacaaagcatcagagaaatccattagaattacagccatggacacagaggaccagggtgtgaaagtgttcttaatttccgcctcctctaaagataccggacagttatacgctgccttacaccacaggatcctcgccctgaggtcgagagttgagcaggagcaagaagctaagatgccagcccccgaaccaggggcagctccctcgaacgaggaggacgattctgatgacgacgatgtgttagccccctcaggcgccaccgcagccggcgcgggtgatgaaggagatggccagacaacaggctcgacgtag

SEQ ID NO: 248468 - RNA, 2190 nt, synthetic construct
  misc_feature 1..2190: note = Description of Artificial Sequence: Synthetic coding sequence
  source 1..2190: mol_type = other RNA
atgtccggccagcctcctccccctccgccccagcagcagcagcagcaacagcaattgagcccacctcctcccgcagccctcgccccagtatcgggcgttgtcctgcctgccccccccgctgtctcagcagggtcctctcccgcaggatctcctgggggcggcgcgggcggtgagggccttggtgccgctgccgctgcgcttctgcttcacccccctccgccacctccgcccgcaaccgcagccccccctccgccccccccgccgccaccacctcccgcaagtgcagcagcacccgcaagtgggccacccgctccccccggcctcgctgctggtcccggacccgccggcggcgctcccacccccgccctggtcgctggttcctccgccgccgctcctttccctcacggagacagtgcactgaacgagcaagagaaagagcttcagcggagactcaagagactctacccggccgtcgacgagcaggagacccctctaccgcggtcctggtccccaaaggacaagttcagctacatcgggctgagtcagaacaacctaagagtgcattacaagggccatggcaaaactcccaaagatgccgcatcagtgcgtgctactcatcccatcccggctgcttgcgggatctattattttgaagttaagattgtcagtaagggccgagacggatacatgggcatcggactatccgctcaaggagtaaacatgaacaggctgcctggctgggataagcactcctacggctaccatggagacgacgggcacagcttttgtagcagtggtactggtcagccatatggcccaactttcaccacaggcgacgtcatcgggtgttgtgtgaatttaataaataatacatgtttttatacaaagaacgggcatagcttgggcattgcattcacagacctgcccccgaacctctatccaactgtcggcctccagacaccaggggaggttgtagacgccaacttcggacaacatccattcgtgttcgatattgaagactacatgcgggaatggagaactaaaatccaagcccagatagacagatttcctatcggggatcgggagggagagtggcagaccatgattcagaagatggtgtcatcgtacctggtgcaccatggctactgtgccaccgccgaggcttttgctaggtccaccgatcagaccgtactagaggaacttgcttcaataaaaaatagacaaaggatccagaaattggtgctcgccggtaggatgggagaggccatcgagaccactcaacagctatacccaagcctcctggagaggaatccaaatctgcttttcactctgaaagtgagacaattcatagaaatggtgaatggaactgatagtgaggtcagatgcctaggcgggcgcagcccaaaaagtcaggactcctatcccgtctctcctcggccattctccagtcctagcatgtcaccaagtcacggcatgaacatccacaatctggccagtggcaagggctccacagctcatttcagcgggtttgagagctgctcaaacggagttatctcaaacaaagcccaccagtcctactgccattctaacaaacaccagagtagcaacttaaatgtacccgagctgaatagtattaacatgtcccggtcccaacaggtgaataatttcacctccaatgacgttgacatggagacagaccattacagcaatggcgtaggagagacctcaagtaatgggttcctcaacggttccagcaagcatgatcacgagatggaggactgcgacaccgaaatggaggttgattcgtcacagctgcgacggcaactatgcggtgggtcccaagccgccattgagagaatgatccatttcggcagggaactacaagcgatgtccgagcagctgcgaagagactgcggaaaaaataccgccaacaagaagatgctcaaagacgcctttagtttactcgcatactccgacccctggaactcccctgtggggaaccagctggatcccattcagcgggagcctgtgtgctcggctcttaattctgctatcctggaaacccacaacctcccaaaacagccccccctggcgctggccatgggacaagccacacagtgcctcggcctcatggctagatccggaataggctcgtgcgcttttgcaacagttgaggactacctacactag

SEQ ID NO: 248469 - RNA, 5298 nt, synthetic construct
  misc_feature 1..5298: note = Description of Artificial Sequence: Synthetic coding sequence
  source 1..5298: mol_type = other RNA
atgcgcaggtcaaaagccgacgtcgaaaggtatgtagcttccgtattgggcctgaccccaagcccccgtcagaagagcatgaagggattttactttgcgaagctgtattatgaagctaaggaatacgatctcgcaaaaaagtatatatgcacgtatatcaacgtgcaggagcgggaccccaaggcacaccggtttctcggcctgctttatgaactcgaggagaacactgagaaagccgtggagtgttaccgccggtcagtggaacttaacccgacacagaaagatctcgtgctgaaaatcgccgagttgctatgcaaaaacgacgtgactgatggccgtgccaagtactgggtagagagagcagcaaaactcttcccagggtcgcccgcaatttataaacttaaagaacagctgctggattgtgagggcgaggatgggtggaataaactgttcgacctgattcagagtgaactgtacgttagacctgacgacgtccacgtgaacataagactcgtggaattatataggagtaccaagaggcttaaagacgcggtcgcccattgtcatgaggccgagcgcaacatcgctctcagatcgagtctggaatggaattcttgtgtcgtgcagactttgaaggagtatctggagagtctgcagtgccttgaatccgacaaatccgactggcaggctactaacaccgacctgttgttggcctacgcaaatctcatgttactgactctgagcaccagggacgtccaggagaaccgggagctcttagaaagctttgacagtgcactccagtccgccaaaagcagcttgggcggaaatgacgagctgagtgcaacttttctggagatgaagggccatttctatatgtatgcggggtctctgttgctgaaaatgggacaacacggcaacaatgtccagtggagggccctgtcggagttagccgccctatgttatcttattgcatttcaggtcccgcggcccaaaataaagcttagagagggaaaggctggccagaatctgttggagatgatggcctgcgaccggctgtcccaatcaggacacatgttgctgtcgcttagcagagggaagcaagacttcctgaaggaggtcgtggagactttcgcaaacaagatcggacaatctgcattgtacgatgcactgttttcatcacagtcccctaaggacacaagctttctgggcagtgacgatatcggtaaaattgacgtccaggagccggaactggaagatcttgctagatatgacgtaggcgctatccgcgcacataatggctctctgcagcatctcacttggctgggcctccagtggaattctctgccagcgctgcctggcatccggaaatggctgaaacaattgttccatagactgccacacgagactagtcggctcgagacgaatgcgccagaaagtatctgcattttggacctggaagttttcctgctgggcgtagtgtatacttcccacctacaacttaaggagaaatgcaactcacatcacagcagctaccagccactgtgcctcccctttcccgtgtgcaaacagctgtgtaccgagcgacaaaagagttggtgggacgcagtctgcacgctcatacaccgcaaagccgtacccgggaatctggcaaagctgcgactgctcgtccagcacgagatcaataccctgcgggcccaggagaagcatggattgcaacctgctttgctggttcattgggctaaatatctgcagaagactggttccggtttaaatagcttctatggccagttggaatatattggcaggtccgtacactattggaagaaagttctgcctctcctcaagattataaagaagaacagcataccagaacctatagaccccctttttaagcactttcattcagttgacattcaagcatcagaaattgtggaatacgaggaagatgctcacatcacattcgccatgctggacgcagtcaatggaaacatcgaggacgctgttacggctttcgagtccatcaagagcgttgtctcttactggaatctggcgcttatcttccacaggaaagccgaggatatcgagaacgatgccttgtccccagaggaacaggaggagtgcagaaactacttaaccaagacccgggactacttgatcaaaatcattgatgacggggactctaatttatctgtcgtgaagaagctccctgtgcccctggagtccgtgaaacagatgcttaactccgtcatgcaagaactggaggattattccgaggggggaccactatacaaaaatggttctctgcgtaacgccgatagtgagattaagcactcgacccctagcccgaccaaatactcccttagcccctccaaatcttacaaatatagccccgagacacctccacgttggactgaggataggaactccctgttgaacatgatctgccagcaggttgaagctattaaaaaggagatgcaagaactcaaactaaattctagcaagtcagcttctcggcatcgctggccaactgagaactatggacctgacagcgtgcctgacgggtatcaaggaagccaaaccttccacggcgcccccctgacagtggcgacaaccgggccctccgtttactatagccaatccccagcttataattcgcagtacttgctccggcccgccgccaatgtcactcccactaaggggtcctcgaacacagagtttaagtccaccaaggaagggttcagcattcctgtctccgcagatggatttaagtttgggatttctgaacctggtaaccaggaaaagaagagagagaagccgctggagaatgatacaggattccaggcgcaggatatctcagggcgtaaaaaggggcgtggcgtcatattcgggcagacatccagtacatttacattcgctgatgtggcaaagtccacgtctggagaaggatttcagtttgggaagaaggatttaaacttcaagggcttcagcggcgccggcgaaaagctgttcagctctaggtatgggaagatggccaataaagcgaacacctctggggatttcgaaaaagacgacgatgcctataaaacagaggacagcgatgatatccattttgagcccgtagtgcagatgcctgagaaagtcgagttggtaactggcgaggagggcgaaaaagttctgtacagccaaggtgtgaagctgttccgtttcgatgccgaggtgagacagtggaaggagaggggtctgggaaacctcaaaatcctgaaaaatgaagtcaacggtaaactgcgtatgcttatgagacgtgagcaggtgttgaaagtgtgtgcgaatcactggattacaaccactatgaatctcaagccacttagtggaagtgacagggcctggatgtggagtgcctctgacttttccgatggggatgctaaactggagaggttggccgccaagtttaaaactccagagctggctgaagaattcaagcagaaattcgaggaatgtcagcgccttctgttagacatccccctgcagactccgcacaaacttgtggataccggaagagcggctaaactaatccagagggcagaggagatgaaatccggactgaaggactttaagacattcctgaccaacgatcagaccaaggttactgaggaggagaacaagggtagcgggacaggggctgccggcgcctctgacactactattaaacccaacgcagagaatacgggccctacccttgagtgggataactacgacctcagagaagatgccttagacgattcagtgtcaagtagctcagtgcatgcatccccccttgccagttcacccgtgagaaaaaatttatttcggttcgatgaatctaccacaggatcaaactttagtttcaagtctgcactgagcctttcgaagagtcctgcaaagttgaaccagtcgggcacttccgtaggcaccgacgaggaatctgtggtgacccaagaggaagagagagatggccagtattttgaaccagtggtgcctcttccagatctagtggaggtgtcatctggcgaggaaaacgagcaggtagttttctcacaccgggctgaaatttatagatacgataaggacgtcgggcaatggaaggaacgaggcattggggatattaagatcctccagaattatgataacaaacaggtgcgaatcgtcatgcggcgtgatcaagtcttaaagctgtgcgctaatcaccgtatcacacctgacatgtccctacagaacatgaaaggaaccgagagagtgtgggtctggaccgcgtgtgactttgcagatggggaacggaaggtggagcatttggcagttagattcaagctccaggatgtcgctgattctttcaaaaaaatttttgacgaagctaaaacagcccaggaaaaggattccctgatcacaccccatgtaagtaggtcaagtacccccagagagagtccttgcggcaaaatagccgtggccattctggaagaaacaactcgcgagagaactgacgtgatccagggggatgatgtggccgacgcggcttcagaggtcgaagtctcgtcgacctcggaaactaccacaaaggcagtggtttcacctccgaagttcgttttcgtaagcgaatctgtgaaaagaatattcagctccgagaagtctaaacctttcgtgttcggcaattccagtgctacaggatccttatttggcttttcatttaacgcaccactgaaatccaataacagcgagacttcgtctgtcgcgcaatccggatctgaaagcaaggtggagcctaaaaagtgcgagttaagcaagaactcagatatcgagcagagctccgatagtaaagtaaaaaacctgtcagcgagcttcccgactgaggagtcatctattaattacacctttaaaacaccagaaaaggaacctccactttggcacgccgagttcactaaggaagagttagtgcagaaactgcgctctaccacaaaaagcgctgatcacttgaacggcctgttgagggaaatcgaagccaccaacgctgtattgatggagcagattaaacttctgaaatccgaaattcgccgcttggagcggaaccaggaaagagaaaagtctgccgccaatctggaataccttaaaaacgttctgttacagttcatcttcttgaaacccgggagtgaaagagagcgcctccttccagtgatcaatacaatgctgcagctttccccggaggagaaaggaaagcttgccgccgtggctcaagatgaagaagagaacgcttcccggtcaagcggctag

SEQ ID NO: 248470 - RNA, 447 nt, synthetic construct
  misc_feature 1..447: note = Description of Artificial Sequence: Synthetic coding sequence
  source 1..447: mol_type = other RNA
atggcgagggccctctgcaggctgcctcgcagaggtctgtggcttttactcgctcaccatttgttcatgaccacagcctgccaggaagctaactacggcgccctcctgcgagaactctgtctgacccagttccaggtcgacatggaggcagtaggcgagaccctgtggtgcgactggggccggactatacgctcatatcgagaactcgcagactgtacatggcacatggcggaaaaactaggatgtttctggccgaatgccgaggtagatagattcttcttagctgtccacgggcgatatttccgaagctgcccgatctctggtcgtgcagtgagggatcccccgggatctattctttacccattcatcgtagtcccaatcactgttacacttttggtcaccgccctggtggtctggcagtcgaaacgaaccgaaggcatcgtgtag

SEQ ID NO: 248471 - RNA, 381 nt, synthetic construct
  misc_feature 1..381: note = Description of Artificial Sequence: Synthetic coding sequence
  source 1..381: mol_type = other RNA
atgaccactgcctgccaggaagcgaactacggagcactcctcagagagttatgcttaacacagtttcaagtggacatggaggccgtaggcgaaactctctggtgtgattggggaagaactattcgtagttatcgggagctggctgattgcacttggcacatggcagaaaagcttggatgtttctggcctaacgccgaagtggataggtttttcctcgctgtccatggaagatattttcgcagttgtcccatctcaggaagagcagttcgtgaccccccagggagtatcctgtatccattcatcgtggtcccaatcacagtcactctgctcgttacagctttagttgtgtggcagagcaaacgcactgaaggcattgtttag

SEQ ID NO: 248472 - RNA, 381 nt, synthetic construct
  misc_feature 1..381: note = Description of Artificial Sequence: Synthetic coding sequence
  source 1..381: mol_type = other RNA
atgaccaccgcttgtcaagaggctaactatggtgcattgctccgggaactgtgcctgacacaatttcaagtcgacatggaggccgttggcgagacattatggtgtgattggggacgcactattcgcagctatagagaactggcagattgtacttggcatatggccgaaaaattgggctgtttctggcccaacgctgaagttgatcgcttcttcctcgccgtgcatggacggtattttcggagctgtcctatctcagggcgagcggtgagagatccccctggctcaatcctgtatccattcatcgtcgttccaatcacagtgacgctgttagtcactgccctcgtcgtttggcagtcaaaaagaacggagggcatcgtctag

SEQ ID NO: 248473 - RNA, 381 nt, synthetic construct
  misc_feature 1..381: note = Description of Artificial Sequence: Synthetic coding sequence
  source 1..381: mol_type = other RNA
atgacaacagcctgccaggaagccaattacggcgctttgttgagagagctatgtctaacccagtttcaagtggatatggaggctgtaggggagactctgtggtgcgactggggccgcactatccgatcatatcgtgagcttgcagattgcacatggcacatggctgagaaactcggttgtttttggcccaacgcagaagtagataggtttttccttgcagtgcacggaagatactttaggtcttgtcctatctctggcagagccgtccgagatccccctggcagtatactatacccgttcatcgttgtgcccataaccgtaactttgttagttaccgcccttgttgtttggcagtccaaacgcacggaaggcattgtctag

SEQ ID NO: 248474 - RNA, 606 nt, synthetic construct
  misc_feature 1..606: note = Description of Artificial Sequence: Synthetic coding sequence
  source 1..606: mol_type = other RNA
atggtaagctggattatcagtagacttgtcgtgcttatcttcggaactttgtaccccgcatattactcatacaaagcagtgaaaagcaaggacattaaagaatatgtgaagtggatgatgtactggatcatctttgcactttttaccacagccgaaacgtttacggacatcttcctgtgttggttccctttttattatgagcttaagattgcgtttgtagcctggctcctctctccgtacaccaagggctccagccttttatatagaaaattcgttcatcctaccctgagctctaaggagaaggaaattgacgactgcctcgtgcaggccaaggatcggagctatgacgccctagttcacttcggtaagcgagggctcaatgtggctgccaccgccgccgtgatggccgcgtcgaagggacaaggtgcactctcagaacggctcagaagtttttcgatgcaggacctcaccacgatccgaggcgacggtgccccagctccaagcggacctccacctccaggaagtggtagagcgagtggcaagcatggccagcccaaaatgtccaggtcagcttcagaaagtgcctcgtcaagcggcacggcttag

SEQ ID NO: 248475 - RNA, 1293 nt, synthetic construct
  misc_feature 1..1293: note = Description of Artificial Sequence: Synthetic coding sequence
  source 1..1293: mol_type = other RNA
atgaagcctagtttactgtgccgccccctgtcatgctttctcatgctcctcccttggcctttggcaactctgacatctacaaccctttggcaatgcccacctggcgaggagccggaccttgacccaggccagggcaccctatgccggccttgcccgcccggaacattctccgccgcttggggctccagcccgtgtcaacctcacgcccgctgttctctctggcgccggctggaggcccaagtcggcatggctacacgtgacaccttatgtggcgactgctggcccggttggtttgggccatggggtgttccgagagtcccatgtcagccatgcagttgggcacccctgggaacacatggttgcgatgaatggggaaggcgcgctaggaggggcgtggaggtggctgctggcgcttcatccgggggggaaactcgtcagcccggcaatggcacccgcgcaggagggccagaggagacagctgcccagtatgccgtaatcgcgattgtcccagttttttgcctgatgggactcctggggattcttgtgtgcaatttgctcaagcggaagggctaccattgtactgcccacaaagaggtcgggcctggccctgggggtggcggcagcggcatcaaccccgcttatagaaccgaggacgcaaatgaagataccatcggcgtgctagtccgcctcatcacagaaaagaaagaaaacgccgcagctctggaagaattgttgaaggagtatcattctaaacagctcgttcagacaagccacagacccgtatccaagttgccccctgcaccccccaacgttccacacatttgccctcatcgacatcatctgcatacagtgcaagggctggcatcactgagcggcccatgttgtagtaggtgttcccaaaaaaagtggccagaagtcctgctaagccccgaagcagtggctgctaccaccccagtgccatcattgctgccgaaccccacccgcgttcctaaagcaggtgccaaggcagggcggcagggggagatcacgattctgtccgtgggccgattccgagtggcgaggattcctgagcagagaactagtagcatggtgagcgaagttaaaacgatcaccgaggctggcccatcctggggcgatctccccgactcccctcaaccaggactgccacccgaacaacaagccttactgggctccggggggtcccgaacaaagtggctgaaacctcctgccgaaaataaggcagaagagaaccgatacgttgttaggctttcagagagtaatttagtgatctag

SEQ ID NO: 248476 - RNA, 1065 nt, synthetic construct
  misc_feature 1..1065: note = Description of Artificial Sequence: Synthetic coding sequence
  source 1..1065: mol_type = other RNA
atggaggtagaagctgtttgtggtggagcaggtgaagtagaggctcaggattctgaccctgctcctgcattcagcaaagcaccgggttccgcgggacattacgagctgccgtgggtggaaaagtatcgcccggtgaagctgaacgagattgtggggaacgaggacacagtgagccgcctggaggtctttgctagagaaggtaacgtccccaacatcatcattgcaggaccgcctgggaccggaaagacaacatcgattctgtgtctggcaagggcactactgggaccggctctgaaggatgctatgctggagctgaacgcgagtaatgatcgcggcatcgatgtggtcagaaacaaaatcaagatgtttgcacagcagaaggtcactctgcctaaaggtagacacaagatcatcatcttagacgaagcagactcaatgaccgacggggcacaacaagctctccgccgaaccatggaaatctacagtaaaacaactaggtttgcgctcgcatgtaatgcttccgacaaaataatcgagccaattcagtcaaggtgtgccgttttgcgctatacaaagttgactgacgcccaaattctgacaagactcatgaacgtgatagaaaaagaacgcgtgccatatacagatgatggcctcgaagccattatttttactgcacagggagatatgaggcaagctctgaataatttgcaatctaccttcagtggattcggatttataaactccgagaatgtgtttaaggtctgtgacgaacctcacccactgctggtcaaagagatgattcaacactgcgtaaacgccaatatcgatgaagcatacaaaattcttgctcatctatggcatctgggatactcacctgaggacatcataggaaatatatttcgggtctgtaaaacatttcagatggccgagtatttaaaactggaattcatcaaggaaatcggatatacgcacatgaagatcgccgagggagtaaactccctgttgcagatggcagggctgctggctcgtctgtgccagaagacaatggccccggtggcgtcctag

SEQ ID NO: 248477 - RNA, 996 nt, synthetic construct
  misc_feature 1..996: note = Description of Artificial Sequence: Synthetic coding sequence
  source 1..996: mol_type = other RNA
atggcccggggcggacgcggccgcagattgggccttgcattggggctgctgctggcgcttgtgctcgccccgagagtgctgagagcaaaacctacagtgaggaaggaaagagtggtgaggcctgattctgagcttggcgaacggccacctgaagacaatcaaagtttccagtatgatcacgaagcgtttctgggcaaagaagatagcaaaacgttcgaccagcttacccccgatgagtccaaagaacgactgggtaagatcgtggatagaattgataacgatggtgacggtttcgtcactactgaggagctcaagacatggataaagcgcgtacagaaaagatacatatttgacaacgtcgcgaaggtgtggaaggactacgaccgggacaaagacgataaaatttcctgggaagaatacaaacaagccacatatggctactatcttgggaaccctgcggagttccacgactctagcgaccaccatacatttaaaaaaatgctacctagagacgagaggcgcttcaaggccgctgacctgaacggtgatctgacagccacccgcgaggagtttaccgccttcctgcaccccgaagagttcgaacatatgaaggagatcgtcgttctcgaaacactcgaagacatcgacaagaacggagatggttttgtggatcaggatgaatatatcgcagatatgttctctcacgaagaaaacggacctgagccggattgggttctgagcgaaagggaacagtttaatgagttccgggatcttaataaagatggtaaactggacaaggacgaaattcgacactggattttgccacaggactatgatcacgcacaggcagaggcccgacacttagtgtatgagtccgataaaaataaggatgaaaaactgactaaagaggagattttggaaaattggaacatgtttgttggcagtcaagcgacaaattatggagaagatttaaccaagaatcatgatgaattgtag

SEQ ID NO: 248478 - RNA, 1422 nt, synthetic construct
  misc_feature 1..1422: note = Description of Artificial Sequence: Synthetic coding sequence
  source 1..1422: mol_type = other RNA
atgaagagggcctctgccggaggtagccgccttctagcatgggtgttgtggctacaagcctggcaggtagctgcgccatgcccgggcgcctgcgtgtgttataatgaaccaaaggtgacgactagctgccctcagcagggcctacaggcggtaccggttgggattcccgcagcgagtcaaaggatttttctccatggcaaccgaatcagtcatgtccccgccgcttccttcagagcctgtcggaacctcactatcctgtggctacattccaacgtactggccagaatcgatgcggcagcttttacaggactcgctctgttagaacaactggatctgtccgataacgctcagctgcggtccgtcgatcccgcaacctttcacggcttaggccgcttacatacacttcatctggatagatgcggacttcaggagctgggaccaggactgtttagaggactggcggccttacaatacctgtacctccaggacaacgcactgcaggctttgcccgatgatactttccgagatctaggcaatctgactcatctgttcttacacggaaaccgaatctccagcgtacccgaacgcgcgtttaggggactccactcactggaccggctattacttcaccagaacagggttgctcacgttcacccccatgcctttcgggacctggggcggctgatgacactatacctgttcgctaataacctaagtgcacttcccacagaagcactggccccacttcgcgccttacaatatctgagactaaatgacaacccttgggtctgcgattgccgggccaggccgctctgggcgtggctgcagaaattccggggatccagctctgaagtcccatgcagcctgcctcagagactggctggtcgagacctaaaacgactggcagccaatgatctccagggatgcgcagttgcaactgggccctatcaccccatctggaccgggagagccacggatgaagagccgcttggattgcctaagtgttgccagcctgatgctgccgacaaggctagtgttctggagcccggcagaccggcgtccgccggaaacgcactgaaaggaagggtgccacccggcgattctcccccaggcaatggcagcgggccgcgccacataaacgattctcctttcggcacgcttccaggttcagcagagccaccactaactgccgtccgtcctgaggggtcagaacctcctggattcccaacttccgggccccgccgccgtcctgggtgcagcaggaagaaccggaccagatcccactgcaggctcgggcaagcaggtagcgggggtgggggaacaggcgatagcgaaggtagtggagccctgccatcccttacttgctcgctaacccctttgggtctggccctcgtgctctggaccgttctgggaccctgttag

SEQ ID NO: 248479 - RNA, 2949 nt, synthetic construct
  misc_feature 1..2949: note = Description of Artificial Sequence: Synthetic coding sequence
  source 1..2949: mol_type = other RNA
atgttaccatcgtcgtcttggggaaagcgaaaactccgaggacggctcgggtgggtgagatcagatgcaagaggagtgatgtgggcaaggcaagagggtctgcatcatccacatccccacgcagtgattcggtgcccatcctcttcctcatctagcgtgtcctgcagcggagattccgaggaagaggacatgggccttctggaagtctcagtaagcgacataaaaccccctgcccctgagcttggccctatgcctgaaggattaagtcctcaacaggtggttcgcaggcacattttgggtagcatcgtgcagtccgaaggctcatacgtagagagcttaaaaagaatactgcaggactacagaaacccgctgatggagatggaacctaaagcactcagcgcccgcaaatgccaggtggtgtttttcagagtgaaggaaatattgcactgtcactccatgtttcagatcgcactatccagccgggtcgccgaatgggacagcactgaaaaaatcggggatttgtttgtcgcctcggatatgcttaagaataccccacgcgggcacccagaccgcctgagcttacaactggcccttaccgaactcgagaccctggccgagaagctcaacgaacaaaaacgcctagccgatcaggtcgccgaaatccaacagctgactaaatctgttagcgatcgctcttcacttaataaactattaacttctgggcagcggcaactgctcctttgcgagacattgaccgagaccgtgtacggtgaccgcggccagctgattaaatcaaaggaaagaagggtttttctcctgaatgatatgttggtgtgtgctaacatcaactttaaaggacagctcgaaatctcttccctggtgccattggggccaaagtacgtcgttaagtggaacacagccctgccccaagtgcaggtggtcgaagtgggacaggatggcggcacatacgataaggacaacgtcctgatccagcattccggcgcaaaaaaagcttctgcctctggccaagctcagaataaggtgtatctcggaccaccccgtctgtttcaggagttgcaggatctccagaaggatcttgccgtcgtcgaacagattaccctgctgattagtacattgcatggcacttaccagaatctaaacatgactgtggctcaagactggtgccttgccttgcagagactgatgagggtcaaggaggaagaaattcactccgccaacaagtgtaggttaaggctcctcctaccgggcaagcctgataagagcggccggcccatctcattcatggtagtgtttatcacacccaaccctctctccaagatctcttgggtaaacagattgcatctcgctaagattggcttgcgagaagagaaccagccggggtggttgtgtcccgatgaggataagaagtccaaagcccccttctggtgccctatcttggcctgttgcataccagccttctcttctcgcgcattgagcttgcagctcggggcgctcgtacactccccagtgaactgccctctgctcggctttagtgcagtcagtactagcttaccgcagggctacctgtgggtgggagggggccaagagggggcaggcggacaggtggaaatctttagtctgaatagaccttcaccccgcaccgtcaaaagttttccgctagctgcccctgtcctctgcatggagtatatcccggaactggaggaagaggccgagagcagagacgagtcacctacagttgcagacccttccgccactgtgcatccaactatctgcctgggtttgcaggatggatctatcctactgtattccagtgtcgacacaggaacacaatgccttgtcagctgcaggtccccaggcttacaaccagtgctgtgcctgcgccattctccgtttcatttgttagccggcctgcaggatggtaccctagcagcctaccctcgaacaagtggcggagtgctatgggacctagaaagtcctcccgtttgtttgaccgtgggccctggacctgttaggactcttttgtcattggaggatgcggtgtgggctagctgcggcccatgggtgacagtgttagaggcaactaccctgcaaccccagcagtcctttgaagcccaccaagatgaggcagtcagcgtgacccatatggtgaaagcaggcagtggtgtctggatggccttttccagcgggaccagtatccgcctgttccacaccgagacacttgaacatctgcaggaaatcaacatagccactcgcacgacatttctgctgcccggccagaagcacctgtgtgtgacatcacttctcatctgccaaggattgctatgggtcggaaccgaccagggtgtgatagttctactgcccgtgcctcgtcttgagggcatcccaaagatcacggggaaaggtatggtgagcttgaatgggcattgtggtcccgtggccttcttagccgtggctaccagcatcctcgcgcctgacattttacgctccgaccaagaggaggccgaaggaccccgagctgaggaagataagccagacggacaggcgcacgagccgatgcctgattcacacgtaggaagagaactgacaagaaaaaaagggatcctgctccagtaccgacttaggtcgactgcgcatctgccaggaccgctcttgtctatgcgcgagcccgcccctgctgatggtgctgccctggaacactcggaggaagacggttctatctatgaaatggctgatgatcctgatatatgggtacgaagccgtccatgcgcacgcgatgcacatcgcaaagaaatttgctccgtagcaatcatttctgggggtcagggttatcgcaatttcggctccgcactgggaagttcagggcgccaggcgccatgtggtgagactgattcaaccctgttgatttggcaggtacccctgatgctctag

SEQ ID NO: 248480 - RNA, 4794 nt, synthetic construct
  misc_feature 1..4794: note = Description of Artificial Sequence: Synthetic coding sequence
  source 1..4794: mol_type = other RNA
atggaggcagaggaggctcagaggggtgcttcaccaccaattagcgccatcgaagagttttcgatcatccccgaggctcctatgagatcctcccaggtgtcagcacttggcttagaagcccaggaagatgaagacccatcttacaagtggagagaggagcacagactgtccgccacacaacagagcgaactcagagatgtgtgtgattatgcaattgagaccatgccgagcttccccaaggaagggagtgcagatgtcgagcccaatcaggagtcattggtggcagaggcatgcgacaccccagagcattgggaagccgtgccccagagcctcgccggacgtcaggctaggactctcgcccccccagagctgtgggcttgtccgatccagtcagagcatctcgatatggcccctttcagctccgatctcggctcagaagaggaagaagtcgagttctggccaggactaacatctttgaccttaggaagtggacaggcggaggaggaggaagagacaagctctgacaacagtggccagaccaggtattacagtccctgtgaggaacaccctgctgaaaccaaccagaacgagggctccgagtccggaactatacgccagggggaggaactcccccctgaagagttacaggagtcacagggccttctgcatccacaagaagtgcaggtcctggaagaacaggggcagcaggaggccggttttagaggggaaggcactttgcgcgaggatgtgtgtgcggatggtctgctgggagaagagcagatgattgagcaagtgaatgatgaaaagggagaacagaaacagaaacaggagcaggtccaggacgttatgcttggccgacagggggagcgcatggggctgaccggagaaccggagggactcaacgatggtgaatgggagcaggaggatatggagagaaaggcccagggccagggcggacccgaacaaggagaagaaaggaagagagagctccaggtgcctgaggagaatcgggcggattcacaagatgagaagtcccagaccttcctgggcaagagcgaggaggtgaccggcaaacaggaagaccatgggatcaaggaaaagggggttcccgtgtccggacaggaggccaaagaaccagagtcctgggacggcggccgactaggagccgtaggacgcgctagatccagagaagaggagaatgagcaccacggccccagcatgcccgctcttattgcacctgaggattcaccacactgcgacctgttccctggcgctagttatttaatgacacagatacctgggacacagactgaatcccgggcagaagagctttctcccgccgccctgagtccatccctggaacccattcgctgttcccaccagccaatctctctgctcggttcctttctgaccgaggaatctccagataaagagatcgaccaaaattcccaacaggaggagtcacggcttcgtaaagggaccgtgagctcccaggggaccgaggttgtattcgccagtgcgagtgttacaccacctagaacacctgatagtgcccccccctcaccggcggaggcctatccaatcacgccggcttcggtgtccgctaggccacccgtcgcttttcctcggagggagacctcctgcgcagcacgcgctccagagaccgctagcgccccattaagcatggacgatccttctccgtgtgggacgtcggaaatgtgtcctgcagctctatacggattccccagcactggaacaagccctcctaggcctcccgccaactccacaggaacagtgcagcaccttcgctcggatagctttcccggatcccatcgcacagagcagacaccagacctggttggaatgttgctctcatactcacactcagagctgccacaacgcccaccaaagcctgccatatatagcagtgtgacccctaggagagatcgtaggagcggtagggactactccactgtgtccgctagtcccaccgccttgtccactttaaagcaagattcccaggaaagtataagtaacctggaacggcctagcagtccacctagtatacaaccctgggtgagtcctcacaatcccgcttttgccacagagagcccagcttatgggtcatctcccagtttcgtgtcgatggaagatgtacggatccatgaacctttacccccacctcccccccagaggcgcgatacccaccctagcgttgttgagactgacggccacgctagagtcgtggtgcccacacttaagcagcacagtcacccaccaccattagctctgggtagtggcctccacgccccacataaagggccccttccacaagccagcgatcccgccgtcgcccgccagcaccgacccctaccctccacccctgattccagtcaccatgcacaagcgactccacggtggagatacaataaacccctcccacctacaccagacctgccacaaccgcatctgcctccaatctctgcccccgggagttcacggatctataggccacttccccccctgccaataattgatcccccaaccgagccgcctcctcttccaccgaaaagcaggggaagatccagatccaccagaggagggcacatgaactccggtggccatgccaaaacacggccggcgtgccaggactggaccgtgccactgcctgccagcgctgggcgcacgtcctggccacccgcgactgcccggtctaccgaatcattcaccagcacatcaaggtctaagtccgaagtaagcccaggaatggcgttctctaacatgactaattttctctgcccatccagtcctactacaccctggacacctgaattgcagggccctacttccaaggacgaagctggggtgtccgaacaccccgaggcacccgcccgcgaaccgttgcgcagaacaacaccccagcaaggagcatccgggcccgggcgcagcccagtgggccaggctcgccagcctgaaaagccttcgcacttgcacctggagaaggcctcctcttggccccatcgccgagactcaggccgccctccaggagacagcagcggccaggcggtggctccctcagaaggcgccaataaacataagggctggtcgaggcaaggacttaggcggcccagcatactacctgaaggcagctccgactctagaggtccggccgtcgagaaacacccagggccaagcgatactgtggtattccgggagaaaaaaccaaaagaggtaatgggtgggttcagcagacgctgttccaagcttatcaactcaagccagctcctctatcaggagtattcggatgtcgtgctcaacaaagagattcaatctcagcagcggcttgagtccctatctgaaacgccaggcccatctagcccccgacagccacgcaaagcactcgtttcatccgaatcctatctccagagattatccatggcctctagcggctcactgtggcaggagatccctgtggtgagaaattcgactgtcttactgtctatgacacatgaggaccagaagctgcaggaagttaaatttgagctcattgtgagtgaggcctcctatctgcgcagcctgaacatagccgtggatcactttcaactcagcacgagtctaagagcaactctgtcaaatcaagagcaccagtggctgttctccaggctccaggatgtgcgggacgtgtccgctactttcctcagtgatcttgaagaaaacttcgagaacaatatatttagtttccaggtttgcgacgtcgtgctcaaccatgcccctgatttccgacgtgtctacctcccttacgtcaccaatcagacataccaggaaaggaccttccaaagtcttatgaatagcaactccaactttcgggaggttctcgaaaaactcgaatcagaccctgtgtgccagaggttgtcacttaagtcttttctcatattacctttccagagaataacccgtttgaaacttctactgcagaatatccttaagcggactcaacctgggagttcagaagaggccgaggctacaaaagcccatcacgcactggagcagcttattagagattgcaataataacgttcaaagtatgagaagaacagaagaattgatttacctgagtcagaagattgagttcgagtgcaagattttccccctcataagccagtctcggtggttggttaagtcaggcgaacttactgccctggagttttcagcttctcctggtctgcggagaaaattgaacacccgtccagtgcacctgcatctctttaacgattgcttgctgctgagtaggccgagggaagggagtagatttctcgtcttcgaccatgctcctttctcttcgattcgcggcgaaaaatgcgaaatgaaacttcacggaccacacaagaatctcttccgactgtttctgagacagaatactcaaggtgcgcaggcggagttcctttttaggactgagactcagagtgaaaagctccggtggatttctgctttagctatgccaagggaagagctagatctactggagtgttataatagcccacaggtgcagtgcttacgggcttacaaaccacgagagaatgatgagttggcgctagagaaagctgacgtggtgatggttacacagcagtcttccgacggttggctcgagggcgtcaggttgagcgatggagagcgcggatggtttcccgtgcagcaggtggagtttatcagcaaccccgaggtgcgtgctcagaacctcaaggaggcacatcgtgtcaaaaccgcaaagctccagctcgtcgagcagcaggcctag

SEQ ID NO: 248481 - RNA, 573 nt, synthetic construct
  misc_feature 1..573: note = Description of Artificial Sequence: Synthetic coding sequence
  source 1..573: mol_type = other RNA
tgaccacagggtgtcgatattcggcacaacaaggatcggaaagtaagaagaaaggaaccaaaatcccaggacatttatttgcgtctcctggtcaagctgtacagattcctggcccgcagaacaaatagtacttttaatcaagtagtgcttaagagattattcatgtccagaacaaaccgtcccccactgtcgctgtccagaatgatacgtaagatgaagttgccaggaagggagaataagactgcggtcgttgtcggtacgatcacagatgatgtccgtgtccaggaagtcccaaagctcaaggtttgtgcattgagagtcaccagccgggcccgcagcagaatcctacgggctgggggcaaaatcctaaccttcgaccagctcgcactcgactcccctaaaggctgtggaacagtcttgctgtccggcccccgcaaaggaagggaggtctacagacacttcggaaaggctcctgggaccccacattcccacactaaaccatacgtgcggtctaaaggacggaagtttgagagggcgagaggacgccgagcttcccgcggatacaagaactag

SEQ ID NO: 248482 - RNA, 360 nt, synthetic construct
  misc_feature 1..360: note = Description of Artificial Sequence: Synthetic coding sequence
  source 1..360: mol_type = other RNA
atggccttcaaagacactggtaaaactcctgtggaaccagaagtcgccattcatagaattcggataacacttacatcaaggaacgtgaaatctctagaaaaggtatgtgctgacttaatacgcggggctaaagaaaaaaacttgaaggtcaaaggcccagttcgtatgcctactaaaacacttcgaattactacccgtaaaaccccctgcggggagggaagtaagacatgggatcgttttcagatgaggattcacaagagactaattgatcttcactcgcccagcgagattgtgaagcaaatcacatctatatccatcgagccaggggtcgaggtggaagttacaattgccgacgcatag

SEQ ID NO: 248483 - RNA, 1998 nt, synthetic construct
  misc_feature 1..1998: note = Description of Artificial Sequence: Synthetic coding sequence
  source 1..1998: mol_type = other RNA
atgacctcagcgaacaaggctatcgagctgcaacttcaggtcaaacagaatgccgaggaacttcaagattttatgcgcgacctggagaactgggagaaggacattaaacagaaagatatggagctgcgcaggcagaacggtgttcccgaagagaacttgccccctatcagaaacggtaattttagaaagaaaaaaaagggcaaggccaaagaatccagcaaaaagactagagaagaaaacaccaaaaatcgaattaaatcatacgattatgaggcatgggcaaagctggatgttgaccgcatactcgacgagttagataaggacgacagcactcatgaaagtctatctcaagagtccgagtctgaagaagatggcatccacgtggattcccaaaaagcgttagttctgaaggagaaaggcaataaatacttcaagcagggtaaatacgacgaggccattgattgctataccaaaggcatggatgctgacccctataatcctgtcctgccaactaatagagcctcagcttatttccgtcttaagaagttcgccgtcgctgagtccgattgcaacctcgccgtcgcactgaatcgtagctatacaaaggcatactcccgacgaggcgctgcccggtttgccctgcagaagctcgaggaggcaaaaaaagattatgaaagggtgctggagttggagccaaacaacttcgaagccacaaacgaacttcgcaaaatttcccaggccctcgccagcaaagaaaactcgtacccaaaagaagcggatatcgtcataaaatctaccgaaggagaacgtaagcaaatagaggcgcagcagaataagcagcaggctatctcagaaaaagaccgcggcaatggcttttttaaggagggaaagtacgaacgagctatcgagtgctatactaggggaatcgcagctgacggagccaatgccctgctgccggcaaatagagccatggcctacttaaagatacagaaatacgaagaagctgagaaagactgcacgcaagctatcctgctcgatgggagctacagtaaggccttcgctcgacgaggcacagcacgaaccttcttgggcaagttgaacgaagctaaacaagacttcgagaccgtcctgttgttagaacctggaaacaagcaggccgtgactgagctgtctaaaattaagaaagagcttatcgaaaagggccattgggacgatgtgttcttagactccacccagcgccaaaacgtggtcaagccaatcgacaatccccctcatcctggcagcaccaagcccctgaagaaggtgattatagaggaaacaggaaatctcatacagacgattgatgtcccggacagtacaactgctgccgctccagaaaacaatcccattaacttggcaaatgtgatcgccgctacgggaacaacgtccaaaaagaactccagtcaggatgatttatttccaacgtcagacacgcccagagccaaagtgcttaagattgaggaggtctcggacactagttcactgcagccccaggcgagcctcaagcaggacgtctgtcagtcatattccgagaaaatgcccatcgagatcgagcagaaaccagcccagttcgctactacagtcctgccccctattccagccaattcttttcaactcgagtctgattttaggcagctaaagtcaagccccgacatgttgtatcagtacctgaagcagatcgagccgtccctgtatcctaaactgtttcagaaaaatctagatccggacgtgtttaaccagattgtcaagattctgcacgacttttacatagagaaagaaaaaccactgttaattttcgagatcctgcagcgtctatccgagctcaagcgcttcgacatggcagtcatgtttatgtctgagactgagaagaagattgcacgcgcccttttcaaccacattgataagagcggacttaaagacagctctgtggaggaactcaagaagaggtatggtggttag

SEQ ID NO: 248484 - RNA, 636 nt, synthetic construct
  misc_feature 1..636: note = Description of Artificial Sequence: Synthetic coding sequence
  source 1..636: mol_type = other RNA
atgatttcacgaatggaaaagatgaccatgatgatgaaaatcctgattatgtttgcactcgggatgaactactggagctgtagcggattccccgtgtatgactacgacccctctagcttgagggatgcactctctgctagcgtggtgaaagtgaattcccagtcgctctccccttacctcttccgggcatttcgcagctcactgaaaagggtggaggtcctagacgaaaataacctagtcatgaatcttgaatttagcattcgcgaaaccacatgtcgcaaagactctggcgaagatcccgccacctgcgccttccagcgcgattactacgtgagcaccgctgtgtgtaggagtactgtgaaagtttcagctcaacaggtgcagggggtgcacgccaggtgtagctggtctagttcaacatccgaatcctattcatctgaggagatgattttcggggacatgctcggatcccataaatggcgcaataactatctgttcggcttaatttctgacgagtcaatctctgagcagttttacgatcgtagcttaggaataatgagacgagtcctgccgcctggcaaccgcaggtaccctaatcaccggcacagggcccgcatcaatacagatttcgaatag

SEQ ID NO: 248485 - RNA, 1323 nt, synthetic construct
  misc_feature 1..1323: note = Description of Artificial Sequence: Synthetic coding sequence
  source 1..1323: mol_type = other RNA
atgcgcccccacttatcccctcctttgcaacagcttctgctgcccgtgcttctggcctgtgcggcccattccactggtgcattaccaagactgtgcgacgtgttgcaggttctatgggaagaacaagatcagtgcctacaggagctctcccgcgagcagaccggggacctcggcactgaacagcctgtcccaggttgtgagggtatgtgggataatattagttgttggccttccagtgtgcccggccggatggtcgaagtggaatgcccaagatttttgcgtatgctgaccagccgcaacggctccctgtttagaaattgtacacaggacggatggagcgaaaccttccctcggcccaacctagcgtgcggagtcaatgtgaatgactcctccaacgagaagagacactcatacctgctgaagttaaaggtaatgtacacagtcggatattccagcagcctggtgatgctcctggttgccctgggcatcctctgtgctttccgacggctccattgcacccgcaattatattcatatgcatttgtttgtaagttttattctgcgagccctcagcaactttatcaaggacgccgtgttatttagttccgatgacgtgacctactgtgacgcccatagagctggatgtaaacttgtgatggttctattccagtactgcatcatggctaattatagctggttattagtggaaggcctttacttgcatacacttttagctatttccttctttagcgagcgaaagtacctccagggattcgttgcctttggttgggggtctccagccatctttgtggctctctgggccatcgcaagacactttctcgaagatgtcggttgttgggacataaatgccaatgcaagcatctggtggattatacgtggccctgtaattctctccatactgattaactttattctgtttataaacatcctgagaattctgatgcgcaaactaagaacccaggaaacccgaggcaatgaagtcagtcattacaaacggctcgcacggtctacattactccttattccacttttcggtattcactacattgtgtttgcgttttccccagaagacgccatggagattcagctttttttcgaactcgccctgggttctttccagggcctcgtggtggcagtgctatactgttttttaaatggtgaggtgcagctggaagtacaaaagaaatggcagcagtggcacctccgggagtttcccctgcaccccgtggcttccttctccaacagcaccaaggccagccatttggagcagtctcaaggtacctgccgaaccagcattatctag

SEQ ID NO: 248486 - RNA, 363 nt, synthetic construct
  misc_feature 1..363: note = Description of Artificial Sequence: Synthetic coding sequence
  source 1..363: mol_type = other RNA
atgaaacttttaatggtcctgatgctcgccgccctcagtcagcactgctatgccggctccggatgtcccctcctcgaaaacgtaattagtaaaaccatcaatccccaggtttccaaaaccgagtataaggaactgttgcaagaattcattgatgataatgcaacaacaaacgcgatcgacgagctcaaggaatgctttctcaatcagaccgacgaaaccctatcaaacgtcgaggtgtttatggtcatctcattttcatcatacaagctttttaagtctcccgatcaaggtcaggtgggtagcagctttttgacagataatgcgaaggcaacttcggaacaggcatttagctatatcggctag

SEQ ID NO: 248487 - RNA, 1092 nt, synthetic construct
  misc_feature 1..1092: note = Description of Artificial Sequence: Synthetic coding sequence
  source 1..1092: mol_type = other RNA
atggccatgcgccagacacctctcacatgctctggacatacacgcccagtcgtggaccttgcgttctccgggataacgccgtacggatattttctgatttcggcttgtaagggcgctggacagcatctcccacgcctttccgggcagcacgacgggaaaccaatgctcaggcagggcgacaccggcgactggattggcacctttctaggacataagggagcagtatggggcgccacacttaataaagatgccaccaaagcggctactgctgccgccgattttaccgcaaaagtatgggatgccgtgtctggtgacgaactcatgacgctcgctcataagcacattgtgaaaacagttgatttcacgcaggactccaactaccttctaacaggaggacaggacaagctgctaagaatctacgatttgaataaaccggaggccgagcctaaagaaatatcaggccatactagtggtataaaaaaagccctctggtgctctgaggacaaacaaattctctccgccgatgacaaaacagtccgtctttgggaccacgccacgatgacagaagtcaaatcgctcaactttaacatgtcggtctcttccatggagtacattccagagggcgagattctcgtaataacctacggccgctccattgcattccactccgccgtgtcgcttgacccaattaagtcatttgaggcccccgccactatcaattccgcttccctccacccagagaaggagttcctcgtggctggaggagaggactttaagctgtacaaatatgattataacagcggagaagaattggagtcttacaagggtcattttgggccaattcattgcgtaagattctcacctgatggagagctgtatgctagcggaagcgaggacggtaccctgagactgtggcaaacggtggttgggaagacctacggcttgtggaagtgcgtcctgcccgaagaagattcaggcgaactggcaaaaccaaagatcggcttcccagagaccacagaggaggaattggaggagattgctagtgaaaactctgattgtatctttccaagtgcaccagatgttaaggcttag

SEQ ID NO: 248488 - RNA, 1335 nt, synthetic construct
  misc_feature 1..1335: note = Description of Artificial Sequence: Synthetic coding sequence
  source 1..1335: mol_type = other RNA
atgaaggtcgtgccctccctgcttctctctgttcttctggcacaagtgtggctagtcccaggcctggcgccttctcctcagagtcctgaaacaccggctccacagaaccaaacaagccgcgttgtgcaggctcctaaagaggaagaggaggatgaacaggaggccagtgaggaaaaggcctccgaagaggagaaagcatggctcatggcctcgaggcaacagctagcaaaggaaacttctaacttcggtttcagtcttctccgcaaaatttctatgcgtcacgacggtaatatggtgttctctccattcggtatgtccctagccatgacggggctgatgctcggcgccaccggccccacagaaacccagatcaaaaggggcctacatctccaggccctcaaaccaacaaagcccggcctcctgccatctctctttaaaggcctgagggagacactaagtcgaaaccttgagcttggactcactcagggctcgtttgcatttattcacaaagactttgatgtcaaagaaacgttttttaacctgtcaaagagatatttcgatactgaatgcgttcccatgaacttcaggaacgccagtcaagctaagcgcctaatgaaccactatatcaataaggaaacccgtggcaagatccctaaactatttgatgagatcaaccctgaaaccaaacttatacttgtggactatatcctgttcaaagggaaatggctcacccccttcgaccccgtgttcactgaggtcgataccttccacttagacaaatataaaaccataaaagtgccgatgatgtacggtgccggcaagtttgcttcaacgttcgataaaaactttagatgtcatgtgctgaaattaccataccaaggtaacgcaacaatgctcgtggtgctgatggaaaagatgggcgatcatctggccctcgaggactatcttaccaccgacttagttgagacctggctgcgcaatatgaagacccgcaatatggaagtcttttttcccaaattcaagctagaccagaagtatgagatgcacgaattactcaggcagatgggcattcgtcggattttctctccctttgcagacctgtcggagctgagcgcaacaggaagaaacttgcaggtcagtagggtgcttcaacgcacagtaatcgaagtagatgaaaggggtacagaagccgtggctggcatcctcagtgaaatcactgcttactccatgccacccgtaatcaaggtagaccgcccatttcactttatgatatatgaggagacctcaggcatgctactctttctcgggcgggtcgtaaatccaactctgctatag

SEQ ID NO: 248489 - RNA, 1335 nt, synthetic construct
  misc_feature 1..1335: note = Description of Artificial Sequence: Synthetic coding sequence
  source 1..1335: mol_type = other RNA
atgaaggtggttccctcactgcttctgagcgtactattagcccaagtgtggctggttcccggacttgctccttcaccccagagtcccgagacacccgctccacagaaccaaacctcgcgcgttgtgcaagcacccaaagaagaagaggaagatgaacaggaagcttcagaggagaaggcatcagaagaagagaaagcctggctaatggcctcgcggcagcagcttgccaaagaaacatccaatttcggcttcagcctgcttagaaagataagcatgcgccatgatgggaatatggtgttcagtccatttgggatgtctcttgctatgactggtctcatgttaggtgctactgggccaaccgaaacacagataaaacggggcctgcacctgcaagccctcaaacctacaaagccggggctactgccttctctgttcaagggtcttcgcgaaacgttaagcagaaacttagagctcggcctcacgcagggatccttcgctttcattcacaaagattttgacgtgaaggaaactttttttaacctgtcgaagcgctatttcgataccgagtgcgtgcctatgaatttcaggaacgccagccaggctaaaaggctcatgaatcactacattaataaagagacgagaggcaagatcccaaaactgtttgatgaaattaatccagaaacaaaactgattctcgtagactacatcctctttaaggggaagtggctcaccccattcgaccccgtattcactgaggttgacacattccatctagacaagtataaaacaatcaaggttcctatgatgtatggcgcagggaagttcgcctcaacatttgacaaaaactttagatgccacgtgctgaaactgccataccaggggaacgctactatgctcgttgtgcttatggaaaaaatgggcgatcaccttgctcttgaagattatctaactacagaccttgtcgagacctggttacgaaatatgaagactagaaacatggaggttttctttcctaagttcaaactagaccagaaatacgaaatgcacgaactgttacggcagatgggaatccgccggatattcagcccgtttgctgacctctccgagctgtccgccaccgggcgcaatctgcaagtgagtcgggtgctgcaacgaacagtgattgaagtggatgagagaggaaccgaggcagtcgctggcatcctttctgaaatcactgcctattctatgcctcctgtcattaaagttgataggcctttccatttcatgatctacgaggagacctcaggaatgctcctcttcctgggccgcgtggtgaacccaactcttttgtag

SEQ ID NO: 248490 - RNA, 1335 nt, synthetic construct
  misc_feature 1..1335: note = Description of Artificial Sequence: Synthetic coding sequence
  source 1..1335: mol_type = other RNA
atgaaagtcgtccctagccttttattatctgtgctactggcacaagtttggctggtccctggcttagcgccttccccacagtccccagagactccagcaccccaaaaccagactagcagggtggtccaggcccccaaggaagaggaggaagatgagcaagaagctagtgaagagaaggcttccgaggaagagaaagcatggctcatggcatctagacaacagctcgccaaagagacctctaattttggttttagcctcctacgcaaaattagcatgcgacatgatggaaatatggttttctctccatttggcatgtccttagctatgacaggtctaatgctgggtgcaacaggtcctacggagacgcaaatcaaaagaggactgcacctccaggctctgaagcccactaaacccgggctgctcccgtccctcttcaaaggcctgcgtgagaccctcagcaggaatctggaactaggcttgacgcagggatccttcgctttcatccacaaagactttgatgttaaggagacattcttcaatcttagcaaacgttatttcgacacagaatgtgttcccatgaacttcaggaacgccagtcaggcaaaacgattgatgaaccactacattaataaggaaacacgaggcaagatcccaaagttattcgatgagattaaccccgaaaccaagctcatcctggtagactacatcttattcaaggggaagtggctgacaccatttgaccccgtgttcacagaagttgatactttccatctcgataaatacaaaactattaaggttcctatgatgtacggtgcaggaaaatttgctagcacttttgataagaatttccggtgccacgtgctaaaattaccttaccagggcaatgctacaatgctcgtcgtactcatggaaaagatgggcgaccaccttgccctcgaggattatttgacgacggacttagtggagacatggctgcggaacatgaaaaccaggaatatggaagtgttttttcccaaatttaaactggatcagaaatacgagatgcacgagctcctccgacagatgggaattcggcgaatatttagtccattcgcggaccttagcgaactctcagccaccggaagaaacctgcaagtgagcagagtcctgcaacgcactgtgatcgaggtagacgaaagaggaaccgaggcagtggccggcattctttcagagattacagcttactcaatgccacctgtgattaaggtcgataggcctttccactttatgatctacgaggagacgtctggcatgctccttttcctggggcgtgtggttaatccaacactgctgtag

SEQ ID NO: 248491 - RNA, 1455 nt, synthetic construct
  misc_feature 1..1455: note = Description of Artificial Sequence: Synthetic coding sequence
  source 1..1455: mol_type = other RNA
atgagtagaagcacacaagagttgctggggtatcactgtagattgcaggataaacttcaggaacaagagggatccctggccgcggagggaaggcattcactagcttctgcggctgaccacatgaaggtcgtgccatcccttttattatccgtactgctagcccaggtgtggttggttcctggcctggccccaagccctcagtccccagagacacctgctccccagaatcagacgtcgagggtagtgcaggcacccaaggaggaggaagaagatgagcaggaggcctctgaagaaaaggcctccgaggaagagaaggcttggctaatggcatcacgccagcagctggcaaaggagacatctaatttcggcttttccctgctgcggaagatctctatgcgacacgacggcaatatggtgtttagtccgtttggaatgtccttagcaatgaccggacttatgttgggggctaccggtccaactgaaacccaaatcaaacgtggattacatcttcaggcattgaaaccaacgaagcctggtcttctcccgtccttgtttaaaggtctcagggaaaccctttccaggaatctagaattgggtctgacccagggcagcttcgcctttattcataaagatttcgacgttaaagaaacattctttaatttatcaaaaaggtactttgacaccgagtgtgttcccatgaacttccggaatgcctcgcaggccaaacgtctgatgaatcactacatcaataaagagaccagagggaaaatccctaagttgtttgatgaaattaatcctgaaactaaacttatcctagtggactatattttgtttaagggcaaatggctgacgccctttgacccagtgtttactgaagttgatacctttcacctggacaaatacaaaaccattaaagtaccaatgatgtacggcgcgggtaaattcgcctccacattcgataaaaattttcggtgccatgttctgaaactgccttaccagggaaacgctactatgcttgttgttcttatggaaaaaatgggtgaccacctggctttagaggattacctgactactgatctggtggaaacttggttgcgaaacatgaaaacaaggaatatggaggtcttcttccctaaattcaaactcgaccagaagtacgaaatgcacgagctgctgcgccagatgggaatacgacggatcttttcccctttcgccgacctgtctgaattgagcgctactggcagaaacctgcaggtctctcgtgtcttgcaacgtacagtaatcgaggtagacgagcgaggaactgaggccgtcgcaggaatcctgagcgaaataaccgcatacagtatgccgcctgtgattaaggtcgatcggccatttcattttatgatctacgaggaaacgtccggtatgctactgtttctgggcagggtggtcaaccctacactattatag

SEQ ID NO: 248492 - RNA, 1197 nt, synthetic construct
  misc_feature 1..1197: note = Description of Artificial Sequence: Synthetic coding sequence
  source 1..1197: mol_type = other RNA
atgaattggcacctaccgctcttcctgctggcctccgtgactctacccagcatatgctcacactttaatcctctcagcttggaagaactgggatccaacacagggatacaagtttttaaccaaattgtaaagtcccgccctcacgataacattgttatcagtccccatggaatcgcctcagttttaggtatgttacaactcggagccgacgggagaaccaagaagcagctggctatggtcatgaggtatggtgttaacggagtgggaaagattctgaagaagattaacaaagcgattgtttccaagaaaaacaaggacatcgtgaccgttgccaatgctgttttcgtaaagaacgcaagcgaaattgaggttccatttgtcaccagaaataaagacgtctttcaatgcgaggtacggaacgtgaattttgaagatcccgcctcagcctgtgacagcatcaacgcttgggtgaagaatgaaaccagggatatgattgacaaccttctgagtccagatttgattgacggggtgctcactcgcctggtccttgtgaatgctgtgtactttaagggactctggaagagtagatttcagcccgaaaacacaaagaaacgcacattcgtcgccgctgacggtaaatcgtatcaggtgcctatgctggcccagctgagcgtttttcgctgcggcagcactagcgccccaaacgacctttggtataacttcatagagctgccttaccatggggagagtatcagcatgttaattgcattgcctacagaaagctcgaccccactgtccgccattattccccatatttccacaaaaaccattgattcatggatgtccatcatggttccgaagagagtccaggtcattcttccaaagttcaccgcagtggctcagaccgatctcaaagaacccctgaaggtgcttggaattaccgacatgtttgacagtagcaaagcgaatttcgcaaaaatcaccactggatcagagaatctccacgtgtcccatattctccaaaaggctaagattgaagtgagcgaagatggcaccaaggcttccgctgccaccaccgccatcctgatcgcaagatcgtcccccccttggtttatcgtggaccgtccttttctgttttttattagacataaccctacaggagccgtcttgtttatggggcagatcaacaaaccctag

SEQ ID NO: 248493 - RNA, 1194 nt, synthetic construct
  misc_feature 1..1194: note = Description of Artificial Sequence: Synthetic coding sequence
  source 1..1194: mol_type = other RNA
atgaattggcacctacccttattcttactcgcctctgtgacactgccatcaatttgctctcacttcaaccctctgtctctcgaagagcttgggtccaatacaggcatccaagtgttcaatcagattgtgaaatcaagacctcatgacaacatcgtgatcagcccgcatggaattgctagcgtgcttgggatgttgcagctaggcgcggacggaaggactaagaaacaacttgcaatggtgatgagatacggagtgaatggcgtcggcaagattctgaaaaaaatcaataaggctatcgtttccaaaaagaacaaagatatcgtgacagttgcgaatgctgtcttcgtgaagaacgcttcagagattgaagtgccatttgtgactcggaataaagacgtatttcagtgcgaagtgagaaatgttaacttcgaggatccagcctccgcttgtgattctattaatgcttgggtaaagaacgaaaccagggatatgatcgacaatcttctcagtcccgacctaattgacggagtcctgacgcggctggtgctggtcaacgcggtgtattttaagggcttgtggaagagcagatttcaacccgagaacactaaaaagaggacattcgtggctgccgacggaaaaagttatcaagtgccaatgctagcccagctgtcggtattcagatgtgggagcacctcagcccctaacgatctgtggtacaatttcattgaacttccttaccacggagaaagcatctccatgcttattgcacttcctaccgagtcctcgactccgctgtccgctatcattccccatattagtacgaaaactatcgatagttggatgtcaatcatggtacctaagagggtacaagtgattctgcctaagtttactgccgttgcacagaccgatctcaaggaacccctcaaagtgctgggaattaccgatatgttcgactcttctaaggccaatttcgccaagattacgaggtctgaaaacctccatgtgagccatatcttgcagaaggcaaagattgaagtgagcgaggacggaacaaaagcctcagcagcgacaactgcgattctcatcgcccggtcttcccctccctggttcattgtcgatcgcccattcctatttttcatcaggcataacccaacaggggccgtacttttcatgggacagatcaataaaccatag

SEQ ID NO: 248494 - RNA, 1194 nt, synthetic construct
  misc_feature 1..1194: note = Description of Artificial Sequence: Synthetic coding sequence
  source 1..1194: mol_type = other RNA
atgaattggcacctccccctctttttgctggcaagtgtaactctgccgtcgatttgctctcactttaatcccctgtcccttgaggaactcgggagcaatactggcatccaagtcttcaaccagatcgtgaagtcaagaccacacgataacattgttatcagcccccacggaatcgctagtgtgttaggcatgctacagttgggagctgacggtaggacaaagaaacagttagccatggtgatgagatatggagtcaacggtgtgggaaagatcctgaagaaaatcaacaaggcgattgtgagcaaaaagaataaggatatcgtcaccgtagccaacgcggtttttgtgaaaaacgcctccgagatcgaggtccccttcgtgacgaggaacaaagatgtgttccaatgtgaagtaaggaacgtgaacttcgaagatccggcctccgcttgtgacagcattaatgcgtgggtgaaaaacgagacccgggacatgatagataacctgctcagccccgatttgatcgatggagtgctcacacgattagttcttgtgaatgctgtgtacttcaagggactgtggaaaagccgattccagcctgagaacaccaagaaaaggacttttgtggccgccgacggtaaatcgtaccaggtacctatgttagcccagctgagcgtgtttaggtgtggatcgacctctgcccccaatgatttatggtacaacttcattgaactgccttaccatggcgagtccatctctatgctcatagcacttcctacagagtcctccactcccctctccgccattattcctcacatctctacaaagaccatcgattcctggatgagtatcatggtcccaaaacgtgtacaggtgatcctgcccaagttcacagccgtggctcagactgatttgaaagaacctctaaaggtgcttgggattacagacatgtttgattcctcaaaagcgaattttgccaaaattactcgatcagaaaatctgcacgtctcccacattcttcagaaggccaagattgaagtctccgaggatggaaccaaggctagcgctgcaactactgccatactgattgcgaggtcttctccaccttggttcatcgtggatcgcccttttcttttcttcataaggcacaacccaacgggagcggttttatttatgggccagattaataagccttag

SEQ ID NO: 248495 - RNA, 129 nt, synthetic construct
  misc_feature 1..129: note = Description of Artificial Sequence: Synthetic coding sequence
  source 1..129: mol_type = other RNA
atgaactggcatttacccctctttcttttggcttctgtcaccctgccatccatttgctcacactttaatcctctgtccctcgaagaactcgggtccaacaccggaattcaggtttttaatcagatttag

SEQ ID NO: 248496 - RNA, 831 nt, synthetic construct
  misc_feature 1..831: note = Description of Artificial Sequence: Synthetic coding sequence
  source 1..831: mol_type = other RNA
atgaattggcacctgccattgttcctgcttgctagcgtaacactgccttccatttgcagccacttcaatccgctgagcctggaggagctagggagtaacacgggaatacaggtcttcaatcagatagtgaaaagcaggcctcatgataacatcgtcatctcaccgcacggaatcgcctcggttctcggaatgttgcaactcggcgctgacgggaggactaagaagcagctcgccatggtgatgcgttatggggtgaatggagttggaaaaatccttaagaaaattaacaaagcaattgtgtcaaaaaagaacaaagatatcgtaactgtggccaatgctgtattcgtgaaaaacgcaagtgaaatcgaagtgccatttgttacaagaaacaaagacgtctttcagtgtgaagtcaggaacgttaattttgaggacccagcttcggcatgcgatagtattaacgcttgggttaaaaacgagacgcgggacatgattgataatttgctttctcctgacctgattgacggtgtcttaaccagactagtcttggtgaatgcagtgtattttaagggtctttggaagtccaggttccaaccagaaaatactaagaaacgaaccttcgtcgctgccgatgggaagtcatatcaggtgccgatgctggcacagctgtctgtgtttcgatgtgggagtacaagtgcacccaacgatctttggtataacttcatcgaactaccttaccacggcgaatctatctctatgctgatcgctctgccaaccgaatcgagcacccctctgtccgctattattccccacatctctactaaaacctag

SEQ ID NO: 248497 - RNA, 1230 nt, synthetic construct
  misc_feature 1..1230: note = Description of Artificial Sequence: Synthetic coding sequence
  source 1..1230: mol_type = other RNA
atgtccgattgcagaagctctctcgtggagggaacaatgaactggcatctgcctctcttcctgttagcatccgtgaccctgcctagtatatgctcccactttaatcctttatcactcgaggagctcggttccaatactggcattcaggtgttcaaccagatcgttaaatctcggccacatgataatatagtgatcagtccgcacgggatagcctctgttctgggtatgttacaacttggcgctgacggacggactaaaaagcagcttgccatggtgatgagatacggcgtaaatggagtgggaaagattcttaagaagatcaataaggcaattgtgagtaaaaagaataaggacatcgtgacggtcgccaacgctgtgttcgttaagaatgcatcagagattgaggtccctttcgtgactcggaataaagacgttttccagtgtgaggtgcgcaatgtaaatttcgaagacccggcaagtgcttgtgattccattaatgcttgggtgaagaacgagaccagagacatgatcgacaacctactctctcctgatctgatcgatggcgtgctgacacgcctagtcctcgtgaatgcagtatactttaagggcttgtggaagagtcgctttcaacctgagaatacaaagaagcgcacctttgtggctgctgatggcaaatcataccaagtaccaatgttggcgcagctgagcgtgtttagatgtgggtcaacatccgcccctaatgatctgtggtacaattttattgaactgccctaccatggcgagtctatcagcatgctgatcgccctgccgacggagagttctacaccgctgagcgccatcatccctcacatttcgacgaagacaatcgactcctggatgtctatcatggtgccaaaacgcgtgcaggtcatccttcctaaattcactgctgtcgctcagactgatctgaaagaaccactaaaggtgcttgggatcactgatatgttcgattcatcaaaggccaattttgctaaaatcacccgcagcgaaaacctgcacgtctcccatattcttcagaaagcgaaaattgaggtcagcgaggacggaaccaaagcatccgctgccaccaccgcaattctcatagcccgttcgagtccaccatggtttatcgtggatcgtccgtttctgttttttatccgccacaaccccacgggcgctgtgttattcatgggacagattaacaagccgtag

SEQ ID NO: 248498 - RNA, 264 nt, synthetic construct
  misc_feature 1..264: note = Description of Artificial Sequence: Synthetic coding sequence
  source 1..264: mol_type = other RNA
atgaattggcacctgccactcttccttttagcgtcagtgaccctcccttcgatttgctcccactttaacccgctttcacttgaggaactaggttcaaacacaggtatccaagtctttaatcagattgttaagtcccgccctcatgataacattgtcattagcccccacggcattgcctccgtgctcgggatgcttcaactgggagctgatggccgtacaaagaagcaactggcaatggtaatgaggtacggcgtcaacggatag

SEQ ID NO: 248499 - RNA, 426 nt, synthetic construct
  misc_feature 1..426: note = Description of Artificial Sequence: Synthetic coding sequence
  source 1..426: mol_type = other RNA
atggaaatgttgcaaggcttgttattgctgctcctcctgagtatgggaggcgcatgggccagtagggaacctctgcgtccctggtgccatccaataaacgctatcctcgcagtcgagaaggaaggatgtccagtctgcatcaccgtgaatacgacaatctgtgctgggtactgtccgactatgatgagagtactccaagctgtgctaccccccttgccccaggtcgtatgcacttacagagatgtgcggttcgaatccataagattgcctggctgtcctagaggtgtagaccccgtcgtgtctttccccgtcgccctgagttgccggtgcggaccttgcaggcggagcacatcagattgcggcggcccaaaggatcaccctctgacatgcgaccacccccaactgtctggcttattatttctatag

SEQ ID NO: 248500 - RNA, 1491 nt, synthetic construct
  misc_feature 1..1491: note = Description of Artificial Sequence: Synthetic coding sequence
  source 1..1491: mol_type = other RNA
atggggacccaaaaagtgactccagccctgatatttgccattactgttgccacgatcggaagttttcaattcggctataacacaggagttataaatgctcctgagaaaattatcaaggaatttattaataaaaccctgaccgacaaaggtaatgcaccacccagcgaggttctgctgaccagcttatggtccctgtccgtggcaatcttctcagttggtggcatgataggctctttttccgttggtcttttcgtgaatagattcgggaggaggaactccatgctgatcgtaaatctgctcgccgtcactggggggtgtttcatgggtctctgtaaagttgccaagtccgtggagatgctgatacttgggcgcttggtcatcggtcttttttgcggcttgtgcaccggattcgtccctatgtatataggtgaaattagtccaactgcactccgaggcgcctttggcacccttaatcagttgggcatagtggttgggatccttgtggcgcagatcttcgggctagaattcatcctgggaagtgaggagctgtggcctctgttattaggttttacgattctccccgcaatactgcaatctgctgccctgcccttttgtcccgaatccccgcgcttcttgttgattaaccggaaagaagaggaaaatgctaagcagatcctgcaaagattgtgggggacgcaggacgtcagccaggacatacaggaaatgaaggacgagtctgcccgcatgtcccaagaaaagcaggttacagtactcgagctcttccgggtcagctcgtatagacaaccaattatcatatcaatcgtcctacagctctcacagcagctctccggcatcaatgcagtgttctactacagcacaggaattttcaaggacgcaggagtacaagaacccatctatgccacgataggtgcaggagtggtgaacactatcttcaccgtggtgagcctctttctggttgagcgagccggacgacggacattacacatgattggactcggggggatggctttctgctctactctaatgaccgtctctttgttactgaaggataactataacgggatgtctttcgtgtgtatcggcgcaatccttgtgttcgttgccttcttcgagatcggccccggtcccatcccttggttcatcgtggccgagctgtttagtcagggaccacggcccgccgcaatggccgttgcaggctgctctaactggactagtaattttttagtaggcctgttgtttcccagcgctgcacactacttgggcgcttacgtgtttatcatctttacaggcttcctgatcacatttttggcctttaccttttttaaggtccccgagacgagaggcagaacatttgaggacattacaagagcatttgaaggtcaagcgcatggtgccgatcggagtggcaaagatggtgtgatggagatgaacagtattgaacctgccaaagaaacaaccaccaacgtgtag

SEQ ID NO: 248501 - RNA, 2097 nt, synthetic construct
  misc_feature 1..2097: note = Description of Artificial Sequence: Synthetic coding sequence
  source 1..2097: mol_type = other RNA
atgaaaatcgaaaccagcggctataactctgataagctgatctgcagaggtttcatcggcactcctgcacctcctgtttgcgattctaagttcctgctgtccccctcgtccgatgtcagaatgatcccttgtagagctgccctcacattcgctcgctgtctcatcagacggaagatagtcacgcttgactctctcgaagacactaagttgtgcagatgcctgagcaccatggacctaattgctttaggtgtgggatctacactgggagccggcgtatatgttctcgctggggaagttgctaaggcggatagcggacccagcatcgttgtctctttccttattgctgccctggccagcgtcatggcaggtctgtgttacgctgagttcggcgctcgtgtcccaaagacaggatccgcgtacttgtacacatacgttaccgtgggtgaactttgggccttcatcacgggttggaatctgatactgagctacgtaatcggcacatcctctgttgccagagcctggtccggtaccttcgatgagctgttgtctaagcagatcggacagttcctgcgaacctacttccgcatgaattatacggggctcgccgagtaccctgacttctttgccgtgtgtctgatcctcttgttagctggactgctctcttttggcgtcaaagaatctgcctgggtcaataaggttttcaccgctgtgaatatcctggtgctattgtttgtcatggtagccggcttcgtaaaggggaatgtggccaattggaagatttcagaagagttccttaagaacataagcgcctctgcacgtgaaccccccagtgaaaatggcacctccatctatggggcggggggattcatgccctacggatttactggaaccttggctggggccgccacatgtttttacgcctttgtcggatttgactgtatcgccactactggagaagaggtgcgcaaccctcagaaggccatcccgatcggcatcgtgactagcctgctggtgtgttttatggcttacttcggagtttctgcagccctgaccctcatgatgccatactacctcctagacgaaaaatcaccactccctgttgccttcgaatatgtcggctgggggcccgcaaagtatgtggtggcagccgggagcttgtgtgctttgagcacatctttactaggatcgatctttccaatgcctcgagtcatttacgccatggctgaggacgggttgctctttaagtgcctggctcagatcaactccaagaccaagacacctattatcgctaccctgagctccggcgccgtggctgcactgatggcatttctctttgatctgaaggcgcttgttgacatgatgtcgatcggaacgttgatggcttatagtctggttgccgcctgcgttctgatcctccgataccagcccggcctgagttacgatcagcctaaatgctcccccgagaaagatggattgggaagctcaccccgcgtcacctctaagtccgagagccaggtgaccatgctgcaacgtcagggcttctcaatgcggactctcttttgtccatccctgttgcccactcagcagagcgcgagcctcgtttcttttctggtcggattcttagccttcctggtgttgggactgtcagtgctaacgacctatggagtccacgcaatcacccgcttagaagcttggtccctggccctgctagccctcttcttagtcctattcgttgccatcgtcctgacaatctggcgccagccacagaaccaacagaaggtggcattcatggtgcctttcctgccttttctgccagcattctccatcctcgtgaatatatacttaatggtgcaactaagtgctgacacctgggttcgattctcaatttggatggccatagggtttttgatttacttctcctacggaattagacatagtctggagggtcatctgagggacgaaaacaacgaggaggacgcttatcccgacaatgtgcatgccgctgctgaagagaagagtgctatccaagccaacgatcaccacccgcgcaatttgtcatccccatttattttccatgaaaagaccagcgaattctag

SEQ ID NO: 248502 - RNA, 1464 nt, synthetic construct
  misc_feature 1..1464: note = Description of Artificial Sequence: Synthetic coding sequence
  source 1..1464: mol_type = other RNA
atgggagacactggcctgagaaagagacgtgaagatgaaaaatctatccagtcccaggaacctaaaaccacatccctgcaaaaggaactgggactaattagcggtatcagtatcatagtaggaacaatcatcggttctggaatttttgtctccccaaagtcagtcctgtcgaacacagaggcagttggtccatgtctgattatatgggcagcatgcggcgtcctcgctactctgggggcactgtgcttcgccgaactggggacgatgatcaccaagtctggcggcgaatacccatatcttatggaggcatatggtcccattccagcataccttttctcctgggcgtccttaattgttatcaaacctacatcttttgccattatttgcctttctttttccgagtatgtgtgtgcccctttctatgtcggctgcaaaccacctcagattgtagtgaagtgtctggcagccgccgccatactctttatctcaacggtgaattcactctccgtacgactggggagttatgttcagaacatcttcactgccgcaaaacttgtgattgttgccataattattatctccggcctggtgctgctggcccagggaaatacaaagaattttgataattcttttgagggagcacaattgagcgtgggcgctatctcactggccttctataacggactgtgggcttatgatggatggaaccaattgaactacatcaccgaggaacttcgcaatccctaccggaaccttcctttggccatcattatcggaattcctttggtaaccgcttgctacattttgatgaacgtgtcctactttactgttatgacagctacggaacttctacaatctcaagccgtggctgtgactttcggcgatcgtgtgctgtatccagcctcgtggatcgttccactgtttgttgccttctctactattggcgctgcgaatggcacttgtttcaccgcaggccgactgatctatgtcgcaggccgggagggtcacatgctgaaggttttgagctacatatctgttcggaggctgaccccggccccagccattattttctacggaattatcgcaactatctatatcatccctggcgatatcaactccctggtgaactacttttcctttgcagcgtggttgttttacggcttgacaattctgggactaatcgtgatgcggttcactcgtaaggagctcgaaagaccaatcaaagtgcctgtcgtgatccctgtcctgatgacattaatctctgtctttttggtgctggcgcccatcatctccaagcctacgtgggagtatctgtactgcgttctgttcattctgtcaggcctgcttttctacttcttgtttgtgcattacaagtttgggtgggcccagaagatatcaaagccaattactatgcacctccagatgcttatggaagtggtgcctcccgaggaggatccagagtag

SEQ ID NO: 248503 - RNA, 1311 nt, synthetic construct
  misc_feature 1..1311: note = Description of Artificial Sequence: Synthetic coding sequence
  source 1..1311: mol_type = other RNA
atgctgaaggtatcagccgtgctctgcgtctgtgccgcagcatggtgttctcagtctctggctgccgcagccgctgtggcagctgctgggggcagatctgatggcggaaacttcttggacgataagcaatggcttacgacgatatcccagtacgacaaggaggttggccagtggaacaagttccgggatgaggtagaggacgactacttcaggacatggtcaccaggtaaaccttttgaccaggccctcgaccccgctaaagacccctgcctgaaaatgaaatgctctcggcacaaagtatgtatagcccaggattctcagacggccgtttgcatctcacaccgccggctgacccatcgtatgaaagaggcaggagttgaccaccgacaatggcggggccccatcctgagcacatgtaagcagtgcccagtggtgtaccccagcccagtttgcggctccgatggtcatacatactcctttcagtgcaaactcgagtaccaagcgtgtgtgttaggcaagcagatcagtgttaagtgcgagggacactgcccctgtccctccgacaagcctacaagtacttcacgcaacgttaagcgagcctgctccgatttagagtttagagaagtagctaaccggctgagagattggtttaaggccctgcatgaaagcgggtcacagaacaagaaaaccaaaaccctgctcagacctgaacgttccagatttgatacctcaattttacccatttgcaaagactcattgggatggatgttcaaccgcctggatactaactatgatttgctacttgaccaatccgaactgaggtccatctatctcgataaaaatgagcaatgcactaaggctttctttaacagctgcgacacttataaagactctctgatttccaacaatgaatggtgctattgcttccagaggcagcaggatcccccttgccaaactgaactatcaaatatccagaagagacaaggcgtaaagaaattactcgggcagtacatacccctctgtgatgaagacggctattataaacctacacaatgtcatgggtctgttggacagtgctggtgcgtagatagatatggcaatgaagttatgggtagtcgcatcaatggagtggccgactgtgccatcgatttcgagattagcggcgatttcgcgtcgggagacttccacgagtggacagatgacgaggatgacgaggatgatatcatgaatgacgaggacgagatagaggacgacgacgaggatgagggtgatgacgatgacggaggcgatgaccacgacgtgtatatatag

SEQ ID NO: 248504 - RNA, 1302 nt, synthetic construct
  misc_feature 1..1302: note = Description of Artificial Sequence: Synthetic coding sequence
  source 1..1302: mol_type = other RNA
atgctgaaggtcagcgccgttttgtgcgtctgtgccgctgcttggtgtagtcagtcattggctgcggctgccgcagtcgcagctgccggtggacgctctgatgggggaaactttctggacgataaacagtggttaaccaccatatcccagtacgataaggaagtgggtcagtggaataaatttcgcgacgacgactattttcgtacctggtctcctggcaagccctttgatcaagctcttgaccccgcgaaagatccttgtttaaagatgaaatgttcgcgacacaaggtatgcatagctcaagactcacagacggcagtgtgtatctctcatcgccggctcacacatcggatgaaagaggccggcgtggaccatagacagtggcggggcccaatcctgagtacttgtaagcagtgtcctgtggtctatccaagtccagtgtgcgggtcagacgggcacacatatagtttccagtgcaagctcgagtaccaggcctgtgtcttagggaagcagatctctgtcaagtgtgagggtcattgcccttgtccaagcgataagccaacaagtacctctcgaaatgtcaaacgtgcttgcagcgacctcgagtttcgggaggtggccaataggctacgcgattggtttaaggcactgcacgagtctggatctcaaaacaaaaagaccaaaaccctcctgcgtcccgaacgctcccggtttgacacaagtatcctgcctatctgcaaagatagtctgggctggatgttcaaccgactcgacacaaactatgatctgttacttgatcagtcagaattacgtagtatctacttagacaagaatgagcagtgcactaaagctttcttcaactcatgcgatacatataaagattctctgattagcaacaacgagtggtgctactgttttcagagacaacaagacccaccctgccaaacggagctcagcaatatccagaaaaggcaaggtgttaaaaaactgctgggccagtatataccactgtgtgacgaggacgggtactacaagcccacccagtgtcatgggtccgtgggccagtgttggtgtgttgataggtatgggaatgaagtcatgggctccagaattaacggagtcgcagattgtgcgatcgacttcgagatatcaggtgacttcgctagcggagatttccacgaatggacagacgatgaggatgacgaggatgacataatgaatgacgaagacgagatagaagatgatgacgaagacgagggggacgacgatgacggtggagacgatcacgacgtctacatctag

SEQ ID NO: 248505 - RNA, 1158 nt, synthetic construct
  misc_feature 1..1158: note = Description of Artificial Sequence: Synthetic coding sequence
  source 1..1158: mol_type = other RNA
atgatcacccaagaccatattcatatgagttcgggactcagccaggacgattattttcggacttggtcaccaggaaaacccttcgaccaggcgctcgatcctgctaaagacccatgcttgaagatgaagtgttcaagacataaagtgtgtatcgctcaagactcacaaacagccgtctgtatctctcatcggcgactgacacacaggatgaaagaggcaggcgttgatcataggcaatggcggggccctatcctctccacttgcaagcaatgtccagtggtgtacccaagtccagtgtgcggcagcgatggccacacctattccttccaatgcaaacttgaatatcaagcctgcgtgctgggaaagcagatctctgtgaaatgcgagggtcactgcccgtgtccgagcgataaaccgacctcaacctcacggaatgttaaaagggcatgtagcgatctggagttcagagaggttgccaatagactgagagactggttcaaagccttgcatgaatcgggtagtcaaaacaaaaagacaaagactctcctgagacccgaacgatctcgtttcgacacttctatattgcccatttgtaaggactcattaggatggatgttcaaccgtttggataccaattacgacctgttactggaccagtccgagcttaggagcatttacctggacaaaaatgaacagtgtacaaaagccttcttcaacagttgcgatacttacaaggactctctgatcagcaacaacgaatggtgctactgttttcaacgtcagcaagaccctccctgccagacagagctgtccaacattcagaagcgtcagggtgtgaagaagttgctggggcagtacatccccctttgtgatgaggatgggtactacaaacccacccagtgccacggctcagtggggcaatgttggtgcgttgatcgctacggcaatgaggtgatgggctcaagaattaatggggtcgcagactgcgcaatagatttcgagataagtggcgactttgcttcaggtgattttcatgaatggactgacgatgaggatgacgaggacgatatcatgaatgatgaggatgagatcgaggatgacgacgaagatgaaggcgatgacgacgacgggggagacgatcacgatgtgtacatttag

SEQ ID NO: 248506 - RNA, 1311 nt, synthetic construct
  misc_feature 1..1311: note = Description of Artificial Sequence: Synthetic coding sequence
  source 1..1311: mol_type = other RNA
atgctcaaggtcagcgccgtgctgtgcgtatgtgcggccgcctggtgcagtcaatccctagctgctgcggccgctgtggcagccgccggagggcggagcgacggggggaattttctggacgataagcagtggctcacaacgatcagccagtacgataaagaagtaggacagtggaataagtttcgtgatgaagtcgaagatgattacttccgaacctggagcccgggaaaaccttttgaccaggcattagacccagccaaggacccttgcttgaagatgaaatgtagtagacataaagtatgcatcgctcaagattctcagaccgccgtgtgcatttctcaccggcgcctgacacataggatgaaggaggcaggcgtagatcataggcagtggcgtggacctattttgagcacctgtaagcaatgtcctgttgtgtacccttccccagtctgtggctctgacggtcatacatatagttttcagtgcaaactcgaataccaggcatgcgttctgggtaagcagatttccgtgaagtgtgagggccactgcccgtgcccaagtgacaagcccacctcaactagtaggaacgtgaagagggcctgctccgatctggagtttagagaggtcgcaaatcgcttaagggactggtttaaagcactccacgagtccggctcgcagaataagaagacaaagacgctgctcagaccagagaggagccgattcgacactagcatccttccaatctgtaaagactccctggggtggatgttcaaccgactcgacactaattacgacctccttctcgatcaatccgaattgaggagcatatacctcgataaaaatgaacagtgcacaaaagcattcttcaattcttgtgacacatataaggatagtctcatttcgaataacgaatggtgctactgttttcagcgacagcaggacccgccttgtcagaccgagctcagtaatattcagaagcgccagggggtcaagaaactgttgggacagtatatcccattatgcgacgaggacggctattacaaacctactcagtgtcatgggtcagtggggcagtgctggtgcgttgaccggtatggcaacgaggtgatgggcagtaggatcaatggggtggcagattgcgcaattgattttgagattagtggtgactttgcaagcggcgacttccacgaatggactgacgacgaagatgacgaggatgatattatgaacgatgaagacgagatagaagacgatgacgaggacgaaggagacgatgacgatggcggtgacgatcacgatgtttatatatag

SEQ ID NO: 248507 - RNA, 1302 nt, synthetic construct
  misc_feature 1..1302: note = Description of Artificial Sequence: Synthetic coding sequence
  source 1..1302: mol_type = other RNA
atgctcaaagtcagcgccgttctgtgtgtctgcgccgccgcttggtgtagtcagtcacttgccgcagctgcagctgtcgccgccgcaggcggacggtcggacggaggcaattttcttgacgacaaacagtggctcacaactattagtcagtatgacaaggaggtagggcaatggaataaattcagagacgacgactacttcaggacttggagtcctggcaagcctttcgatcaggcactggacccggctaaagatccctgcctcaaaatgaaatgttcaagacacaaagtatgtatcgcccaggactcccaaaccgccgtatgcatctcacaccgaagactgacacaccggatgaaagaggccggcgttgatcaccggcaatggagaggtcctatcctgtcaacatgtaagcagtgcccagttgtttacccatcgcccgtgtgtggaagcgatggacatacttatagctttcaatgcaagttggaatatcaggcctgcgtgttaggcaaacaaatctctgtgaaatgtgaaggacactgtccatgtccaagtgacaagccaactagtaccagcaggaatgtgaaacgggcttgcagtgacctagagtttcgggaagttgccaaccggctgcgtgattggttcaaggcactacatgaatcaggcagccagaacaagaagacgaagacactcctcagacctgaaaggtccagattcgatacttctatcctgcctatctgcaaagactctctcggatggatgttcaaccggctcgataccaactatgacctcctgctcgatcagtccgaacttaggtctatctatctcgacaaaaacgaacagtgcacaaaggctttctttaactcttgcgatacatacaaggacagcctgatttccaacaatgaatggtgctactgctttcagcggcaacaggaccccccctgccagaccgagctgtctaacatccagaagcgccagggcgttaaaaaactcttggggcaatacatccccctgtgtgacgaagatggctactacaaaccgactcaatgtcatggctctgttggtcaatgctggtgcgtcgataggtacggcaatgaggtcatgggctcccgaatcaacggcgtggcggattgtgctatcgatttcgaaatatcaggcgacttcgcatccggggacttccatgagtggacagatgacgaggatgatgaagatgatatcatgaatgatgaagacgagattgaagatgacgacgaagatgaaggtgacgacgatgacggtggggatgaccacgatgtctacatttag

SEQ ID NO: 248508 - RNA, 348 nt, synthetic construct
  misc_feature 1..348: note = Description of Artificial Sequence: Synthetic coding sequence
  source 1..348: mol_type = other RNA
atgttaaaagtgtctgctgtgctctgtgtctgcgccgccgcctggtgcagtcagagcttagcagccgcagcagcagttgccgccgccggaggacggtcggatggagggaatttccttgacgataagcagtggctgactaccatctcacagtatgataaagaagtaggccagtggaacaagtttcgggacgaggtggaagacgactactttaggacatggtctccaggaaaaccctttgatcaggcactcgaccctgctaaggacccctgcctaaaaatgaaatgttcccgccataaggtgtgtatagcccaggactctcagacagcagtgtgcatatcccataggtag

SEQ ID NO: 248509 - RNA, 1311 nt, synthetic construct
  misc_feature 1..1311: note = Description of Artificial Sequence: Synthetic coding sequence
  source 1..1311: mol_type = other RNA
atgctgaaagttagcgccgtgttatgtgtgtgcgctgccgcctggtgttcacaatccctcgccgccgccgcagctgtggcagccgccggaggcagaagtgatggggggaatttcctggacgacaagcagtggctgacaaccatttcacagtatgacaaagaagttggtcagtggaataaatttagagatgaggttgaggacgactattttcgtacctggtcaccagggaagccattcgatcaagctctcgatccagcaaaagacccttgcctgaagatgaaatgtagcaggcacaaagtgtgcattgctcaggattcacagactgccgtatgcatatcacatagacgtttgacccaccgcatgaaggaggccggcgttgatcacaggcagtggcggggtccaatactgtccacttgtaagcagtgcccggtggtgtacccctctccagtgtgcggatccgatggccacacttatagcttccaatgcaaactcgagtatcaggcgtgtgtactggggaaacaaatcagcgtgaaatgcgaggggcactgcccctgtccctccgataagccgacatccacaagtcggaatgtcaaaagggcctgtagtgatcttgaattccgcgaagtggcaaaccgccttagagattggtttaaagcacttcatgagagtgggagccagaacaagaagaccaagaccctgcttagacccgaacggtctcgattcgatacttcaattctgcctatctgtaaggactccctgggttggatgtttaatcggctagacacaaattacgacctcctgcttgatcagtcggaactcagatctatttacttggataaaaacgagcagtgtaccaaggcatttttcaactcatgcgatacgtacaaggattctctgatatcgaataacgaatggtgttattgcttccagcgccagcaggatcctccatgtcaaactgagctgtcaaatattcagaaaaggcagggagtaaagaaactgttaggacagtacatccccctgtgtgatgaggatggttattataagccgacgcagtgccacgggtccgtcggccagtgctggtgtgtggaccgttatggcaacgaagtgatgggaagcagaatcaacggagtggctgattgcgctattgacttcgaaatctctggagactttgcaagcggagactttcatgagtggaccgacgacgaagatgacgaggacgacattatgaacgacgaagacgaaatcgaagacgatgacgaggatgaaggagatgatgatgatgggggtgatgatcacgacgtctatatctag

SEQ ID NO: 248510 - RNA, 486 nt, synthetic construct
  misc_feature 1..486: note = Description of Artificial Sequence: Synthetic coding sequence
  source 1..486: mol_type = other RNA
atgctcaaggtttccgccgtcctctgtgtgtgcgcagccgcttggtgctcccaatcactggccgccgcagctgctgtcgcagccgccgggggcagatcggatgggggaaacttcctcgacgataagcagtggctcacaaccatcagccagtacgacaaggaggtgggacagtggaataagttcagagacgacgattactttcgaacgtggtcccctgggaaaccctttgatcaggcactagaccccgccaaagacccatgcctcaagatgaaatgttcacgccacaaggtttgtattgcccaagactcccaaacagctgtgtgtatcagtcaccgcagactcacccatcggatgaaggaagctggggtggaccatagacagtggagagggcctatcctgtcaacctgcaaacagtgtccagtcgtgtaccccagccccgtttgtggatcagatggccatacctactcctttcagtgtaagttgtag

SEQ ID NO: 248511 - RNA, 522 nt, synthetic construct
  misc_feature 1..522: note = Description of Artificial Sequence: Synthetic coding sequence
  source 1..522: mol_type = other RNA
atgctgaaagttagtgcggtcctctgcgtgtgcgccgctgcgtggtgtagtcaatcccttgcagccgcagctgccgtcgccgccgccggaggaagaagcgatggtggcaacttcttagacgacaaacagtggttgaccactatttctcaatatgataaagaagtggggcagtggaataagtttcgggatgacgactattttcggacttggagccccggaaaaccttttgatcaggcgtgcagcgaccttgagttccgcgaggtcgccaataggctacgcgactggttcaaggccctccatgaatctggctcccaaaacaaaaaaactaagaccctcttgcggcctgagcgctcgcgttttgatacttctattctcccaatttgcaaagattccttgggctggatgttcaaccggctcgatacaaattatgaccttctgctcgaccaaagtgaactgcgatcaatctacctcgacaaaaatgagcagtgcaccaaagccttcttcaatagttgtgatacatag

SEQ ID NO: 248512 - RNA, 1182 nt, synthetic construct
  misc_feature 1..1182: note = Description of Artificial Sequence: Synthetic coding sequence
  source 1..1182: mol_type = other RNA
atgctgaaagtctctgccgtgttatgcgtgtgtgcagcagcttggtgctcacagagcctggccgcagcagctgcagtggcagcagcggggggcagaagcgatggagggaatttcctagacgacaaacagtggctgacgacgatctctcagtatgataaagaagtgggacagtggaacaagtttcgagatgatgactacttcagaacttggagtcctggtaagccgtttgaccaagcccttgacccagccaaagatccttgcctcaaaatgaagtgcagcaggcacaaagtttgcatcgcccaggatagccagaccgccgtatgcatctcccatcgcagacttactcaccgaatgaaagaggccggcgttgatcaccgacagtggcgcggacctattttgtcaacatgtaagcagtgtcctgtagtttacccaagtccagtttgcgggtctgatggacatacatacagctttcagtgcaaactcgaataccaagcgtgtgttctgggtaaacaaatatctgtgaaatgcgaggggcactgcccctgcccctctgataagcccacgagcacatccagaaacgtcaaaagaggatttgatacatctatactgccaatctgtaaggatagtttaggctggatgtttaacagattggacacaaactacgacctcttattagatcagagcgagctgagatcaatctacctggacaaaaacgaacagtgcacaaaagccttcttcaacagctgcgatacatataaagatagcctaatctccaataatgagtggtgctactgttttcagcgacaacaagaccctccatgccagacggagctgtcgaacatccaaaagcgtcagggcgtgaagaagctgctggggcagtacattccactgtgtgacgaagacgggtattataaaccaacgcaatgtcatggatcagtcgggcaatgctggtgcgtggacagatacggcaacgaagtcatgggctcacgcatcaatggtgtggcagactgtgccatcgactttgaaatatcaggagatttcgccagcggggatttccatgagtggactgatgacgaggacgacgaggacgatattatgaatgacgaagacgaaatcgaggacgatgatgaagatgaaggcgatgacgacgacggcggcgacgaccatgacgtctacatttag

SEQ ID NO: 248513 - RNA, 1302 nt, synthetic construct
  misc_feature 1..1302: note = Description of Artificial Sequence: Synthetic coding sequence
  source 1..1302: mol_type = other RNA
atgctaaaagttagcgctgtgttatgcgtctgcgccgctgcatggtgttctcaatccctggccgcagctgctgccgtagccgctgccggaggccgctcggacggagggaactttctcgatgataagcaatggcttactactatctcccaatacgacaaagaggtaggccagtggaataagttcagggatgatgattattttcgtacatggagtcctggcaaaccttttgatcaggctttagaccctgccaaagacccctgtctgaaaatgaagtgctccagacacaaggtgtgcattgcgcaggattcccaaactgcagtgtgtatatcccataggaggctaacccaccgcatgaaggaggccggcgtagaccaccgacagtggcgcggacccatcctgtccacatgtaagcagtgccctgtggtatatccgagtcccgtctgtggcagcgacggccacacgtacagttttcagtgtaagctagagtaccaagcctgcgttctcggtaagcaaatctcagtgaagtgcgaaggacattgcccctgcccttcagataaaccaacctctacctcacgaaacgttaaaagagcttgcagcgatcttgaatttagagaggtggcaaaccggctgcgagattggtttaaagccctgcatgagagcggttcccagaataagaaaactaagactctcttgcgcccagaacgcagcaggttcgatacatccatattgcctatctgcaaggactctcttggctggatgttcaatcgactggacaccaattacgacttgttgctagaccagtccgaactgagaagcatatacctagacaaaaatgagcagtgtaccaaggcctttttcaatagttgtgacacatacaaagatagcctgatctcaaataacgaatggtgctactgtttccagaggcagcaggatccaccatgtcaaaccgagcttagcaacatccagaagagacaaggagtgaaaaagctgctgggccagtacattcccctctgcgatgaagacggctactacaagccaactcaatgtcacggaagcgtcggacagtgctggtgcgtcgatagatatggtaatgaggtcatgggctcccgaattaacggcgttgccgactgtgcgatagacttcgagatttcaggtgacttcgcctcgggggattttcatgaatggactgacgacgaagatgacgaggacgacattatgaacgatgaggacgagattgaagacgacgatgaagacgaaggtgacgacgacgacggtggagatgatcatgatgtctacatctag

SEQ ID NO: 248514 - RNA, 1311 nt, synthetic construct
  misc_feature 1..1311: note = Description of Artificial Sequence: Synthetic coding sequence
  source 1..1311: mol_type = other RNA
atgctgaaggtatccgccgttttatgtgtttgtgctgccgcctggtgcagccagagccttgcagccgccgccgcagtcgcagctgctggcggaaggtcagatggaggcaattttcttgatgataaacagtggttgactactattagccagtatgataaggaagtgggccaatggaataagtttagagatgaagtagaagatgattattttcggacctggagtcctggcaagcccttcgaccaagcgctcgaccccgcgaaagacccatgtctgaaaatgaagtgctctcgacataaagtgtgcatcgcgcaggactcccaaaccgctgtgtgcatttcgcacaggagactgacccatcgaatgaaggaagcaggagtggaccatcgacagtggcgcggccccatactctccacttgtaagcagtgccccgtcgtgtacccttcaccagtatgtggttctgacggtcacacctatagttttcaatgtaagcttgaatatcaagcgtgcgtgcttggtaagcaaatttccgtgaagtgcgagggtcactgtccatgcccttcagacaaaccgacctcgacctcacggaatgttaaacgggcatgttctgacttagaatttcgcgaagttgcgaatcgcttacgtgattggttcaaagccctccatgaatcaggctctcagaacaagaagactaagactctgttgcggcccgaacggagccggttcgacacaagtattctgcctatctgcaaagacagcctgggatggatgttcaacaggcttgatactaattacgacctgctgctggaccagtccgaattacggagcatatacctcgacaagaatgagcagtgtaccaaggcttttttcaactcctgcgacacatacaaagactctctgatctccaataacgagtggtgctattgctttcagcggcagcaagaccctccttgccaaacagaactgtccaatatccaaaagaggcagggtgttaagaagctgctcggacagtatatcccgctatgtgacgaggacggctattataaacctacccagtgtcatgggagcgtcggacaatgctggtgtgttgaccgatatggaaacgaggtaatggggtcccggattaacggtgtcgcggattgcgctattgacttcgagatctccggcgattttgcgagcggcgacttccatgagtggaccgacgacgaagatgacgaggacgatataatgaatgacgaggacgagatcgaggatgatgatgaagacgagggagacgatgacgacggaggcgacgaccatgatgtgtatatttag

SEQ ID NO: 248515 - RNA, 348 nt, synthetic construct
  misc_feature 1..348: note = Description of Artificial Sequence: Synthetic coding sequence
  source 1..348: mol_type = other RNA
atgctgaaggtgagtgcagtgctttgtgtgtgtgcagcggcatggtgctctcagtccttggctgccgctgccgctgtagccgccgcaggtggacggtcagatggaggcaacttcctggatgataagcagtggctaacaactatctctcagtatgataaggaagtcggccaatggaataagtttcgagacgaagttgaagacgattattttaggacctggagccctggaaagccgtttgaccaagctctggaccccgccaaagacccatgcctaaagatgaaatgttctaggcataaagtgtgcattgctcaagattcccaaaccgccgtgtgcattagtcatagatag

SEQ ID NO: 248516 - RNA, 942 nt, synthetic construct
  misc_feature 1..942: note = Description of Artificial Sequence: Synthetic coding sequence
  source 1..942: mol_type = other RNA
atgctcaaggtctcagctgtactgtgtgtgtgtgctgcagcctggtgctcacagtctcttgccgccgccgctgccgttgcagctgctggagggagatctgacggaggcaattttctggacgacaaacaatggttgaccacaatttcccagtatgataaagaggtggggcagtggaataagttccgggacgacgactactttaggacttggtcacctggaaagccttttgatcaggcactggatcccgctaaggatccatgtctcaaaatgaaatgttctcgacataaagtctgtatagcacaggactctcagacagccgtatgcatctcgcaccgaagattaacccatcgcatgaaggaagctggagtggaccatagacagtggcggggaccaattttaagcacatgcaagcagtgccctgttgtttacccctctccagtctgtggctcagacggccacacctattccttccaatgcaaactggaataccaagcctgtgtcttagggaagcaaattagtgtaaaatgtgagggtcattgcccatgcccctcagataagcctacttctacatcaaggaacgtgaaaagagcatgcagtgatctcgagtttcgcgaggtggcgaatcgtttgcgcgactggtttaaggctcttcatgagagcggaagccagaataagaaaaccaaaactctgctgcgcccagagcgatcccgcttcgacactagcatccttcctatttgcaaagattcactcggttggatgtttaatcggttagatactaactatgacctgctgttagatcagtctgagctgcgtagtatctatctggacaagaacgagcaatgcaccaaagccttcttcaacagctgcgacacgtacaaggactctctgataagcaacaatgaatggtgctactgctttcagcgtcaacagggtaagagatag

SEQ ID NO: 248517 - RNA, 1017 nt, synthetic construct
  misc_feature 1..1017: note = Description of Artificial Sequence: Synthetic coding sequence
  source 1..1017: mol_type = other RNA
atgttgaaggtttccgccgtcctatgtgtgtgcgctgcagcctggtgttctcagtccctcgccgccgccgccgctgttgccgcagccggagggagatctgatggaggcaatttcttagatgacaagcagtggctgacaaccatttcgcagtatgataaagaggtgggtcagtggaacaaattcagagactgcaagttagaataccaggcctgcgttctgggcaaacagatcagtgtgaagtgcgaaggtcactgcccctgcccatccgacaagcccaccagtacctcacgcaacgtgaagcgggcttgtagcgatttggagtttcgggaagtcgctaatcgactgcgcgactggtttaaggcactccacgagtcagggtcacagaataaaaaaaccaagacactgctcagacctgagcgatctagattcgatacctccattttaccaatctgtaaagattcactgggctggatgttcaaccgactagacactaactacgatctcctcctcgatcagtctgagctgagatccatttacctggacaagaatgaacagtgtacaaaggccttctttaacagctgcgatacttacaaggactctctaattagcaataacgagtggtgttactgtttccaacgacagcaagatccgccatgccagaccgaactttccaatatccagaagcgccagggcgtgaagaaattgctggggcagtatatccccctatgtgacgaggacggctattacaaacccactcagtgtcatggctcggtgggtcaatgctggtgtgtggatcgatacggtaacgaggttatgggatcacgaataaacggagtggcagattgcgccatcgactttgagattagcggtgatttcgctagtggcgacttccatgagtggacagatgatgaagacgatgaggatgacatcatgaatgacgaagacgaaatagaggacgacgacgaagacgagggtgacgacgacgatggaggtgatgaccacgatgtttacatttag

SEQ ID NO: 248518 - RNA, 1023 nt, synthetic construct
  misc_feature 1..1023: note = Description of Artificial Sequence: Synthetic coding sequence
  source 1..1023: mol_type = other RNA
atgataaataacgggagtccccagagcctgtccatgacacggaagtctgacagtggaaccaacagcgaaacgatgaaggaagccggcgtagaccacagacaatggcgcgggccaatactgagcacctgcaagcaatgcccagtcgtatacccatccccagtatgcggtagcgatggccacacatacagttttcagtgtaagttagagtaccaggcctgtgtgcttgggaagcagatcagcgtcaaatgcgaaggacattgcccttgtccttctgataaaccaacaagcacaagccgaaatgtaaaacgggcctgttcagatttggaatttcgagaagtggccaatagactgagggactggtttaaagccttgcacgaaagtggatcgcagaataagaagacgaagactctcctgcggccagaacgaagtcggtttgataccagcattctgcctatctgcaaagatagcctgggctggatgttcaacagactcgacacaaactatgacctgctgttagaccaatcagagttaagaagcatatacctggacaaaaatgaacagtgcacaaaagctttcttcaattcctgtgacacctacaaggattccctaatttctaacaacgaatggtgctattgcttccaaaggcaacaagatcctccatgtcagactgaattaagtaacatccaaaagcggcagggtgtgaaaaaactgctgggccagtatatacctttatgtgacgaagatggctactataagcctactcagtgccatggctctgtcggacagtgctggtgtgtcgatcgatacgggaatgaggtgatgggttccagaataaacggcgtagcagactgcgcgatcgactttgagatttccggtgattttgccagtggcgatttccacgagtggaccgacgatgaggatgacgaggacgacattatgaacgacgaggatgagatcgaagacgatgacgaagatgagggtgatgacgacgacggtggggacgatcacgatgtgtacatatag

SEQ ID NO: 248519 - RNA, 915 nt, synthetic construct
  misc_feature 1..915: note = Description of Artificial Sequence: Synthetic coding sequence
  source 1..915: mol_type = other RNA
atgaagtgttccagacacaaggtgtgtatagctcaagattcacagactgcagtctgtatttcccaccggcgcttgacgcataggatgaaggaagctggcgtggatcacagacagtggcgaggtcctattctaagtacttgcaagcagtgcccggtcgtttacccatccccagtctgcgggagcgacggacacacttattctttccaatgtaaactggagtaccaggcttgtgttctcggaaagcaaatttctgttaaatgtgaaggacactgcccctgcccaagcgacaaacccacaagcacctcccggaacgtgaaaagaggcttcgacaccagcatcctccccatctgcaaggactccctgggatggatgtttaaccgtctcgatacgaattacgaccttctgttagaccagtccgaattgcgatccatctatctggacaagaacgagcagtgtacaaaggcgttcttcaactcgtgtgatacttacaaagatagcctgatcagcaataatgagtggtgctactgcttccagaggcagcaagacccaccatgccaaacagaactgtctaatatccaaaagcgccagggtgtcaagaagctcctgggccagtatatccccctctgtgacgaggacggatactataaaccaacacaatgtcatggctccgtcggccagtgctggtgtgtagacaggtacgggaatgaagtaatgggcagccgcataaatggagtggcagactgtgcgattgactttgagatctctggtgattttgcatctggtgacttccacgaatggaccgacgacgaggatgacgaagatgacattatgaatgacgaggatgaaatcgaggacgacgatgaagacgaaggagacgatgacgatggcggcgatgaccatgatgtctacatttag

SEQ ID NO: 248520 - RNA, 951 nt, synthetic construct
  misc_feature 1..951: note = Description of Artificial Sequence: Synthetic coding sequence
  source 1..951: mol_type = other RNA
atgaaagaagcgggcgtggatcaccgacagtggcgggggccaatactctccacatgtaagcaatgccccgtggtgtaccccagtcccgtgtgcggatccgatggccatacctattctttccaatgcaaactggaatatcaggcctgcgttttaggaaagcaaataagcgtgaaatgcgaaggacactgtccctgtccctctgataagcccacatccacaagtcgcaacgttaaacgcgcctgttccgatttggagttcagggaagtggcaaaccggttgagggattggtttaaggcccttcacgagagcggcagtcagaacaagaagacaaagaccctgcttagaccagagcgctcccgctttgacacaagtatattgccaatatgtaaagatagcttggggtggatgttcaacaggctggatacaaattatgatttactgctggatcagtcggagctgcggagtatatacttggacaagaacgagcagtgcacgaaggcctttttcaacagttgcgacacctataaagactctctgattagcaataatgagtggtgttactgctttcagcgtcagcaggacccaccctgccagacggagctctccaacattcagaaacggcaaggcgttaaaaagttgttgggccagtatatccctctgtgtgatgaggatggatattataagcctactcagtgccacggatccgtgggccagtgttggtgcgtcgacagatacggtaatgaagtcatgggctccagaataaacggagttgccgactgtgccattgatttcgagattagcggagactttgcaagcggagatttccacgaatggaccgatgacgaggacgatgaagacgacataatgaacgatgaggatgagatcgaagacgatgacgaggacgagggcgatgatgatgacggcggagatgaccatgacgtttatatttag

SEQ ID NO: 248521 - RNA, 1017 nt, synthetic construct
  misc_feature 1..1017: note = Description of Artificial Sequence: Synthetic coding sequence
  source 1..1017: mol_type = other RNA
atgttaaaggtgtctgccgtgctgtgtgtgtgtgccgccgcctggtgttctcagtccctggctgctgccgctgcggtggccgccgccggtggccgatcagatggaggaaattttcttgatgacaagcagtggttaaccactatttctcagtatgataaggaagttgggcaatggaacaagtttagagattgtaagttggagtaccaggcttgcgtgctcgggaagcagatcagtgtcaagtgtgagggtcactgtccctgtccatccgataagcctactagtaccagccgtaatgtaaaacgggcatgttctgacttggaatttagagaggtggctaaccggctacgcgattggtttaaggcactgcatgagtcgggctcccagaacaaaaaaaccaagacattattaagaccagagaggagccggttcgatacatccattctgcctatttgcaaagactccctgggatggatgtttaatcggctggataccaactatgatctcttgctggaccagtcagaattaagatctatatacttagacaaaaatgaacagtgtacaaaggcgttcttcaactcctgtgatacctacaaggatagcttaatttctaacaacgaatggtgttactgctttcagcgacaacaagaccccccctgccagaccgaactgagcaatattcagaagagacagggggtcaagaagttgttaggacagtacatcccgctgtgtgacgaggacggctactataaaccaacacagtgtcatggttctgttggacagtgttggtgtgtagatcggtacgggaatgaggttatgggctctagaataaatggcgtggcggattgcgccatcgatttcgaaattagcggcgattttgcctcaggagacttccacgagtggaccgatgacgaggacgacgaagacgacatcatgaacgacgaagatgaaatcgaggatgacgacgaggatgaaggagatgacgacgatggaggggacgatcacgacgtgtatatttag

SEQ ID NO: 248522 - RNA, 2409 nt, synthetic construct
  misc_feature 1..2409: note = Description of Artificial Sequence: Synthetic coding sequence
  source 1..2409: mol_type = other RNA
atgctcggagctcgcgcctggctggggcgcgtcttgttgctgcctcgggcaggtgctggcctcgcggcatctcggagatgtccgggcgtctggccccgaacctggcctcaccgcagtccaagccgcggcagctcttctagggacaaagaccgctccgccaccgtcagctcttctgtccctatgcccgcaggaggcaagggcagtcacccttcaagcacaccacagcgcgttcccaatcgtttaattcatgagaagtctccatacctgctacagcatgcttacaaccctgtagattggtacccctggggacaagaagctttcgacaaggcaaggaaagagaacaaacccatcttcctgtctgttggctactcaacatgtcactggtgtcatatgatggaggaggaaagtttccaaaatgaggagatcgggaggctgctgtcagaggacttcgtctcagtgaaagtggacagggaggaacgccctgatgtggacaaggtttacatgaccttcgtccaagcaacctcatctggcggcggctggcccatgaacgtatggcttacgccaaatctgcagccctttgttggaggcacctactttcccccagaagacggactgactcgggtcggattcaggacagtgctgcttcgtatacgcgagcaatggaaacagaacaagaacactctactggagaatagtcagagagtgacaacagcacttctcgcgcggagcgagatcagtgtaggtgacagacagttgcccccttctgccgcgacagtcaacaaccggtgcttccaacagctggacgagggctacgatgaagaatacggaggatttgccgaagctccaaaattcccaactccagtgatactgtccttccttttctcctactggctctcacatagactcactcaggacggatcccgagctcaacagatggctctgcacactctgaagatgatggccaacggtgggattagggaccacgttgggcagggcttccatcgatacagcactgaccgccagtggcacgtcccacattttgaaaagatgctgtatgaccaggcccagctagctgtcgcttactcgcaggcctttcaacttagcggggacgagttttactccgacgtggccaagggtattcttcagtacgttgcgcgctctctatctcatcgaagcggcggtttttactccgccgaggacgcagactctccacccgagagaggccagcgacccaaggaaggggcctattacgtgtggactgtcaaagaagtgcagcagcttctgcctgagccggtccttggggccaccgagcctctgacatctggtcaactcctcatgaaacactacggcctgacagaagctgggaatatttcgccaagccaggaccccaaaggcgaactccagggccagaacgtgcttacggtacgctacagcctcgagctcaccgcagcgcgcttcgggctcgatgtagaggctgtccgtacactgttgaacagcggtctagaaaagttgtttcaggcgagaaagcataggcctaagcctcatttggactctaaaatgctcgccgcctggaacggactgatggtgagcggatatgctgtcacaggcgcagtcctgggacaggacaggttgatcaactacgcaaccaatggggccaaattccttaaaaggcacatgtttgatgtagcatccgggcggttgatgcggacttgttataccggtccaggcggtacagttgaacactccaatcccccatgttggggatttttagaagattatgccttcgtggttagggggttgctcgacctttatgaagcctcacaggaatctgcctggctcgaatgggcactcagactgcaggacacacaagataaactgttttgggactcccagggcggagggtatttctgctcagaagccgaattaggtgcggggctgcctttacggctcaaggatgaccaggatggcgctgagccatcggccaactccgtcagcgcccataatctgctccggttgcacggcttcacaggacacaaagactggatggacaagtgcgtatgcttactcacggccttttcggagcggatgagaagagtgcctgtcgccctgcctgaaatggttcgcgctctcagcgctcagcaacaaactttgaagcagattgtgatttgtggcgatcgccaggccaaagatactaaagctctggtccagtgcgtccactccgtctatatccccaataaagtacttatcctcgcggacggtgacccctcctcattcttgtcacgccagctgcctttcctgtccacactgagaagactcgaggatcaggcaacagcctatgtttgcgaaaaccaagcctgctccgttcctattaccgatccttgcgagctgcggaagctgctccacccttag

SEQ ID NO: 248523 - RNA, 1377 nt, synthetic construct
  misc_feature 1..1377: note = Description of Artificial Sequence: Synthetic coding sequence
  source 1..1377: mol_type = other RNA
atggacgggtcccggcgagtgagagccacatctgtactccctagatatggccccccttgcctcttcaaggggcatttgtccaccaaaagtaacgccttttgtactgatagctctagccttcggctcagtactctccagttagtgaagaatcacatggccgttcactataacaagattctttctgccaaagcagcagtcgactgctccgtgcccgtaagcgtatcgacaagtattaaatacgctgatcagcaacgtcgtgaaaaactgaaaaaggaacttgcacaatgcgagaaggaatttaaacttaccaaaacagctatgagagcaaattataaaaacaattccaagtccctattcaataccctgcagaagccttccggagagccccagatagaagatgatatgctcaaggaggagatgaatggattctcaagcttcgcccgaagcctcgtccctagcagtgagcgactgcacttaagtctgcacaaatcttcaaaggtcatcactaacggcccagagaaaaacagcagttccagcccctcaagtgtagactacgctgcctccggtcccaggaaactatcaagcggggcactttacggcagaagacctagaagtactttcccaaacagccatcgcttccaactcgtgatttcaaaggccccctccggggacctcctcgataagcattccgagttgttctccaataagcagctcccctttacaccgagaactttaaaaaccgaagcgaaaagctttcttagccaatatagatactacacccccgctaagcggaagaaggacttcaccgaccaaagaatcgaagctgagacccagaccgaactgagtttcaagtccgaactgggcacggcggagactaaaaatatgacagactccgagatgaatattaagcaggccagtaattgtgtaacgtacgacgctaaggagaaaatcgctcccttgccattggaaggccacgactccacgtgggacgagatcaaggatgacgctttacagcacagctcgcctagggccatgtgccaatactccctgaaacccccctcaacccggaagatttattcggatgaagaggagctattgtacctgtcattcattgaagatgtaaccgacgaaattcttaagctcgggctgttttcgaatcggtttcttgaacgactgttcgaaagacacatcaaacagaacaaacaccttgaagaagagaagatgaggcacttactgcacgttttaaaggtcgacctgggttgcacctcagaagaaaactccttcagctccgtgaagggcgataataaccatgacatggagctaagtacacttaagatcatggagatgagcatagaggactgtcccctggacgtgtag

SEQ ID NO: 248524 - RNA, 990 nt, synthetic construct
  misc_feature 1..990: note = Description of Artificial Sequence: Synthetic coding sequence
  source 1..990: mol_type = other RNA
atggttagcaaatcacggtggaagttacttgctatgctggctttagtgctggtagtcatggtgtggtattcgatctccagggaggatagtttttactttcccatccccgaaaaaaaggagccatgtctgcagggggaagccgaaagtaaagcaagcaagctctttggtaattatagtagggaccaaccgatatttctgcgcttagaagattacttttgggtcaagaccccttcagcttatgagctgccatatggtactaagggctccgaagacctccttctccgggtgttggcgattacctcctcaagcatccctaaaaacattcaaagtttaagatgcagaaggtgcgttgtggtgggaaacggacatagactcaggaacagctctcttggcgacgctattaacaagtacgatgtcgttattcgcctgaacaatgcccctgtagctgggtacgagggggacgtgggttccaaaacaaccatgcgacttttctaccctgagagtgcccacttcgatcctaaggtggagaacaaccctgatacactacttgtcttagtggccttcaaagcaatggattttcattggatagaaactattttgtctgacaagaaacgtgttcggaaaggattttggaagcagccccccctcatatgggatgttaacccaaagcaaataagaatccttaatccctttttcatggagatcgctgcagacaagctgctctctctgccgatgcaacagccgagaaaaattaaacaaaagcctaccaccgggttactcgcgataacattagctttacatctgtgtgaccttgtccatatcgcgggctttggctaccctgacgcctacaacaaaaagcagacaattcactattacgagcagatcacactcaagtctatggccgggagcggacataacgtttctcaggaggctctggcgatcaagcggatgctggagatgggagccattaagaatctgaccagcttttag

SEQ ID NO: 248525 - RNA, 744 nt, synthetic construct
  misc_feature 1..744: note = Description of Artificial Sequence: Synthetic coding sequence
  source 1..744: mol_type = other RNA
atgttacagaacagtgctgttctgcttgtgctggttataagtgcaagcgccacacatgaagccgaacagaacgattctgtaagcccacggaaatcacgggtcgccgctcaaaatagcgccgaagtcgttagatgtctcaattccgcactacaggttggatgcggcgccttcgcttgtctagagaattccacctgcgataccgacggtatgtatgacatctgcaagagcttcctttacagcgcagccaaattcgacacccagggcaaagcttttgtgaaagaaagtctgaaatgcatcgcgaacggggtcacgtccaaggtctttctcgcaattaggagatgctccactttccagcgcatgatcgctgaggtacaggaggagtgctactccaaacttaacgtctgctcgatcgcaaagaggaacccagaagccatcacagaagtcgtccaactgcctaatcactttagcaacagatactacaatagactcgtgaggtctttgctggagtgcgacgaagatactgtaagcactattcgggattctctgatggagaagattggccccaacatggcgtccttgtttcacattctgcagactgatcactgcgcccaaactcacccaagagccgatttcaaccgtcgtaggaccaatgaacctcaaaaactgaaggttctactacgcaaccttcgaggggaagaagactctcccagccatataaagcggaccagccatgagtccgcctag

SEQ ID NO: 248526 - RNA, 537 nt, synthetic construct
  misc_feature 1..537: note = Description of Artificial Sequence: Synthetic coding sequence
  source 1..537: mol_type = other RNA
atgtacgatatctgcaaaagttttctgtacagtgctgcaaagttcgacacccagggaaaagcatttgtgaaagagagcctgaagtgcattgcgaacggagtgacaagtaaggtgtttctcgccatacgaaggtgtagtacattccagaggatgatcgccgaggtgcaggaagaatgctattctaaactgaacgtttgttcaattgcaaaacggaatccagaagcaattaccgaggtggtgcagctacctaaccacttctctaatcggtattacaatcgtctcgtgcggagcctgctcgagtgcgacgaagacaccgtgagcacaataagagacagtttaatggaaaaaattggtccgaacatggctagcctgtttcacatactccagaccgaccactgcgcacagacccacccccgcgcggacttcaatagaaggcgcaccaatgaaccccagaaacttaaagtgctactgcgaaacctgcggggcgaagaagatagcccgtctcacattaagagaacaagccatgagtctgcatag

SEQ ID NO: 248527 - RNA, 537 nt, synthetic construct
  misc_feature 1..537: note = Description of Artificial Sequence: Synthetic coding sequence
  source 1..537: mol_type = other RNA
atgtacgatatttgcaaatcatttctctattctgccgccaagtttgacacccaggggaaggcattcgtgaaagaatcactgaagtgtattgctaatggagtaacaagcaaagtgtttctcgccatacgccgctgttctaccttccaacggatgattgctgaagtgcaagaggaatgctattctaaactcaatgtgtgttctatcgccaaaagaaacccggaggccatcaccgaagtcgtgcagttgccgaatcacttctcaaataggtattataatcgactggtcaggtcactgctggagtgcgacgaagatactgttagcaccatacgagactcactgatggaaaaaattggaccgaatatggcctcactgttccatatactccagacagaccattgcgcccagacacatcctcgagctgacttcaatcgccgtaggactaacgagccccagaagctaaaagtgctactccgcaacctacggggcgaagaggactcccccagccacatcaaacgcacttcccacgaatccgcttag

SEQ ID NO: 248528 - RNA, 705 nt, synthetic construct
  misc_feature 1..705: note = Description of Artificial Sequence: Synthetic coding sequence
  source 1..705: mol_type = other RNA
atgaatcacttgcccgaagatatggaaaatgctctaaccggctcacagtcgtctcacgcttccttgagaaacatacattccatcaaccccactcagttaatggctaggatcgagtcatacgaagggcgggaaaaaaaggggatctccgatgttcgaaggaccttttgtctattcgtgactttcgatctgttattcgtaactttactttggatcatcgagctgaacgtaaacggtggtatcgaaaacacactggaaaaggaggtaatgcagtatgactactattcctcttactttgacatattcctgctggctgtgttccggtttaaagtgctcattctggcatatgccgtttgtcgacttcgccattggtgggccatcgctctgacgactgctgttacctctgctttcctgctagcgaaggtgattctgtcaaaactgttcagccagggagctttcggctatgtcctccccatcatatcctttattctggcgtggatcgagacatggttcctggactttaaggtgctgcctcaagaggccgaggaagagaaccgcctgcttatcgtacaggatgcctccgagcgcgccgcattgattcccggaggcctgagtgacgggcaattttattcaccccctgaatctgaggccgggtcagaggaggcagaagagaaacaagatagcgaaaagcctctcctcgagctctag

SEQ ID NO: 248529 - RNA, 1935 nt, synthetic construct
  misc_feature 1..1935: note = Description of Artificial Sequence: Synthetic coding sequence
  source 1..1935: mol_type = other RNA
atggacgatatcgcggatcgcatgaggatggacgcaggcgaggttacactggtgaaccacaactctgtctttaagacccacttactcccgcagaccggattccctgaggatcagctgtccctctcagaccaacagattctttcttctcgacagggccacctcgaccggtcctttacctgcagcacccgcagtgctgcctacaatccttcttactatagcgacaatccttctagcgactcctttctgggaagcggggacctaagaacatttggacagagcgcaaatgggcagtggagaaactctacaccatcttcatctagttcccttcagaagtcccgcaattccagaagcctgtacctcgaaaccaggaaaacttccagcggattgagtaactcattcgcaggcaaaagcaatcaccattgccatgtaagtgcctatgagaagtcatttcctattaaaccagtaccctccccatcatggtccgggagctgcaggcgctcgctgctaagccccaagaagacccagagaagacacgtatcaactgcagaagaaacagtccaggaagaagagcgcgagatctaccggcagctcctgcagatggtgaccggaaaacaattcaccatcgccaaacccacaactcacttcccattgcacttgtctagatgcctctcatcctcaaagaatactctgaaggatagtctgtttaaaaatggaaactcctgcgccagccagatcatcgggagtgatacgagtagttcagggtcagcctcaattctcaccaaccaggaacagctttctcatagcgtctactccctgtcttcctacaccccagacgttgccttcggttctaaggattcagggacccttcaccatccccatcatcaccactccgtaccacatcagccagataatctcgcagcgtcgaatactcaatccgaaggctcagacagtgtcatcctcttaaaggtgaaagatagccaaactccgaccccatctagcacgttctttcaggcagagctttggattaaagagctcactagcgtatacgactccagggcaagagaacgactacgccagatagaggaacagaaggcccttgccctacagctccagaaccagaggctacaggagagggaacactctgtgcacgatagcgtggagctgcacctacgggtgcccttggagaaagagattcctgtcaccgtggtgcaagagacccagaaaaaaggccataaactgaccgacagcgaggacgagtttccagagatcactgaagagatggaaaaggagatcaagaacgtgttcagaaatggcaatcaggacgaagttctgagtgaggctttccgactgaccattacccgcaaagacatacagactttgaatcacttaaattggctgaacgacgagattattaacttttatatgaacatgctcatggagcgcagcaaagagaaaggcctgcccagcgttcacgcgtttaacacattctttttcaccaagctgaagactgctggttatcaggcggtcaagagatggaccaaaaaagtggatgtcttctctgtggatattcttctggtccccatacacctgggggtgcactggtgtctcgccgtcgtcgacttccggaagaaaaatataacatactatgattctatgggcggcatcaacaatgaggcctgtcggatcctcctgcagtatctgaaacaggagagcatcgacaaaaagagaaaagagttcgatacaaacggctggcagcttttctccaaaaagagtcaggaaattcctcagcagatgaacggttcagactgtggcatgtttgcctgtaagtacgctgattgtatcaccaaggatcgacctatcaacttcactcaacagcacatgccctatttcaggaaaaggatggtatgggagattcttcaccgaaagctgctatag

SEQ ID NO: 248530 - RNA, 1281 nt, synthetic construct
  misc_feature 1..1281: note = Description of Artificial Sequence: Synthetic coding sequence
  source 1..1281: mol_type = other RNA
atggtcctctctgttcctgtaatcgcactcggcgcaaccctgggcacagcaacaagcatcctggcactctgcggcgtaacctgcctgtgtcgccacatgcaccccaaaaagggtctgctgcctcgagaccaagaccctgacctagagaaagcaaagccttcactcctgggtagtgcacagcagtttaatgtgaagaagagcaccgagcccgtgcaaccacgagcactcttaaaattccccgacatctacggcccacgcccagccgtcacagcccccgaggtgattaactatgccgattattcgttgcgctcgacggaggagcccacagcacctgcgtcaccccagcctcctaacgactcgagactgaagaggcaggtgacagaagaactgtttatattaccacagaatggagttgtagaagatgtatgtgtgatggaaacgtggaatccagagaaggctgcctcatggaatcaggcccccaaattgcattattgcctcgattatgactgccagaaggcagagttgttcgttactcgattagaggctgtgacatccaaccacgacggcgggtgtgactgttacgtgcaaggctccgttgctaaccgcaccgggtccgtggaggctcagactgcactgaaaaaacggcaactccatacaacctgggaagaaggattagtgctgccactcgcagaggaagagctgcccacagctaccctgactctgacactgcgtacctgtgaccgcttttcccgtcactctgtcgccggcgaactgaggctgggcttagacggaacatcagtgcctctaggggctgcccagtggggcgagctgaagaccagcgccaaggagccgagtgcaggagccggagaggttctgctttctatctcatatctgccagccgccaatagactactggtggtgctgataaaagccaaaaatctgcatagtaaccaatcaaaggaactccttggcaaagatgtgtctgtgaaggtgacattgaaacaccaggccaggaagcttaaaaaaaaacagaccaaacgtgcaaagcataaaattaatccagtctggaacgagatgatcatgtttgagttaccagatgacctgctgcaagcctcctcagttgagcttgaagttctaggtcaggatgattccggccagtcgtgtgccctgggacactgctccctcggtctgcatacctccggctcagagcgatcccactgggaggaaatgctgaagaaccctcgccgtcagattgccatgtggcatcagttacatctttag

SEQ ID NO: 248531 - RNA, 234 nt, synthetic construct
  misc_feature 1..234: note = Description of Artificial Sequence: Synthetic coding sequence
  source 1..234: mol_type = other RNA
atgagcgtcgctttcgttccagattggctgaggggcaaagctgaagtgaaccaagagacaattcaacgtctactagaagagaacgaccagttaattcgttgcattgtggagtaccagaacaaggggaggggtaatgaatgtgttcagtaccagcatgttttacaccgcaatctgatttatttggccacaattgccgatgcatcacccacctccacatctaaggccatggaatag

SEQ ID NO: 248532 - RNA, 366 nt, synthetic construct
  misc_feature 1..366: note = Description of Artificial Sequence: Synthetic coding sequence
  source 1..366: mol_type = other RNA
atgagaattatgctgctattcactgctatcctcgccttctctctggcccagtcattcggggcggtatgcaaagaacctcaggaagaggtagttccgggtggcggaaggtccaaaagagatcctgacctataccaattacttcaacgactgtttaaatcacactccagcctcgagggactcttgaaggcgctgtcacaggcttccacagaccccaaggaatctaccagcccagaaaaacgcgacatgcacgatttcttcgtcggccttatgggcaaaagaagcgttcaacctgatagccctacggacgtcaaccaggagaacgtgccaagcttcggaatcctgaaataccctccacgagctgagtag

SEQ ID NO: 248533 - RNA, 366 nt, synthetic construct
  misc_feature 1..366: note = Description of Artificial Sequence: Synthetic coding sequence
  source 1..366: mol_type = other RNA
atgcgaattatgctactatttacagccatcctagccttctcactcgctcaaagctttggtgccgtatgtaaagagcctcaggaggaggtcgtgcccggaggcggccgatccaaaagagatcccgacctctatcaattgctacaaagactgttcaaatcacactctagtctggaggggctcctgaaagctcttagtcaggctagcactgaccctaaggagtcgacctcacctgaaaaacgcgacatgcacgacttctttgtgggcctcatgggcaagagatctgtacagccagacagtcctaccgatgtgaatcaagaaaacgtccctagcttcggtatccttaaatatcctccaagagctgaatag

SEQ ID NO: 248534 - RNA, 312 nt, synthetic construct
  misc_feature 1..312: note = Description of Artificial Sequence: Synthetic coding sequence
  source 1..312: mol_type = other RNA
atgcggatcatgctactattcacggccatcttggcattctcactggcacaatctttcggcgccgtgtgtaaagaacctcaagaggaggtggtacctggcggcggacgttccaagagagaccccgacctttatcagctcctacaaaggctctttaagtcccatagctcgctagaaggcctactcaaagcattgtcacaggcttctaccgaccctaaggaatcaacctctcccgagaagcattctccaaccgacgtcaatcaagaaaacgtgccctcgtttggaatattgaagtaccctccgagagctgaatag

SEQ ID NO: 248535 - RNA, 366 nt, synthetic construct
  misc_feature 1..366: note = Description of Artificial Sequence: Synthetic coding sequence
  source 1..366: mol_type = other RNA
atgcggataatgttgctgtttacagccatcctggccttttccttggcacagtcattcggagctgtctgtaaagaacctcaagaggaggtggtccctggcggtggaaggagtaaacgcgatccggacctttaccaattgctgcaacggctgtttaagagtcactcaagtctggaaggactgctgaaggcattgtcacaggcatccactgaccccaaagagagcacaagccccgaaaagagggatatgcacgatttttttgttggcctcatgggtaaaaggtccgtccaaccagactcacctacggatgtgaaccaggaaaatgttccctcctttggaatcttgaagtacccccctcgcgcggagtag

SEQ ID NO: 248536 - RNA, 4866 nt, synthetic construct
  misc_feature 1..4866: note = Description of Artificial Sequence: Synthetic coding sequence
  source 1..4866: mol_type = other RNA
atggagtgggtgttggccgaagcgctgctctcgcagagtcgtgatccaagagccctattgggagctctctgtcaaggcgaagcatctgccgagcgcgttgagactctgcgttttctgctgcagagattagaagatgaagaggccaggggatcaggaggtgccggagccctaccggaggccgcaagagaggttgccgccggctatctggttcctctgttgcgctcactgcgggggaggccagcgggcggccccgaccccagcctccagccacgccatagacggagggtattaagagctgctggcgcagcgctgcggtcctgtgtgcgactggcgggccgcccacagttggccgcagcattagctgaggaagcattgcgcgatctgctggctggttggagagctcctggcgcagaggctgcagttgaggtactggccgcggttggaccgtgtctgcgcccacgtgaggacgggcccctgcttgaaagagtggccggaacagccgtggcactggccctgggaggcggtggtgacggcgacgaggccggcccagccgaagacgctgccgccctggtggccggacgcctactgccagttctcgttcagtgtggcggcgcagcgctgcgagccgtgtggggcggactggctgccccaggcgcttctctgggctccggtagagtagaggaaaagctactggttttgagtgcgttggcagagaaacttctgcccgagcccggcggtgatagggccaggggtgctagggaagctggcccagacgctaggagatgttggagattttggcggactgttcaagccggcctcggccaggctgatgccctaacgagaaagagggcacggtacctgttacagagggcagtcgaggtgagcgctgaactgggagctgattgtacttgcggccctcaagaaggcaacggacccagcctcttttggtggtccgaacggaaaaaggacgaactcctgaaattctgggagaattacatactcatcatggagacactcgagggaaatcagatccacgtgatcaagcccgtgcttccaaagctgaacaaccttttcgaatacgcggtaagtgaagagaacggatgctggctcttccatccaagctggcatatgtgcatatataaacgaatgttcgagagcgagaacaaaattctatctaaggagggagtcattcactttcttgaactatatgaaacaaaaatcttgcccttcagccccgaattttcagaattcattatcgggccgctgatggacgctctttcagaaagctcactatactctagatctcccggacagccaattggctcctgctccccactggggctgaaattgcagaaatttctggtcacttacatcagcctcttgccggaggaaattaagtcttctttcctgctgaaattcattagaaagatgacctccagacattggtgcgcggtacccattctgttcctcagcaaggctctggcaaacgtgccaaggcacaaagctctcgggatcgacgggctccttgcgcttagagatgtgatacactgtaccatgatcacgcaccaaattctgctccgcggggccgctcaatgttacctgttacagaccgcgatgaatctactggacgttgaaaaggttagtctctccgacgtgtctaccttcctgatgagcctcagacaagaggagtcactggggaggggaacttccctgtggaccgaactctgcgattggctgagggtgaatgagtcgtattttaaaccctccccgacctgctcctcaatcggtctccacaaaacatctctcaacgcctacgtgaaatccatcgtccaggagtacgtgaaatcttctgcttgggagacaggcgagaattgcttcatgcccgactggtttgaagctaaattagtgtctctgatggttcttctggcagtcgacgtggaggggatgaagacccagtatagcggaaaacagcgcactgaaaacgtcctcagaatatttctcgacccgctgctggacgtgttaatgaaattttccactaacgcttacatgcctctgttgaagaccgacaggtgcctgcagctcctgcttaagttattgaatacatgtcgattaaaagggagtagcgctcaggacgacgaggtaagcactgtgctgcagaatttcttcatgtccactactgagtccatctctgagtttatcctgcgccgtctgaccatgaacgaattaaatagcgtgagtgacttagatcgctgtcatctttacctgatggtgttgaccgaattgataaacctccacctcaaggtaggctggaaaagaggaaaccctatctggagagtgattagcctgctgaagaacgctagtattcaacatcttcaggagatggattctggccaagagcccacagtgggatcccaaatacaaagggtcgtgtctatggccgcactcgccatggtgtgtgaagccatcgaccagaagcctgagctgcagctggattctctgcacgcggggcccctggaaagttttctctcatctttacagctgaatcagacactgcagaaacctcatgccgaagagcagtccagttatgcgcatccactggaatgtagcagcgtgctggaagaatcatcatcttcacaggggtggggaaaaatcgtggcccagtacattcatgatcagtgggtttgtctgtcttttttgctgaaaaagtaccacaccctgatccccacaacagggagtgaaatcctggagccattccttccggcagtgcagatgccaattcgaacactgcagtcagcgctggaggccctgacagtgctgtcatctgaccaagtgcttcctgttttccactgcctgaaagtgctggtccctaaactgctgacctcaagtgaaagcctttgtatcgagtcttttgacatggcatggaaaattatctcttctctgagcaatactcagcttatcttttgggccaacctcaaggcctttgtacaattcgttttcgacaacaaggtgcttacgattgctgcaaagattaaaggccaagcatatttcaaaatcaaagaaattatgtataagatcattgagatgtccgccatcaaaaccggggtatttaacacgctgatcagttattgctgtcagtcatggatcgtgagcgcctcaaacgtgagccagggtagcttatcgtcagctaaaaattattctgaattgatacttgaggcttgtatcttcgggaccgtctttcgaagggaccagaggctggtacaggacgtccagacgtttatcgaaaacctgggccacgactgcgctgcaaatattgtgatggagaacactaagagagaggatcactatgttcgcatctgcgcagtgaaatttctgtgtctgctcgatggaagtaatatgagccataagctgtttattgaagatctggcaataaagctattggataaagacgagcttgtaagcaaatcaaaaaaaagatactatgtcaattccctgcaacacagggttaaaaatagagtgtggcaaacattactcgtcttgttccctcggctggaccaaaatttcctcaatggaatcattgacagaattttccaagccgggtttacaaacaaccaggcctcaattaaatacttcattgaatggattattattctcatcctgcacaagttccctcagttcctgccgaagttctgggactgtttctcctacggagaagagaacctaaaaacatcaatctgcaccttcctagccgtcttaagtcatctagacataattacacagaatatccctgagaagaaacttatacttaagcaagccctcatcgtcgtgttgcagtggtgctttaatcacaattttagcgttaggctctatgctctggtagcgctgaagaaactgtggacagtctgtaaggtcctgtcagtggaagaattcgatgcgctcactcctgtgatagagtccagcctacatcaagttgaaagcatgcacggagccggcaatgcgaaaaagaattggcaacgtatacaagagcacttcttctttgccacatttcaccccctaaaagactattgcctggagaccattttctacatactgccccgcctgtctggactcattgaggacgaatggattaccattgacaaatttacccgattcactgatgttcctctcgcagccggcttccaatggtatttgtcccagacccaactctctaagctgaaacccggcgactggtctcaacaggatataggaaccaatctggtagaggcggacaaccaagctgaatggaccgacgtgcagaagaaaatcataccatggaatagtcgcgtatccgatctcgatttggagttgctctttcaggatcgggccgcaaggctcggaaaatcaattagcaggctgatcgtggttgcttctctaattgacaagcccacaaatctaggcggcctctgcaggacgtgcgaggtgttcggagctagcgtgctggtggtgggttcgctgcagtgcatatcagacaaacaatttcaacatttgtcagtgtcggcagagcaatggctacccctagtggaagtcaagccaccccagcttattgactatctccagcagaagaaaaccgaggggtacactataatcggggtcgagcagacggccaagtctctagacttaacgcagtactgcttccctgaaaagtcgttactcctcctcgggaatgaaagggagggcatacctgcaaatttgatccagcagctggacgtctgcgtcgaaatacctcagcaagggatcatccgttctttgaatgtgcatgtcagtggtgctctcctcatttgggaatacactagacagcagttactatcgcatggggatacaaagccttag

SEQ ID NO: 248537 - RNA, 759 nt, synthetic construct
  misc_feature 1..759: note = Description of Artificial Sequence: Synthetic coding sequence
  source 1..759: mol_type = other RNA
atgggtgttcttttgacacagcgcacactgctttccctcgttctcgccctgcttttccccagtatggccagtatggctgccatagggtcttgttcaaaggagtatcgcgtgttgctcggtcagttacagaagcagaccgacctcatgcaggacacaagcagattactagacccatacatccgcattcagggactcgacgtgcccaaactgcgggagcattgtcgcgaaaggcccggcgcttttcctagtgaggaaacactgcgggggctgggacgacgcggattcctccagacattgaatgctactctcggctgcgttctgcatcgcttggctgatttagaacagaggttgccgaaggcacaggacctggagagaagcggtctcaatatcgaagatttggagaagctccagatggctcgccccaatattctgggactaaggaataacatttactgcatggcccagttactggataattctgataccgccgagcctacgaaagccggtagaggagcctctcagccaccaacccctactcctgcatcagacgctttccagcgaaaactcgagggctgccgctttctgcacggatatcacagattcatgcattccgtggggagggtattttctaagtggggtgaatcacccaatcggtcgaggagacattcgccccaccaagcacttcgcaaaggcgtgagacggactagacccagtagaaaaggaaagagactgatgaccaggggccagctgccccgttag

SEQ ID NO: 248538 - RNA, 2049 nt, synthetic construct
  misc_feature 1..2049: note = Description of Artificial Sequence: Synthetic coding sequence
  source 1..2049: mol_type = other RNA
atgtgccccgggctatacccgtactccagtctacttgaatatgggcggtccatgatcatttacgaacaggaaggcgtctacatccatagtagttgtggtaagactaacgaccaagacggacttatctccgggatcctgagagtgctggagaaagatgcggaagtgatcgtagactggaggccgcttgacgatgctcttgactcttccagcattttatatgccagaaaggacagctcctccgtcgtagaatggactcaggcccccaaagagcgaggacaccgaggttctgaacacctaaactcatatgaagcggaatgggacatggtgaatactgtatcattcaagcgaaagcctcatacaaacggggatgcgcctagtcaccgcaacggtaagtccaagtggagctttctgttttctttgactgacctgaaaagtatcaaacaaaacaaggagggcatgggatggtcttacctcgttttctgtctgaaggacgacgtggtgctgcccgccttgcacttccaccaaggtgactctaagttgctgatcgaatccctcgaaaagtatgtcgtcctgtgtgagtcaccccaggacaagagaacattgctggtcaattgccagaacaaaagcctgagtcagagttttgaaaatctgctggacgaacctgcctatgggctgattcaaaagatcaagaaggatccctacactgcaaccatgatcggtttctctaaggtcacaaactacattttcgattctttaagaggctccgatccttctacccatcagagaccacccagtgaaatggctgacttcctttcagatgctatacccggcctgaagataaaccagcaggaagaacccggattcgaggtcattactcgcatagacttgggcgagcgtcctgtggtgcagagaagggaacctgtatccttggaagaatggacaaaaaatatcgactcagagggtagaattttaaacgttgataacatgaaacaaatgatcttccgcggcggcctgtctcatgcgctgcgcaaacaggcttggaaattcctgttgggctacttcccttgggattcaaccaaagaggagcgcacacaactgcagaaacagaagacagacgaatacttccgtatgaagctgcagtggaagagcatctcacaggaacaagagaaaagaaatagcaggctgagagattacagaagcttgatcgagaaggacgtaaataggaccgatagaaccaataaattctatgaggggcaggacaaccctgggctgattttactccatgatatcctgatgacatactgtatgtatgacttcgatcttggctatgtgcaggggatgtcagatctcctttctcctctgctgtacgtaatggagaacgaggtggacgccttttggtgctttgcctcatatatggatcagatgcatcaaaattttgaggaacagatgcagggaatgaagactcagctgatccagctatcaacactgcttcgcttactagacagtggattctgctcttacctcgagtctcaagatagtgggtacctctacttttgctttaggtggctcctcatacgcttcaagcgtgagttctccttccttgacatacttaggctctgggaggtgatgtggaccgagcttccttgcactaattttcacttgctgctctgttgcgccattctggaatctgagaaacagcaaattatggaaaaacactacgggttcaatgagatactcaaacatatcaacgaactgagcatgaagatcgatgtcgaggacatcctatgcaaggctgaggctatctcccttcagatggtgaaatgcaaagaactgccccaagccgtgtgtgaaattctcggactgcaggggagcgaagtgactactcccgactcagatgtgggcgaggatgaaaacgttgttatgaccccatgcccaacgtctgctttccagtccaatgcccttccgacactgtccgcctctggggcccgaaatgactcaccaacacagattcccgtgtcttctgatgtgtgtagactgactcccgcctag

SEQ ID NO: 248539 - RNA, 1338 nt, synthetic construct
  misc_feature 1..1338: note = Description of Artificial Sequence: Synthetic coding sequence
  source 1..1338: mol_type = other RNA
atgatcggcttctccaaggtaacaaattatattttcgatagccttagaggaagtgaccctagtacacatcaaaggccaccaagcgagatggccgattttctgtctgatgccattcctggccttaaaatcaaccaacaggaagaaccaggatttgaggtgattactcgcatcgatctgggtgagagacccgtcgttcagagaagagaacctgtgtcccttgaagaatggactaagaacattgacagcgagggtcgaattctgaacgtggacaacatgaagcagatgatttttcgaggcgggttatctcatgccttacggaaacaagcatggaaatttttgctcggttattttccatgggacagtaccaaggaagagagaactcagctacagaaacagaaaaccgacgagtactttcgaatgaaactgcagtggaagagcattagccaagaacaggaaaaacgaaattcacgattacgtgactacagaagtctgattgaaaaggatgtaaatcgcacagatagaaccaataagttttatgagggacaggacaatcctggcctgatcctccttcacgacatcctgatgacttactgtatgtacgactttgatctggggtacgtccagggtatgagcgacctcttgtcacccttattatacgtgatggaaaatgaggtggacgcattttggtgcttcgcttcctacatggatcaaatgcaccagaattttgaggagcaaatgcaaggcatgaaaacccagctcatccagcttagcacactgctccgtctactggactcaggcttctgctcatatttagagtctcaggacagcggttacctgtatttctgctttagatggctgctgattcgttttaaacgcgagttcagttttctggacattctgagactatgggaagtaatgtggacagagctcccttgcaccaactttcacctgcttctgtgttgcgccatcctggaatcagagaagcagcagatcatggagaagcactacggattcaacgagatattgaaacacatcaacgagttaagtatgaagattgacgtcgaggacatactatgcaaggcagaagcaatctctctgcagatggtcaagtgcaaagaactacctcaggctgtttgcgaaattcttggactgcagggatccgaggtgactacccccgattctgacgtgggcgaagatgaaaatgttgtgatgaccccatgtccaacaagcgcatttcagtcaaatgcactgccgacactttccgctagcggggcacgcaacgactctccgacccagattcctgtgagctctgacgtctgtagattgacccctgcctag

SEQ ID NO: 248540 - RNA, 2025 nt, synthetic construct
  misc_feature 1..2025: note = Description of Artificial Sequence: Synthetic coding sequence
  source 1..2025: mol_type = other RNA
atggcagctgcaggcgtggtttcaggtaagatcatctacgagcaggaaggcgtgtacatccatagctcatgcggaaaaaccaatgatcaagacggcctcatatctggaatcctgcgagtgttagagaaggacgcagaggttatcgtggactggcggcccctggacgacgcgctggactcatcatcaattctctatgcccgtaaagacagttcctccgtggtagagtggactcaggcgcccaaggagagaggtcatagaggctcagaacaccttaacagttatgaggctgagtgggatatggtaaacacagtgtccttcaagcgaaagccccacaccaacggagatgcgccatcacacagaaatggcaagagcaagtggagcttcctgttttctttgacagatctgaagagcattaagcagaacaaggaagggatgggatggtcttatttggtgttttgcttaaaagatgatgtggtcctgcccgccctgcattttcatcagggcgattctaaactcctcatcgaaagcctggaaaagtacgttgtactgtgtgaatccccacaagacaagagaacactgctggtaaattgtcagaataaatctctgagccaatcatttgagaacctgcttgacgagcctgcatatggccttattcaaaagattaaaaaagatccttataccgcaacaatgataggcttctcaaaagtgaccaactatatttttgacagtctaagaggatccgacccatccacccatcagcgcccaccgtctgagatggccgacttcctgagtgatgccattcccggccttaagattaaccaacaagaagaaccaggatttgaagtgataacgaggattgatctcggagaaaggccggtcgtccagcgcagggaaccagtgtcgctggaagagtggacaaagaacattgactcagaggggcgcatcctgaacgtggataacatgaagcaaatgatttttagagggggccttagccacgccctaagaaaacaagcctggaagttcctgctggggtactttccatgggatagtaccaaggaagagcgcactcagctgcaaaaacagaaaaccgacgagtactttaggatgaagttgcagtggaaaagtatctcgcaagagcaggaaaaacggaattcaaggttaagggattatcgatctctcatagaaaaagacgtaaaccgcactgacagaaccaataagttctacgaaggtcaggacaatcctggcttaattcttctccacgacattctgatgacttactgcatgtacgattttgatctgggatacgtccaaggaatgagcgatttgttatcccctctattgtatgttatggagaatgaggtggacgccttttggtgcttcgcctcctatatggatcagatgcaccagaactttgaggagcagatgcagggcatgaaaacccaattaatccagctcagtacccttctgcgacttctggatagtgggttttgttcatatctcgagtctcaagatagcggttacctctacttctgcttccggtggttgcttatcaggttcaaaagagaattttcatttctggatatcctaaggctgtgggaggtcatgtggacagaacttccctgcaccaactttcatctgctgctctgctgtgcaatccttgagagcgaaaaacaacagataatggagaagcactacggttttaacgagattctgaagcacatcaatgaactgtcaatgaagatcgatgttgaagacatcctgtgtaaggccgaggctatttccctccaaatggtaaaatgtaaagaactgccccaggcagtgtgtgagatcttagggctgcagggttcagaagtaaccacacctgactccgatgtgggagaagatgaaaatgtcgttatgacaccctgcccaacgagcgcctttcagtccaatgcgctccccactctctccgccagtggggccaggaacgattcaccaacacagataccagtctcttccgatgtgtgtaggctgaccccagcatag

SEQ ID NO: 248541 - RNA, 2076 nt, synthetic construct
  misc_feature 1..2076: note = Description of Artificial Sequence: Synthetic coding sequence
  source 1..2076: mol_type = other RNA
atggcagccgcgggagtggtcagcgggaaaattatctatgagcaggagggggtatatatccactccagttgcggtaagacaaacgaccaggatggacttattagtgggatcctgagggttcttgaaaaagatgcagaggtaattgtggattggcgccctcttgacgatgcgcttgatagctccagcatcctatacgcgcgaaaagatagcagctccgtggtagaatggacacaggcacccaaggagagggggcacagagggtcagaacatctcaattcatacgaagcagaatgggatatggtgaacactgtgtcttttaaaaggaaaccccatacgaacggcgacgcaccctctcaccgcaatggcaaatccaaatggtctttcttattctctctgaccgacctaaagtccatcaagcagaacaaggaggggatgggatggtcttacctggtcttctgcctgaaagatgacgtagtgttgccagcactccacttccatcagggagattctaagctgttgattgaatcactcgaaaagtacgtcgtgttatgtgagtcgccccaggacaagaggacccttctcgtcaattgtcaaaataaaagcctaagccagtcatttgagaatctactggacgaacccgcgtatggcctgattcaagctggcctgttagaccggcggaagttgctgtgggctatccaccactggaaaaagatcaaaaaggacccttacaccgcaaccatgatcgggttttctaaagtgactaactacatcttcgattcattacgcgggtctgatccaagcacacaccagagacccccttcagagatggcggattttctgtccgacgcaatccctggactgaaaataaatcaacaggaggagccgggtttcgaggtgatcaccaggatcgatttaggggagcggccagtcgtccagagacgggaacccgtctctctcgaagagtggactaagaacatcgactccgagggccgaatactaaatgtggataatatgaagcagatgatatttcgcgggggactgtctcatgcactgagaaagcaagcctggaaatttttattaggatattttccctgggattcaactaaggaagagaggactcagctgcagaagcaaaagacagatgagtactttaggatgaagctacaatggaagagtataagccaagaacaggaaaagcgcaactctaggcttcgtgattataggtctctgatagaaaaagatgtaaataggactgaccggacaaataaattctacgagggccaggacaaccctggcttaatcttactgcatgacattctgatgacttactgcatgtacgacttcgacctgggatatgtacagggaatgtccgacctcttgtcacctctattgtacgtgatggagaacgaagtggatgccttttggtgttttgccagctacatggaccagatgcaccaaaactttgaggagcagatgcagggaatgaagactcaactgatccagctgagcaccctcctgaggctcttagacagtggcttttgcagctacctggagagccaggactcagggtacttatacttctgctttcgctggctgttaatccgatttaagagggaattctctttcctagatatcttgagactctgggaggtaatgtggactgaacttccttgtacaaatttccacttgctcttatgttgcgccatcttggagtctgagaaacaacagatcatggagaaacactatggatttaatgagatactcaagcacatcaacgaattgagtatgaaaattgacgttgaggatatcctctgtaaagctgaggctatatctctgcaaatggtgaagtgcaaggagctcccgcaggctgtctgtgagattctgggactgcagggcagtgaagttactactcccgattccgacgtgggcgaagacgaaaatgttgtgatgaccccatgcccaacatctgcatttcagtccaatgccctcccaaccctgtctgcctccggcgcgaggaatgactctcccacccagatcccggtgagctccgatgtgtgcagactgaccccagcatag

SEQ ID NO: 248542 - RNA, 5514 nt, synthetic construct
  misc_feature 1..5514: note = Description of Artificial Sequence: Synthetic coding sequence
  source 1..5514: mol_type = other RNA
atgggagcgatgacccagctgctggcgggtgtgtttctggctttcctggctctggctaccgagggtggcgtgcttaaaaaagtgatccgccataagagacagtccggtgtcaacgctacattgcccgaggaaaaccagcccgtggttttcaaccacgtgtacaacatcaaactgccagtgggctctcagtgctcagtggacctcgaatccgctagtggcgagaaggatctcgcgcctccgagcgagcctagcgagagtttccaggaacacactgtagacggcgaaaaccagattgtctttacgcaccgcatcaacattcccagacgagcatgcgggtgcgccgcagctccagacgttaaggaattgctcagtcgccttgaggaactggaaaacctggtgagcagcctgagagaacagtgtactgctggtgctgggtgctgtctgcagccggcaacgggaagattagatacccgtcctttctgttctggcagaggaaacttctcaaccgaaggatgtggatgcgtctgcgagcctgggtggaaaggcccaaattgttccgagcctgaatgcccagggaattgccatttacgggggcggtgtatcgacggacagtgcatctgcgatgacgggttcacaggcgaggattgctcccagctcgcttgtcccagcgattgtaacgatcagggaaaatgcgtaaacggcgtgtgcatttgctttgaaggttacgccggagctgactgctcccgcgaaatatgtccggtgccctgtagcgaagagcatggcacttgcgtggacgggctgtgcgtctgtcacgacggattcgctggtgatgactgcaacaagccactgtgcctcaataattgctacaaccgggggagatgtgtggagaacgaatgcgtctgtgacgaaggtttcactggtgaggattgttcggaactgatttgtccaaatgactgtttcgatcggggaaggtgcatcaacggaacatgttattgtgaagaggggttcacaggcgaggactgtggcaagccaacttgtccgcacgcgtgtcatacacagggacgctgtgaagagggacaatgcgtttgcgacgagggtttcgccggcgttgactgttctgagaagcggtgccccgctgactgccacaaccgggggcggtgtgtcgatggacggtgtgaatgcgacgacggctttaccggagcagactgtggagagctcaagtgccctaacggatgttccggacatgggcgctgcgtcaacggccagtgcgtgtgtgatgaggggtacacaggtgaagattgtagtcaattgcggtgtccgaacgattgccactcaagaggacgctgcgtggagggaaagtgcgtgtgcgagcaaggatttaaggggtacgattgttccgacatgtcatgtcccaatgactgccaccagcacggtaggtgtgtgaacggcatgtgcgtgtgcgatgacggctacaccggcgaggattgccgcgatagacagtgtcctcgtgattgctctaatcggggcctctgtgtggatggccagtgtgtttgtgaagacggctttacagggcccgactgcgcggagttaagctgcccaaatgattgccacggccaggggagatgcgtgaatggccagtgcgtgtgccacgaggggtttatggggaaggactgtaaagaacagagatgtcccagcgattgtcacggccaaggccggtgtgtggacggccaatgtatttgccacgaaggctttacgggactcgactgcgggcaacattcctgcccatcagactgcaacaatctcggacagtgcgtctcagggcgctgtatttgcaatgaggggtacagtggggaggattgttctgaagtatcgccccccaaggatctagtggtgaccgaagttacggaagagacggttaacctcgcatgggataatgaaatgagggtgaccgagtacctggtggtttacacccccactcatgaaggggggctggagatgcaattccgagtccccggcgaccagaccagcacaatcatccaggaattagaacctggcgttgagtatttcatccgcgtgttcgccatacttgagaacaaaaagtctatcccagtttctgccagggtggccacttacctgccagcccctgagggcctgaagtttaagtcaatcaaagagacttccgtcgaagtggaatgggatcccctcgatattgcctttgagacgtgggaaataatatttagaaatatgaacaaggaagatgagggagagatcacaaagtccctcaggcggccagagacatcttaccggcagacaggcctggctcccggacaagaatacgagatttccctacacatagtgaagaacaacacacgtggacccggtctcaagcgcgttaccacaacaaggctcgacgcccccagccaaatcgaggtgaaagacgtgaccgatactaccgcactgatcacatggtttaagcccctcgccgagatcgacggcatcgaactcacctatggcatcaaggacgtgccaggtgaccgcactaccattgacctgacagaagatgaaaatcagtatagcattggcaacctgaagcccgacaccgaatacgaggtaagtttgatatccagaaggggggatatgtcatctaaccctgccaaggaaaccttcaccaccgggctcgacgccccacgtaacctccgaagagtctcccagactgataatagtattacattggaatggagaaatggaaaagctgccattgacagctacagaataaaatatgctcctataagtggaggggaccacgcagaagtggacgtgccaaagagccaacaagccacgaccaagaccacccttaccggcttgcggcccggaaccgaatacggaataggtgtgagcgcagtgaaggaagataaagaatcaaatccagctactatcaatgcagctactgagctagacacccctaaggacctccaagtcagcgagacagctgagacctccctgacattactatggaaaaccccacttgcgaaattcgaccgttacaggctcaattatagtctaccaaccggccagtgggtgggagtccagctccctagaaatactacatcatatgtcctgcgcggcttagaacctggccaggagtataacgtcctgcttacagccgaaaagggccggcacaagtccaagcctgcaagagtgaaagcaagtactgcaaaagaacccgaaatcggaaacctgaatgtgtcggacataacaccggagtcctttaatctctcttggatggctaccgacggcatatttgagacatttaccatcgaaatcatagattccaaccgactgcttgagaccgttgaatataacatcagtggggccgaaagaacggcgcacatatccggtctcccacccagcactgatttcatcgtttacctgagtggcctagctcctagtatacggactaagactatcagcgcaacagcgaccactgaagctctccctctcttagaaaatttaaccataagcgatatcaatccttacgggttcaccgtgagctggatggcttctgaaaacgcctttgatagttttctggtgacagtcgtcgactctggtaaactgctcgacccccaggagtttacattgtctgggacccaaagaaaattggaactgagaggcttgattaccggcatcgggtacgaggttatggtgtcaggatttacccagggccatcagactaagcccctgagagcagagatcgtgacagaagctgaacctgaagtagataatctcctggtcagcgatgcgacgccggatggatttcggttgtcttggacagccgatgagggcgtgttcgataatttcgtgctgaagatacgcgacaccaaaaagcagtcggagccattggagattactttactcgctccggaacggacaagggatataaccggactaagggaagctacagagtacgaaatcgaactgtacggaatctctaagggccggaggtcacagactgttagtgcaatcgccaccaccgccatgggctcaccgaaggaggtcatattcagtgatattaccgagaatagtgccactgtgtcctggagggcaccgactgctcaggtggaaagcttccgaatcacctatgtgcctattacgggggggacaccttctatggttactgtggacggcaccaagacacagactaggctggtgaaattgatccctggagtggagtacctggtatccatcatagccatgaagggttttgaagaaagcgagcccgtgagtggctcgttcacaacagctctggatggcccatccgggttagtcacagcaaacattacagatagcgaagccctggcccggtggcagccagctattgccactgtcgattcatacgttatctcctatacaggcgagaaagtacccgaaatcactagaacggtgagtggtaacactgtagaatacgcgcttactgacctggaacccgccactgagtacactttaaggatattcgctgaaaaagggccgcagaagagctccaccatcacagctaaattcaccaccgatttagattctcctcgtgatctcaccgcgaccgaggttcagtccgaaactgcactattgacgtggcggcctccccgggcatcagtgaccggatatctgctcgtgtatgaatccgtcgatggcacggtcaaggaggtgatagtaggccctgatacaacatcctatagcctcgccgatctgtccccatctacacattacaccgctaaaattcaggctctaaatggcccattaaggagcaatatgattcagaccatttttaccaccatcggactcttgtatccttttcctaaggactgttcacaagccatgctgaacggtgacactacctcggggctgtacacaatctatttgaatggagataaggccgaggctttggaggtgttttgcgatatgacttccgatggcggcggctggatcgtgttcttaagaaggaaaaacggaagagagaatttctatcaaaattggaaagcctatgccgcaggattcggcgatcgaagagaggagttctggttgggcctcgataatctgaataaaattacagcccagggacagtacgaattgagagttgacttgcgtgaccatggggagaccgcttttgcagtgtacgacaaatttagcgtaggcgacgcaaaaacccgttataaactgaaagtggagggatattccggcacagccggcgacagtatggcctatcataatggcagatcgttcagtacctttgacaaagacactgactccgccattacgaactgtgcgctttcctacaaaggagccttctggtaccgaaactgtcaccgtgtgaaccttatgggcagatatggtgacaataaccacagccagggcgtcaactggttccactggaaagggcatgaacatagcattcagttcgcagaaatgaagttaagaccgtcgaacttccgcaaccttgaaggtaggaggaaacgcgcgtag

SEQ ID NO: 248543 - RNA, 4695 nt, synthetic construct
  misc_feature 1..4695: note = Description of Artificial Sequence: Synthetic coding sequence
  source 1..4695: mol_type = other RNA
atgggggctatgacccagctcctggcaggtgtttttctcgcgtttttagcgttagcaaccgagggaggagtgctcaaaaaggtcatccggcataagcggcagagcggcgttaatgcaacattgcccgaggaaaatcagcccgtggtcttcaatcatgtgtacaacattaaactgccagtgggatcacagtgctctgttgatcttgagagcgctagtggggagaaggacttagctccgccctctgagcccagcgagagcttccaggaacacaccgttgatggcgagaaccaaattgtgttcactcaccgaataaatatcccccgtcgggcgtgcggatgtgccgcggcacctgatgtgaaggaactactgtcccgtcttgaagagctcgagaacctggtgagctctctccgcgagcagtgcactgccggggccggatgctgtcttcagcctgccacggggagactggacacgcgaccattctgctcaggccggggtaattttagcactgaaggatgcgggtgcgtttgcgagccaggctggaaggggcctaattgctccgaacccgaatgccccggcaactgtcacctcagagggagatgtatcgacggccagtgcatctgcgacgacggtttcaccggagaagattgttcccaactagcatgtccaagcgactgtaatgatcagggcaagtgcgttaatggagtctgtatctgtttcgaaggctatgctggcgccgactgtagccgcgagatctgtcctgtgccatgtagcgaggagcatggcacttgcgtcgatggattgtgcgtgtgtcatgacggatttgcaggggatgattgtaataaacctctctgcttaaataactgttacaatagggggagatgtgtggaaaatgagtgcgtttgtgacgagggttttactggggaggattgctccgaactcatctgtcctaacgattgcttcgaccggggaagatgcattaacggcacatgctattgtgaagagggatttacaggcgaagattgcggcaagcccacctgcccgcatgcttgccatactcagggccgctgcgaagaaggtcagtgtgtgtgtgatgagggtttcgccggagtagattgcagcgagaagcgctgccctgccgattgtcacaacaggggcagatgcgtggatggaagatgcgaatgcgacgatggtttcacgggcgcagactgtggcgagctgaaatgtccaaatggatgttctgggcatggaagatgcgtgaatggtcagtgcgtctgcgacgaaggttacactggcgaagattgttctcagctcaggtgtcctaacgattgtcactcccgcgggcgctgcgtggaaggaaagtgcgtatgtgaacagggatttaaaggctatgattgcagcgatatgagctgccccaacgactgccatcagcatggtcgatgcgtgaatggcatgtgtgtctgtgatgacggttacaccggtgaagattgccgggaccggcagtgtcctagagattgcagcaatcgcggcctttgcgttgatggccaatgtgtgtgtgaggatggattcaccgggccagattgcgccgagctctcatgtccaaacgattgccatgggcaggggcggtgtgtcaacgggcaatgtgtgtgccatgaggggtttatggggaaggactgcaaggagcagaggtgtccgagtgactgtcacggtcagggacgctgtgtcgacgggcaatgcatctgccacgaggggtttacagggctcgactgcggccagcactcttgtccgtcagactgtaacaacctcggtcagtgtgtctctggccggtgcatttgcaacgagggctacagcggggaggattgttccgaggtgtcaccccccaaagatttggtggttacagaagttaccgaggaaactgtgaacctagcctgggataacgagatgagagtcactgagtacctggttgtgtacacaccgacccacgaaggtggactggagatgcagtttcgagtgccaggcgaccagacatctactattatccaggagcttgaacctggtgtggaatactttattcgcgtgttcgcgatactcgaaaacaaaaaaagcatcccagtgtccgcaagagtcgcaacgtacttacccgcacctgaggggctgaaatttaaatccatcaaagagacttcagtagaggtggagtgggacccattagacatcgctttcgagacttgggagatcatcttcagaaacatgaacaaagaggatgagggcgagattaccaagtctttaaggagaccagagacatcataccggcaaacaggtcttgctccaggccaggagtatgaaatcagtctccacattgttaaaaataatactcgaggcccaggtttaaaaagggttacaacaactcgtctggacgctccatcccaaatagaggtaaaagacgtaacagatacaactgcgctgattacatggtttaaaccactggcagagattgatggaatcgagttgacatacgggatcaaagacgtcccaggggatcggaccaccatcgatctcaccgaggacgaaaatcagtacagtatcggaaacttgaagcctgacactgagtatgaggtctccctcatcagccggcgcggggatatgtcttcaaatcctgctaaggagaccttcacaacaggcctggacgctcctcgaaacttgagaagggtgagtcagactgacaactccatcacattggagtggagaaatgggaaagcagcaattgacagctataggataaagtacgctcctatcagtggtggtgatcacgccgaggttgatgtgccaaaatcacagcaagcaaccactaaaacaacgttgaccggacttcgtccaggtacggaatatggaattggggtcagtgccgtcaaggaggacaaggagtccaatcctgctacaatcaacgcagcaacagagctcgatactcctaaggacctgcaggtgtctgagaccgccgaaacttccctcaccttgctgtggaagacccccctggctaaattcgatcgatatagactgaattacagcttgccaaccggacaatgggtgggagtgcagctgccaaggaacaccacctcatacgtcctacgaggcctggagcctggccaggaatataatgtgcttctgacagctgagaagggacgtcacaagtctaagcccgcaagagtcaaggccagtacagccatgggcagccctaaagaagtgatattcagtgacataacggaaaattcggctactgtatcttggcgcgccccaacagcgcaggtggagagcttcagaatcacgtacgtccctattaccgggggtacaccctccatggtgaccgtagacggcactaagacacagaccagactcgtgaagcttatccctggggtcgagtacctggtgagtataatagccatgaaggggttcgaagaaagcgaaccggtgagtggatcctttacgacagccctggacggccccagtggcctggtcaccgctaatattacagatagtgaagccctggctcggtggcagcccgccattgcaaccgtagacagctatgtgataagctacaccggggagaaggtgcccgagatcacaaggaccgtgtcaggaaacactgtggagtacgctctcactgacctcgaaccagccaccgaatacacgctgcgaatcttcgccgaaaagggccctcaaaaaagctctactattaccgccaaattcacaactgatcttgacagtcctcgggatttaacagccaccgaagttcaaagcgaaactgcccttttaacatggcgtccacccagagcatctgtgaccggatacctgctggtctacgagagcgtggatgggacagtgaaggaggtcattgtgggccccgacactacatcctattccctggcggacctatcacctagtactcattatacagcaaaaattcaagccctgaatggccccctgagaagtaacatgatccagacaattttcactacaataggccttctgtatccatttccaaaagattgttcacaggcaatgctgaatggggatacaacctcgggtctctacactatttatttaaacggggataaggcggaggccctggaggttttttgcgacatgacatccgatgggggaggatggatcgtgtttctccggcgaaagaacggcagggagaacttctaccagaattggaaagcatatgccgccggtttcggggatcgcagagaagaattttggctgggacttgacaatctgaacaaaatcactgcccaaggccagtacgagctgcgcgtggatttgcgagaccacggagaaactgccttcgcagtctacgataagttttcggttggggacgcaaagactaggtacaagctgaaagttgagggctatagtggaaccgccggagattccatggcctatcataacggacgatcgttctcaacctttgacaaggataccgactcggctatcacgaactgcgcgctgagctataaaggggccttctggtatagaaattgccatcgcgtgaacctcatgggtcgctatggtgacaacaatcacagccaaggcgttaattggtttcactggaagggtcatgagcatagcattcagtttgctgaaatgaaactgcggcctagcaatttcagaaatctagagggcagaagaaagcgcgcttag

SEQ ID NO: 248544 - RNA, 4968 nt, synthetic construct
  misc_feature 1..4968: note = Description of Artificial Sequence: Synthetic coding sequence
  source 1..4968: mol_type = other RNA
atgggagccatgactcagttgctggctggcgtctttctggcctttttagcgttagccacagaagggggagtgcttaagaaggtgatcagacataagagacagagtggtgtgaatgccactctcccagaggagaatcagcctgttgttttcaatcacgtgtacaatattaagctgcctgtagggagccaatgttccgtggacttggagagcgcaagcggtgaaaaagatctggctccccccagcgagccttctgagtcttttcaggaacacacagtggatggcgagaaccagatcgtgttcacccaccgcatcaatatacctaggcgggcttgtgggtgcgccgctgccccagacgtaaaagagttactgagtaggctagaggaactcgagaaccttgtgtcatcacttagagagcagtgcaccgccggggccggttgttgcctgcagcctgccaccggacggctcgacaccaggccattctgctccggtaggggcaatttctccacagaaggttgcggatgtgtatgcgaacccggatggaagggcccaaactgttccgaacctgagtgccctggcaattgccaccttcgcggcaggtgtattgacggccaatgcatctgtgacgatggctttacaggggaagattgtagtcagctcgcttgcccatctgattgcaacgaccagggaaagtgcgtgaatggtgtttgtatttgtttcgaggggtatgctggcgctgattgttcccgcgagatatgcccagtcccatgttccgaagaacatggaacctgtgttgatgggttgtgcgtctgtcatgacggatttgccggagatgactgcaacaaacctctgtgtttaaataactgctacaatagaggaaggtgtgtagaaaacgaatgtgtttgcgacgagggcttcactggcgaggactgtagcgagctgatttgccccaatgattgtttcgatagaggcaggtgtattaacggaacctgttattgcgaggaaggctttactggcgaagattgtgggaaacccacttgtccacatgcttgccacacccagggtcggtgcgaagaaggacaatgcgtatgtgacgagggcttcgccggggtggattgtagcgaaaaaaggtgcccagcagactgtcacaataggggcaggtgtgttgacgggaggtgcgaatgtgacgacgggtttaccggggccgattgtggagaactcaaatgtcctaacggctgctctgggcacggaagatgtgtgaacggccagtgcgtttgcgacgagggttacaccggcgaagattgcagtcagctgcgctgcccaaacgattgtcactcacggggaagatgcgtcgaaggcaagtgcgtttgtgagcaagggtttaaaggctatgactgttctgatatgtcgtgtccaaatgattgccaccagcatgggagatgtgtaaacgggatgtgtgtgtgtgacgacggatatacaggtgaggactgtcgtgatcgccagtgtccccgggactgctccaacaggggcctttgtgtggatggccaatgcgtctgtgaggacggatttacaggaccagactgtgccgaactgtcctgccccaatgactgtcatgggcagggaagatgcgtgaacggccagtgtgtgtgccacgaggggttcatggggaaagattgtaaggaacaacggtgtccgagcgactgtcacggtcaaggcaggtgtgtggatggtcagtgcatatgtcatgagggatttacagggctcgactgcggacaacacagttgtccttcagactgcaataacttaggccaatgcgtttcaggccgctgcatatgcaatgagggctattccggcgaggattgtagtgaggtctcaccccccaaggacctcgttgtcacagaggtgaccgaggagaccgtgaatctagcttgggataatgagatgcgagtcacggagtacttggtagtgtatacgccaactcacgagggcggcttggagatgcagttcagagtccccggcgatcagacttccacaattattcaagagctggaacctggagtagagtattttattagggtattcgcaatcctcgaaaataagaaatctataccagtgtctgctcgggtggctacttatctgccggcccctgagggcctgaagtttaaatccatcaaggagacaagtgtggaggtggagtgggatcctcttgacatagcctttgaaacttgggagattatttttagaaacatgaataaggaggacgagggggaaattaccaaaagcctgcggcgtcctgaaacctcttatcgacagacaggactcgccccaggtcaagagtacgagattagcctgcatatcgtcaagaataacacccgggggccaggtttgaagcgtgtcacgactactagactggatgcaccctctcagatagaggtcaaagacgtcaccgacacaacggctctgattacctggttcaaacctctcgcagaaatcgatggtattgaattgacctacggaattaaagacgtcccaggggatagaaccaccattgacctaaccgaggacgagaaccaatacagtattggtaatctcaagccagataccgagtatgaggtctcattgatttcccggagaggcgatatgtcatctaacccagctaaggaaacctttaccacaggactggatgcgcctcggaatctgcgccgagtttcacagacagacaattccatcacactggagtggcggaacggaaaagctgcgatcgatagctaccggatcaaatacgctcccatttcaggtggggaccacgctgaagtcgatgtgcccaagtcccagcaggccaccaccaagactaccctgacgggtctccgccccggtacagaatacggcatcggggtgtctgcagtgaaagaagataaagagagtaatcctgctacaatcaatgccgctactgagctcgacaccccaaaggatttacaggtgtctgagaccgctgaaacgagcttgacactgctgtggaaaacccccctggccaagtttgataggtaccgactgaattactcactgcctactggccaatgggtcggcgtgcagttgcctaggaatacaacgtcttacgttctccgtggcctagagccaggccaggaatacaacgtactgctgaccgctgagaagggaagacacaagagtaagcctgctcgggtcaaggcaagcactgaagccgagccagaggtagataacctgctcgtttccgatgcgacaccagacggtttccggcttagttggactgccgatgaaggggttttcgacaacttcgtactgaagataagagatacaaagaaacagtctgagcctctagaaattactctcctcgctccagaaaggacccgcgatataactggactacgggaggctactgagtacgaaatcgaactgtatgggatcagcaaaggtcgccgcagccaaaccgtcagtgccatcgcgaccacggcgatggggtcccccaaggaggtgatattttcagatatcacagaaaattccgcgacagtttcatggcgggctccaacagcccaagtcgagagctttcggatcacctacgtccccatcaccggtgggacacccagtatggtcacagtggatggaaccaaaacacagaccaggcttgttaaactgatcccaggagtggagtatctggtctctattatcgctatgaaggggttcgaagagtccgaacccgtcagcggatcttttacaaccgctctggatggccctagcggccttgtgaccgccaacattacagacagcgaggcactggcaagatggcagcctgctatagcaactgtagatagttatgttataagctacacgggagagaaagtgcctgaaattactagaacggtgtccgggaatacagtggagtatgccctgactgatctggagcccgcaaccgagtatactctgagaattttcgcagagaagggcccccagaagagctctacaatcactgctaagtttaccacggacctcgatagtcctagggaccttaccgctactgaggtccagtctgaaaccgcactgctaacatggagaccacctcgggcctccgtgacaggctatctgctggtgtatgaatccgttgacggcacagtgaaggaggtcatcgttggcccagacacaactagttattcgctggctgatctatcaccgtccacccactatacagctaagattcaggcattgaacggaccactgagatcaaacatgatacagacaatcttcaccacgatcgggctgttatacccgtttccgaaggactgctctcaagctatgctcaatggagacacgacgtcaggcctgtacactatttacttgaatggagacaaggcagaagcgcttgaagtgttctgtgacatgactagtgacggtggaggatggatagtattcctccggcgaaaaaatggccgcgaaaatttttatcagaactggaaggcctatgccgccggtttcggcgatcggcgggaagagttctggttgggcctggacaacttgaacaagatcacagctcagggccagtatgaattacgggtggacctaagagaccacggagagactgcctttgcagtgtatgacaagtttagtgtgggcgacgctaagactcgatataaactgaaggtggagggatattccggaactgccggggacagtatggcttatcacaacggccgttcattctctactttcgataaggataccgactccgccattacaaactgtgctctgtcttataagggtgcattctggtaccgaaattgtcatcgggtgaaccttatgggccgctacggagacaacaatcattctcagggcgttaattggttccactggaagggacatgagcactctattcagtttgcagagatgaaacttcgacctagcaactttaggaatcttgaagggcgacgcaaacgggcttag

SEQ ID NO: 248545 - RNA, 6606 nt, synthetic construct
  misc_feature 1..6606: note = Description of Artificial Sequence: Synthetic coding sequence
  source 1..6606: mol_type = other RNA
atgggcgccatgacgcagctacttgccggggtgtttctcgcttttctcgcccttgccactgaagggggcgtgctgaaaaaggtgattaggcacaaacgacagagcggggtcaacgccactctgccagaagagaaccaacccgtagtattcaaccacgtgtacaatatcaaacttcccgtaggatcacagtgttcggttgatctggaatccgcatccggggaaaaggatcttgctccgcccagtgagccgtcagagagtttccaggaacacaccgttgatggagagaatcaaatcgttttcacacaccgcatcaacattccacgtagagcctgcggttgtgccgccgcgccagatgttaaagagctccttagtcgattggaagaattagaaaatttggtctcctcactgcgcgagcaatgtactgccggagccggatgctgcttgcaacctgccacagggaggttagacaccaggcccttttgctctggacgaggaaatttcagcaccgagggctgtggatgcgtctgtgaacccggatggaaaggcccgaactgtagcgagcccgaatgccctggtaattgccatctgagaggtcgatgtatcgatgggcagtgtatttgtgatgatggcttcactggcgaggattgtagtcagttggcctgcccttctgattgcaatgatcagggaaagtgtgtgaacggagtatgtatctgctttgagggttacgcaggggccgactgctctcgggaaatctgtccagtcccttgttctgaagagcacggaacatgtgttgatggcttgtgcgtgtgccacgatggttttgcaggagacgattgcaataaaccgctgtgccttaacaattgctacaaccggggacgctgcgtcgagaatgagtgtgtttgcgacgagggctttacgggtgaagactgctccgagttgatctgccctaacgactgttttgatcggggccgatgcatcaatgggacctgctattgtgaagaagggtttaccggggaagactgcggcaagcccacctgcccccatgcatgccatacacaggggcgttgtgaggaaggtcagtgtgtgtgcgacgagggctttgccggagtcgactgctcagaaaaaaggtgccctgccgactgccacaatcgaggccggtgcgttgacggccgctgcgaatgtgatgatggattcacaggcgccgactgcggcgaactaaaatgtcctaatggatgtagcggccacgggagatgcgttaacgggcagtgcgtgtgcgatgaaggctataccggagaagactgtagtcagctccgttgtccaaatgattgtcattcgcgcggcaggtgtgtggaagggaaatgtgtgtgtgagcaagggtttaaaggatacgactgttccgacatgtcctgtcccaatgactgccatcagcacgggcggtgtgtgaatggaatgtgcgtgtgcgatgacggatatacgggcgaagactgtcgcgaccgacaatgcccgagggattgtagtaatcgggggctatgtgttgatggacagtgcgtttgcgaagacgggttcaccgggccagattgcgcggagctcagttgcccaaacgactgtcacggccagggcaggtgcgtgaatggacaatgtgtctgtcacgaaggattcatgggaaaggactgcaaggagcagagatgcccaagtgattgccatggccagggaaggtgcgtggatggccagtgcatctgccacgagggctttaccggcctggactgcgggcagcacagctgtccttcagactgcaacaatctgggtcagtgtgtgagtgggcggtgcatctgcaatgagggctactctggagaggactgcagcgaggtgtccccgcccaaggatctggtcgttacagaggtgacggaggaaaccgtgaatctcgcttgggacaacgaaatgcgggtgactgaatatcttgtggtttacaccccgactcatgagggtggcctagaaatgcagttccgcgtgcccggcgatcagacatcaaccattattcaagagctcgagcccggcgtggagtatttcattagggtgtttgctattctggagaataagaaaagcatacccgttagcgcccgcgttgcaacttatcttcccgctcccgagggtttgaagttcaagtccattaaagaaacttcagtggaggtggaatgggatcctctggatatcgcattcgaaacctgggaaattatttttcgtaatatgaataaggaagatgagggcgagatcacaaagtccctgcgaaggcctgaaacctcttataggcagactggactcgctcccggccaagaatatgaaataagcctccatatcgtgaagaataatacgcgagggccagggttgaaacgcgtgactacaacccgcctcgacgccccatcacagatcgaggttaaagatgtgacagacaccacggctttgataacttggttcaagccactggctgagatcgacgggatcgaactcacttacgggataaaggatgttcctggagatagaacaacgatcgacctgacagaagacgagaatcagtatagtattgggaatctcaagccagacaccgagtacgaagtgtctctcatttcacgtaggggcgacatgtcttccaatcctgctaaagagacattcacaaccgggttagatgctccccgcaatctgaggagagtgtcccagacagacaactctattaccctggagtggcgtaatggtaaagctgccattgacagctaccgaatcaagtacgcaccaatcagcggtggcgaccatgccgaagtcgatgtgccaaagtcccagcaggcgacaactaagacgacgcttaccggcctcaggccaggcacagagtacggtattggggtgtccgccgtgaaagaagacaaggaatctaatcccgcaactattaatgctgcaacagaattagatacccctaaagatctgcaggtgtccgagaccgccgaaacatcgcttacactgctgtggaaaacgcctctcgccaagtttgacagatacagactcaactactcgctccccacaggacaatgggtaggcgtgcagcttccccggaatactacttcttacgtgctccggggtctggagccaggtcaagaatataatgtactactcaccgccgaaaaaggacgacataagtccaaacccgcgagagttaaggcttccacagaacaagcccctgagctggaaaacctgaccgtgacagaggttggctgggacggccttagattgaattggaccgctgccgaccaggcttacgagcattttatcatacaagttcaggaagctaataaagtggaggccgcccggaatctgactgtgcctggtagcctgcgagctgtggatatcccagggctgaaagccgccaccccatatacagtttccatttatggtgtcatccaggggtaccgcacacccgtgctttccgcagaagcgagtaccggcgaaacccccaatctgggggaagttgtggtagcagaagtaggatgggacgcgttgaagctcaattggacagctcctgaaggcgcatacgagtactttttcatacaagtgcaggaagcggatactgtagaggctgcccagaacctcacggttccaggagggctgaggtcgacagatctcccaggcttaaaagctgccacccattacaccatcacaatccgaggggtgacccaggatttcagcacaactcccttatctgtggaagtgctgaccgaggaagtacccgacatggggaaccttactgtgacagaggtctcatgggacgccttgcgcctgaattggacaacacccgatggtacttacgatcagttcaccatccaggttcaggaagctgatcaggttgaagaggctcataacctgactgtccctggaagcttgcgatctatggaaatccctgggttgcgcgcaggaaccccgtacactgtgaccctgcacggagaagtgagggggcactccacgcgtccgcttgctgttgaggtagtgacagaggaccttccacagctgggagatctggccgtctccgaggtgggttgggacggtctgagattgaattggacagcggccgataatgcctatgagcacttcgttatacaggtgcaagaagtgaataaggtcgaggctgcacagaatctgactcttcctggtagtttgcgggctgtggatattccgggcctggaagccgctaccccctaccgtgtctctatctacggagttatcagagggtaccgcactcccgttttatcagctgaagcttccaccgcaaaggagcctgagatcgggaaccttaatgtatcggacatcacaccggaatctttcaacctctcctggatggcaactgacgggatattcgagaccttcacgattgagattatcgactcaaatagactgctggagactgtggaatataatatcagtggagctgaacgtactgcacacattagcggccttccaccttctaccgactttattgtgtacctgagcggactcgcaccatccatccgtactaagaccattagcgctactgccaccaccgaagctcttccgctcctcgagaacctcactatatctgatatcaacccttatggtttcacagtgagttggatggccagtgaaaacgcattcgactccttcctcgtgactgtggttgatagcggaaaactactggatcctcaggaatttactctgtcaggcactcagcgcaagttggagcttagaggactcattactggaatcggatacgaagtcatggtatccggatttacacagggtcatcaaaccaagccactccgcgcagagatcgtaacagaggccgagcccgaagtggataatttgctggtgtcagacgctacccccgacggtttcagactttcctggacagctgacgaaggagtttttgataatttcgtactcaaaattcgggataccaaaaagcaatccgaacccctggaaataactctgctggctcccgagcggacacgggacatcactggcctccgggaggcaactgaatatgagatagaattatacggcatcagcaagggcagaaggtcccagacagtttccgccatagctacaacagccatgggatcccctaaagaggtgatattttctgacatcactgaaaactccgccactgtctcatggagagccccaacggctcaggttgagagcttcaggataacatacgtgcctattaccggaggtacaccctcaatggtcactgtggacggcaccaagacccagacccggttggtaaaactcattccgggtgtcgagtatctggtgtctattatcgctatgaagggcttcgaagaatcagaaccagtgtccggatcctttactaccgcgctcgacggaccgtccggcttagtgaccgccaacatcacggacagcgaagcactggcaagatggcagcctgctatcgccactgtggacagctacgtgatcagctataccggcgaaaaagtcccagagattacaagaacagtaagtggaaataccgtggagtatgctctgaccgacctcgagccagccactgagtataccctgagaattttcgccgaaaaagggcctcagaaaagttcaacgatcactgccaagtttacaaccgatctggattccccaagggacctcacagctaccgaagtgcagagcgaaacagccctcttgacctggaggccaccacgggcttcagtgaccgggtacctgctggtgtatgaatccgttgatggaaccgttaaggaggtcatcgttggacctgacacaacgtcgtactcactggctgatctgagcccatcaacccattacacagcaaaaatccaggcccttaacggtcctctgagaagtaatatgattcagactatctttactactattgggttactatatcctttccccaaagattgcagtcaagccatgcttaacggcgacacgacctccgggctatacactatctacttgaatggtgataaggcagaggccctggaggtcttctgcgatatgacttcggatgggggaggctggattgtctttctgcggagaaaaaatggtcgagagaacttctatcagaactggaaggcctatgctgccggctttggcgatcgaagggaagagttctggctgggcctggataatttgaacaaaattacagcgcagggacagtatgaactgcgggtagacctgcgggaccatggagagaccgccttcgcggtgtacgacaagttcagtgtgggtgacgctaagacccggtacaaattaaaggtggaaggctacagtggtacggcaggcgactctatggcataccataatgggagatcattctctacatttgacaaggacaccgattcagccatcaccaactgtgccttgagttacaaaggcgcattttggtatcgaaattgtcatcgtgtgaatcttatggggaggtacggggataacaaccactctcaaggtgtgaactggttccattggaagggtcacgaacattccatccagttcgctgagatgaagctgcggcccagtaacttccgaaatcttgagggccgccgcaagcgagcttag

SEQ ID NO: 248546 - RNA, 3240 nt, synthetic construct
  misc_feature 1..3240: note = Description of Artificial Sequence: Synthetic coding sequence
  source 1..3240: mol_type = other RNA
atgggcgcaatgacccagctgcttgccggggtgtttttagcgttcctagccctggcaacagaggggggggtacttaaaaaagtaattagacacaagaggcagtcaggcgttaatgctacattaccagaggagaatcagcccgtggtgtttaatcacgtgtataatatcaaactccccgtaggatcacagtgctcagtcgatctggaatcagcctcaggcgaaaaagatttagcccccccatccgaaccttctgaatcattccaagagcacacggtggacggggaaaaccaaatcgtgttcacccatcgcatcaacatccctagacgagcctgcggctgtgcggctgcccccgatgtgaaggaactactaagccgactcgaagagctcgagaacctcgtgagcagcctccgagaacagtgcaccgccggtgcaggctgctgccttcaacccgcaaccggtcggctagatactcgcccattttgctctggtcggggaaactttagtaccgagggttgcggctgtgtatgtgaaccggggtggaaaggaccaaattgttctgagccggagtgccctggaaactgtcacctgcggggccggtgcattgacgggcagtgcatttgtgatgacggctttacaggcgaggactgtagtcaattagcatgccccagtgattgcaatgatcagggcaagtgtgtgaatggagtctgtatctgctttgaaggctatgccggtgccgattgcagtcgggagatctgcccagtgccctgctccgaggagcatggtacttgcgtggacggactctgcgtgtgtcatgacgggtttgcgggagacgactgtaataagccattatgtttgaacaactgttataatcgagggaggtgcgtcgaaaacgagtgtgtgtgcgacgaaggatttaccggggaagactgttcggagctgatttgcccgaatgactgctttgatcgcggccgctgtattaatggaacatgttactgtgaagagggcttcaccggggaagattgcggcaaaccaacatgtccgcatgcctgtcacacacagggacgatgcgaagaagggcagtgtgtgtgcgacgaaggcttcgcaggggtagactgttcggagaagagatgtcccgcagattgtcacaatagagggcgatgcgtggacggaagatgcgaatgcgatgatggttttacaggggctgactgcggcgaactaaagtgccccaacggctgttctggccacgggcggtgcgttaatggacagtgtgtgtgcgacgaggggtataccggagaggactgcagtcagcttcgatgtcccaatgactgtcatagtagaggccgctgtgtggagggtaagtgcgtgtgcgaacaagggttcaaagggtacgactgttccgacatgagctgtccgaacgattgtcatcagcacggtcgctgcgtaaatggaatgtgcgtatgtgacgacggctacacaggcgaggactgtcgagaccgccagtgcccccgagactgttccaatcgcgggctttgtgtggacgggcagtgtgtgtgtgaagatggcttcactggacccgattgtgccgaactgtcatgcccaaatgattgccacggtcagggacgctgcgtgaacggacagtgcgtgtgccacgaaggctttatgggaaaggattgtaaagaacagcgatgccccagtgactgccacggacaggggcgctgtgtcgatggccagtgtatttgccatgagggctttaccggtcttgactgcggacagcacagctgcccgtccgattgcaataatcttggacaatgcgtcagtggcagatgcatatgcaatgaaggctatagcggcgaggactgctcggaagtgtcacctccaaaggacctggtggtcacagaggtcaccgaggaaaccgtgaacctagcctgggataatgaaatgcgcgttaccgagtatctggtggtgtacacccctacccacgaaggaggattggaaatgcagttcagggtgcctggggatcagacttctaccatcatccaggaactggagcccggcgttgagtactttataagagtcttcgccatactggagaataagaaaagcattcctgtcagcgcaagggtggccacctacctccctgctcctgagggactgaagtttaaaagcattaaggaaacgagtgtggaagtggagtgggaccccctcgatattgcgttcgagacatgggaaatcatcttcaggaacatgaacaaggaggacgaaggggagatcacaaagtccttaaggagacctgagacttcttaccgacaaacaggattggcacccgggcaggagtacgagatatcactgcacatagttaagaacaacacccggggtccggggctgaaacgcgtaactacaaccagacttgatgctccaagccagattgaagttaaggacgtgacagacactaccgccttgataacgtggtttaaacccctcgcagagattgacggcatcgagctaacttatggaattaaggacgtgcctggagaccgtactaccatagatctgaccgaagatgagaaccagtactctatagggaacctgaaaccggacacagagtatgaggtatctctgatctctcgccgcggagatatgagttccaatcctgctaaagaaacctttacaaccggccttgacgccccacgtaatctgcggagagtcagccagaccgataacagtattacgctggaatggaggaacggcaaagcggctattgattcttatcggatcaaatacgcacccatctccggcggtgaccacgccgaggttgacgtccctaagagtcaacaggctacgacaaaaaccattacagctaaatttacaacagacctggatagccctcgcgatttaacggccacagaggtgcaaagcgagaccgccttgctcacttggaggcccccccgagcctcagtaaccggatacctgctggtatacgaatcagtcgacggcacggttaaggaggttatcgtcggacctgacacaacatcatattctctagcagatctgtcgcctccttctttattcctgcacttcatacagcagaagccagaaaagcaatattgtttccactttaaggatatgataaacatcataaatattattatgatgatgatgatgatgaaaacaaaggacttttctcgagatctgtctttccagaacatcagtggccagtaccttatagtattcttcttttag

SEQ ID NO: 248547 - RNA, 279 nt, synthetic construct
  misc_feature 1..279: note = Description of Artificial Sequence: Synthetic coding sequence
  source 1..279: mol_type = other RNA
atgggtgcaatgacacagcttttggcaggcgtttttctcgcgttcctagccttggcgaccgaagggggagtccttaagaaagtgatccgacacaaaagacagtctggcgttaatgcaacactccctgaggagaaccaaccagtggtcttcaaccacgtatataatatcaagctgccagtgggatcccaatgctccgtggatctggaatctgcttcaggggagaaagacctggcgccgccttcagagccatctgaatccttccaggaacataccgtctag

SEQ ID NO: 248548 - RNA, 5241 nt, synthetic construct
  misc_feature 1..5241: note = Description of Artificial Sequence: Synthetic coding sequence
  source 1..5241: mol_type = other RNA
atgggcgctatgacacagctgttagcaggcgtgtttctggcatttttggctctggccaccgaaggtggtgtacttaagaaggtgattagacacaaaaggcagagcggtgttaacgccaccctccccgaagaaaaccagcccgtcgtgttcaaccatgtgtacaacatcaagctcccggtgggttcccagtgctcagtggacttggaatccgcatcaggcgaaaaagaccttgctcctccctcagagcccagcgagagctttcaagagcacacagtcgatggagaaaaccagatcgtgttcacacacaggatcaacattccacggcgggcctgcgggtgtgccgccgcccccgatgtaaaggaacttctgagtagactcgaggaactggagaacctggtcagctcattaagggagcagtgtaccgctggcgccgggtgctgccttcagccagccactggccgactggataccaggccattctgttccggccgcgggaacttttccactgaaggctgcgggtgcgtttgtgaaccgggatggaaaggaccaaattgcagtgaacccgagtgtccgggcaattgtcacctgagaggccggtgtatagacgggcagtgcatttgcgatgatggctttaccggagaagattgctcgcagctcgcctgtccttctgactgcaatgatcagggcaaatgcgtcaacggcgtgtgtatttgctttgagggatacgcgggagccgactgcagtagggaaatttgcccagttccctgctccgaagagcacggtacatgtgttgatggcctgtgtgtttgtcacgacggtttcgccggcgacgattgcaacaagccgctgtgtctgaataactgctataaccgcggccggtgcgttgagaatgagtgcgtctgcgatgaggggtttactggggaagattgctcagagctgatctgtcccaatgattgcttcgataggggaaggtgcataaatgggacatgctattgtgaagagggattcactggagaagattgcggcaagcctacctgtcctcatgcctgccacacacaagggagatgcgaggaaggccagtgtgtgtgcgatgaggggtttgcgggagtagactgtagcgaaaaacggtgcccagccgattgtcacaatcgcggtagatgcgtggacggaagatgtgagtgtgatgacgggtttaccggagcagattgtggtgagctgaaatgcccaaacggctgctctggccatggtcgatgcgtaaatggtcagtgcgtgtgtgatgaggggtatacgggcgaggattgctctcaactgagatgcccaaacgactgccacagtagagggaggtgcgttgagggtaagtgtgtgtgtgagcaaggatttaagggatatgattgtagtgacatgtcgtgccctaacgactgccatcagcacggccgatgtgtaaatggtatgtgcgtgtgcgacgatggatacacaggcgaagactgtagggacagacagtgtccaagggactgctccaatagagggttatgtgtggacggccagtgtgtttgcgaggatgggttcaccggccctgattgtgccgaactgtcctgcccaaatgattgccatggtcagggaaggtgtgttaacggccagtgcgtgtgccatgaaggctttatgggtaaagactgtaaggaacagcggtgtcctagtgattgtcacgggcaggggcgatgcgtcgacgggcagtgtatttgccacgagggtttcactggattagattgcggacagcatagctgcccatccgactgtaataatctgggacagtgcgtgagcggaaggtgcatatgcaacgaaggctattctggtgaggattgttcggaggtgtctccgcccaaagatctagtcgttacagaagtcacagaggaaactgtgaaccttgcatgggacaacgaaatgagagtgactgagtacctagtggtatacacgcccacacatgaggggggcttggagatgcagtttagagttcctggggaccagacatccaccattattcaggaactggagcctggagtggaatatttcatacgggttttcgccatcctggagaacaagaagagtatccctgtcagcgcgagggtggccacctatctccccgcccccgaaggcttaaagttcaagtcgattaaagagacttctgtggaggtggagtgggacccactcgatattgccttcgagacatgggagattatcttcagaaatatgaacaaggaagacgagggtgagatcaccaagagccttagacggccggaaaccagttaccgccagacaggcctggcgcctggccaagagtacgaaatcagtctgcacattgtaaagaataacacccgggggccaggactgaagcgcgttacgaccaccagactggacgctccaagtcagattgaggtcaaggatgttaccgataccacagcattgatcacctggtttaagccactggctgagatagatggaatagaactgacttatggcataaaagatgttcctggcgacagaaccaccatagacttaaccgaagacgagaatcagtacagcatcggcaacctcaagcctgacacggagtacgaggtttcactgatatctcggcgaggcgatatgtcttccaatccggccaaagagacattcaccacaggtcttgacgctccaaggaatctgaggagggtgtcacagacggataattccattacccttgaatggagaaatgggaaggctgctatcgacagttaccgcattaaatacgcccccattagcgggggagatcacgctgaggtggacgtgcccaaatcccaacaggcaacaaccaaaaccactctgacgggtctgcgccccggcactgaatatggcatcggggtgtctgccgtgaaggaagacaaggagagtaatccagctaccatcaacgcagccaccgaactcgacactccaaaagatctacaggtctcagagacagccgagacttccctgacactgttatggaagacccctcttgccaaattcgaccgctatagactcaattactctttgcctaccggccagtgggtcggcgtccaacttcctaggaatactacgagctatgtgctacggggactggaacccggccaggagtacaacgtgctgcttactgccgagaagggaagacataagtcaaaaccagctcgggtcaaggcctcaactgctaaggaaccagagatcgggaatttgaacgtgtcagatattactcctgagtcctttaatctatcttggatggccacagacggaatatttgaaacttttacaatcgagatcatagactcaaatagattgcttgagactgttgagtacaacatttccggcgcggagagaacagctcacatctcgggcttaccaccctctactgatttcattgtctatctctcaggcctagcgccgtcgatccgcaccaaaacgatatccgccactgccacgaccgaggctgagcccgaagtggataatcttttagtttctgacgccactcctgacggctttagattatcttggacggccgacgaaggtgtctttgacaactttgtcctgaaaattagggatacaaagaagcagagtgagcctctagagataaccctgctggctcctgagagaactcgcgacatcacaggtctgcgagaggccactgaatacgagattgagctttacggcataagtaagggccgtcgttcgcagaccgtgagcgcgattgccaccacggctatggggtctcctaaagaagtcatcttcagtgacattacggagaattctgcaaccgtgtcatggagggctccaacggcccaggtagaaagctttcggataacctatgtgccaatcactggaggaaccccttccatggtgactgtggacggaactaaaactcaaaccaggctggttaagcttatcccaggtgtggaatacctggtgtctatcatcgcaatgaaaggttttgaagaaagcgaacccgtatcagggtcctttactaccgcactcgacggacctagcggcttggtgacagctaatataactgattcagaggctttggcccggtggcaacctgcgatcgccacagtagactcttacgttatatcttatacgggggagaaagttccggagatcactcggactgtttcaggtaacacggtcgaatacgctctgacggatttagaacccgctacagaatacaccctgagaatcttcgccgaaaaaggacctcaaaaaagttcaacgatcaccgcaaagttcactacagacctggattcccccagggaccttaccgccacagaggttcagagcgagaccgcattactgacatggaggcctccccgggcctcggtgactggatacctgctggtttacgagtctgtcgacgggaccgtgaaggaggtgatagtgggcccagatacaacaagttattcacttgctgacctgtccccaagcactcattacaccgccaaaattcaggctcttaatggccccctgagatcgaacatgatacagaccatattcaccactatcggactgctgtaccccttcccgaaagattgtagccaggcgatgttgaacggagacacaacgtctggtctctacaccatttatctgaacggcgataaagcggaggctctggaggtgttctgcgacatgacctccgatgggggcggctggatcgttttcttgagacgcaaaaatggccgggagaacttttatcaaaattggaaagcttacgccgccggtttcggcgaccgcagggaagagttttggctagggctggacaacctcaataaaatcactgcccaaggacaatacgaactgcgagttgatcttcgagaccacggcgaaacagcgtttgctgtctatgacaagttctcagtgggggatgccaagaccagatacaaactgaaggtcgagggatactcaggcaccgcaggagacagtatggcctatcataatggacggagttttagcacatttgataaggatacagacagcgcgatcaccaattgcgccctgagctataaaggcgccttttggtaccggaactgtcaccgcgtgaacctgatggggagatatggagataacaaccacagtcagggcgtaaactggtttcactggaaaggtcacgagcattccatacagtttgctgaaatgaaactgaggcccagtaattttaggaacctagaggggaggagaaagagagcctag

SEQ ID NO: 248549 - RNA, 5517 nt, synthetic construct
  misc_feature 1..5517: note = Description of Artificial Sequence: Synthetic coding sequence
  source 1..5517: mol_type = other RNA
atgggcgctatgactcagttgctagctggagttttcctcgcatttcttgcactcgcgaccgagggaggtgtactgaaaaaagtgatcagacataagaggcagtccggcgtgaatgcaactttgcccgaggagaatcaaccggtggtgttcaaccatgtatataacattaagcttcctgtcggctcccagtgctctgtggacctagaatccgcatccggagagaaggacctggcccccccgtctgagccaagtgaatcctttcaggagcacaccgtggatggagagaaccagatcgttttcacccaccgaatcaatatacctcggcgggcatgcggctgcgccgccgccccagatgtgaaggagttgctgtctcgtctggaagagctcgagaacctcgtgtcttcgcttcgagaacaatgcactgcaggagcggggtgctgtttgcagcctgcaactggacggctcgatacccgcccattttgtagcggacgaggtaattttagcactgagggctgtgggtgcgtgtgcgagcccggctggaagggccccaactgtagcgaaccagaatgtcccggcaactgtcacctccggggtaggtgtattgacggacaatgcatttgtgatgatgggttcacaggcgaggattgctcgcagctcgcctgtccatccgattgcaatgatcagggcaaatgtgtgaacggagtgtgtatctgcttcgagggatatgctggggccgactgctcacgagagatctgcccagtgccctgctccgaagaacatggaacctgtgtcgacggcttgtgcgtttgccacgatggatttgctggggatgactgcaacaagccactctgcctgaataactgctacaaccggggacggtgcgttgaaaatgaatgtgtctgcgatgagggctttactggggaggactgcagcgagctgatttgtcctaacgattgtttcgatcgtggccgttgcatcaatgggacatgttattgcgaggaaggattcaccggggaagactgcgggaagccgacttgtccccatgcgtgccacacacaaggaagatgcgaggaaggccagtgcgtgtgcgatgaaggattcgcgggcgttgattgttccgagaaacgatgccccgcggattgtcacaatagaggtcgctgcgtcgacggcaggtgtgaatgtgacgatggttttacaggcgcagattgcggcgagctgaaatgtcctaacggatgttctggccatggtcgctgtgtgaacggacagtgtgtgtgcgacgagggctatacgggcgaagactgcagccaactcagatgcccaaacgactgccacagcagaggacggtgtgttgaaggaaaatgcgtttgcgagcagggttttaagggatacgattgctccgatatgtcttgcccaaatgactgtcaccaacatggacggtgtgtaaatggcatgtgtgtgtgcgacgacgggtatacaggcgaggactgtcgcgaccgccaatgcccgcgggactgttccaatcggggactgtgtgtggatggacagtgtgtgtgcgaagacggttttaccgggcccgactgcgcagagctgtcttgtcctaacgattgccacgggcaggggcgttgcgtcaacggccagtgtgtgtgccatgaaggcttcatgggtaaggactgtaaggaacaaaggtgcccctccgattgtcatgggcaggggagatgcgtcgatgggcaatgcatttgccatgagggatttaccgggttggactgcggccagcattcttgcccatctgactgtaacaacctcggtcaatgtgtgtccggtcgctgtatctgcaacgagggctacagcggcgaggactgcagcgaagtgtcaccgcccaaggatctggtcgttacggaggttaccgaggagactgtgaaccttgcatgggacaatgagatgagggtgacggagtaccttgtcgtgtacactccgactcacgaaggcggcctcgagatgcagttcagagtgcctggagatcagacgagcaccattatacaggaacttgagcccggagtcgagtattttatcagagtcttcgccattctcgagaacaaaaaatcaatacctgtcagtgcccgcgtcgccacatacttgccagcgccagagggcctcaagtttaagtctataaaagagaccagtgtggaggtagagtgggatcccttggacattgccttcgaaacctgggaaataatttttcgtaatatgaataaggaagacgaaggcgagatcacgaagtccctacgcagacctgaaacctcatatcggcaaactgggttagcccctggccaggagtatgaaatctccttgcacattgttaagaataacactcgtggcccagggctcaagagggtaacaacaacaagattagacgccccctctcagatcgaagtaaaggacgttactgataccactgcactcatcacttggtttaagcccctggctgaaattgacggtattgagctcacgtatggaataaaggatgtccccggcgacaggacgacgattgatcttactgaagacgaaaaccagtacagtattgggaacttgaaaccagacaccgagtatgaggtgtccttaatcagccgccgcggcgatatgtcctccaacccagcaaaggagactttcaccaccggactggatgcaccccgtaaccttcggcgcgtgtcacaaaccgataactcaattacccttgagtggagaaatggaaaagctgcaatcgactcttaccgcatcaaatacgccccaatctccgggggcgaccacgccgaggtcgatgttcccaaatcccaacaggctacaactaaaacaacccttactggactgagaccaggaaccgagtacgggatcggtgtttccgcagtgaaggaggacaaggagtccaaccctgccaccattaatgcggccacagaacttgacaccccaaaggatctgcaggtgtcagagactgccgaaactagcctgaccttattgtggaagacccctctagccaagtttgaccggtatagattgaactactcactgcccacaggtcaatgggttggtgtacaactgccaaggaataccacctcctatgtgctcagaggactggagcccggtcaggaatataatgttctactaaccgcggagaagggaaggcacaagagtaagcctgcccgagtaaaagcaagcactgctaaggaacctgagatcggtaatcttaacgtcagcgacataactccagagtcctttaatctcagctggatggcaaccgacggtatttttgagacgtttactatcgagatcattgatagtaacaggttgctggaaactgtggagtataatatctctggcgctgagcgtaccgcacacatttccgggctcccaccctcgaccgattttattgtatatctctctgggcttgcaccttcaatccggacaaaaaccatctccgccactgctactacagagccaaaacctcagctgggaaccctaatcttcagcaatatcacacctaagtccttcaatatgtcatggaccactcaggcaggtttgttcgccaagatagtgattaatgtgagtgatgcgcatagtttacatgaatcccaacaatttactgtgtccggcgatgccaaacaggcccatattacaggcttggtcgagaacactgggtatgatgtgagtgtggcaggcactacattagccggcgacccaacaagaccgctgaccgctttcgtcattaccgaggctgagcctgaggtcgataacctgctcgtatcagatgctaccccagatggttttcgtctctcttggactgctgacgaaggggtgtttgacaatttcgtgttgaaaatccgcgatacaaagaaacagtctgagccactggagatcaccctgctggcccccgagcgcacgagggacattaccgggttacgggaggccaccgagtacgagattgagctatatggtatatccaagggcagacggagccagactgtcagtgccatcgccacgaccgctatgggctcacccaaagaagtgatattttccgatatcacggagaacagtgccacggtgagttggagggcacctactgcgcaggtggaatcttttcgtatcacctacgtaccgatcacagggggtacacctagcatggtgacggttgatgggactaagacacagacgaggctggtgaagctgatccccggggtggagtacctggtctctatcatcgctatgaagggatttgaggagagcgaaccagtcagtggaagctttaccactgctttggacgggccttccggtctggtcactgctaatattaccgactcagaagctctcgctcgatggcagcctgcaatcgctactgtggatagctacgtgatttcttacaccggagagaaggtgccggaaattacccggactgttagtggaaacacggtggagtacgctctcacagatttagagcccgcaacagaatatacacttcgtatttttgctgaaaagggcccgcagaaatcaagtacaataacagcaaaattcactacagaccttgactctccaagagatctcactgccacagaggtccaaagcgaaactgcattactcacatggagaccacctagagctagcgtgacaggatacctcttggtgtacgagtctgtcgacggcaccgttaaagaagttattgtggggcctgatacaacatcttattccctggcagatttgtctccaagtacacattataccgcaaaaattcaagctcttaacggcccactcagatccaatatgatacagacaatttttacgaccatcggcctcttgtacccatttcctaaagactgtagtcaggccatgttgaacggcgataccacgagcggtctttataccatctacctgaacggtgacaaagcagaggccctggaagttttctgcgatatgacctctgacggtggaggatggatcgttttcctgcggcgcaagaacggacgtgagaacttctatcagaattggaaagcatacgccgctggatttggagacagacgggaggaattttggctgggcttagataacctcaacaaaatcaccgctcaaggccaatatgaactccgtgtggatctccgggatcatggcgaaaccgcttttgcagtctacgataaattcagcgtcggagacgctaaaactagatataaacttaaggtagaggggtacagtggaaccgcgggggattctatggcatatcacaacggacgatcattttcaacgttcgacaaggatacagactcagcgattacaaactgcgctctatcttataaaggcgctttctggtatcgcaactgccatcgggttaatctgatgggacgctacggagataataaccattcccagggcgtaaactggtttcattggaaagggcacgaacattcaattcagtttgccgaaatgaagctcagacctagcaatttcaggaatctagaaggacgtaggaagcgcgcctag

SEQ ID NO: 248550 - RNA, 720 nt, synthetic construct
  misc_feature 1..720: note = Description of Artificial Sequence: Synthetic coding sequence
  source 1..720: mol_type = other RNA
atggcaaggggttgcttgtgttgcttaaaatatatgatgttcctctttaatctaattttctggttatgcgggtgcggacttctgggggtgggaatttggctgtccgttagccaagggaattttgcaacattcagtccatctttcccttcactgtctgctgctaatctagttatcgccatcgggaccatcgttatggtgacagggttcctcggatgcctgggcgccatcaaggaaaacaagtgccttctgctgagcttcttcatcgtactgcttgtcattctcttagccgaactcattcttctgattcttttttttgtgtacatggacaaagttaatgagaatgcaaagaaagacctgaaagagggactgctgctctaccataccgagaataacgtggggttaaagaatgcctggaacatcatccaggccgagatgcgatgttgcggagtgaccgattatacagactggtatccggttctgggagagaacactgtgccagacagatgttgtatggagaactcccagggatgtggacggaacgccaccacaccactttggcggacaggatgttacgagaaagttaagatgtggttcgacgacaacaagcacgtgttaggtacggtcgggatgtgtatactgatcatgcagatccttggaatggccttttctatgactttgtttcaacacattcatcgaacaggaaagaaatacgacgcttag

SEQ ID NO: 248551 - RNA, 720 nt, synthetic construct
  misc_feature 1..720: note = Description of Artificial Sequence: Synthetic coding sequence
  source 1..720: mol_type = other RNA
atgcctaaatcttgcgctgcaagacagtgttgcaacaggtatagcagccgtcgaaaacagttaacttttcaccgattccccttttcccggcctgagctgctcaaagaatgggttctgaacatcggaaggggaaacttcaagccaaaacagcacactgtgatttgctccgaacactttcgcccggaatgctttagcgcctttggcaatcgtaagaacctgaaacataatgccgtacctactgtatttgcttttcaggatcccacccagcaggtgcgtgagaatacagaccccgcttcggaacgcggtaatgcttccagtagccaaaaagaaaaggtcctgccagaagccggagccggcgaagactctccgggtcgcaatatggacacagcccttgaggaactgcagctgcctcctaacgcagaaggacatgtcaaacaagtgtctcctagacggccacaggcgactgaggctgtgggaagacccacgggccccgcaggccttaggaggactcctaacaaacagcccagcgatcattcctatgccctgcttgacctcgatagcctgaagaaaaagttgttcctcaccctaaaagaaaacgagaaacttaggaagaggttgcaggctcagagactggtcatgcggcggatgtcgtctcgactgcgggcgtgcaagggacaccaaggcctgcaggcaagacttggacccgaacagcagtcctag

SEQ ID NO: 248552 - RNA, 135 nt, synthetic construct
  misc_feature 1..135: note = Description of Artificial Sequence: Synthetic coding sequence
  source 1..135: mol_type = other RNA
atgtccgataaaccagacatggctgagattgagaagttcgacaagtcaaagctaaaaaagaccgaaacacaagagaaaaatcccctacccagcaaagaaaccattgagcaggagaaacaggccggcgaatcatag

SEQ ID NO: 248553 - RNA, 135 nt, synthetic construct
  misc_feature 1..135: note = Description of Artificial Sequence: Synthetic coding sequence
  source 1..135: mol_type = other RNA
atgagcgataaacccgacatggctgagatagagaagttcgataaatccaaacttaagaagaccgagacacaagagaagaatcctctccctagcaaagagaccatagagcaagaaaagcaggcaggagaaagttag

SEQ ID NO: 248554 - RNA, 135 nt, synthetic construct
  misc_feature 1..135: note = Description of Artificial Sequence: Synthetic coding sequence
  source 1..135: mol_type = other RNA
atgagcgataaacctgatatggctgaaatagagaaattcgacaagagcaaactgaagaagaccgagacccaggagaagaatcctctgccgtcaaaagaaacaatagaacaagagaagcaagctggcgagtcgtag

SEQ ID NO: 248555 - RNA, 135 nt, synthetic construct
  misc_feature 1..135: note = Description of Artificial Sequence: Synthetic coding sequence
  source 1..135: mol_type = other RNA
atgagtgacaagccagatatggccgaaatcgaaaagttcgacaaatctaaattaaagaaaacagaaactcaggagaagaatccattaccttctaaagaaacaatagagcaggagaaacaagcaggggagtcctag

SEQ ID NO: 248556 - RNA, 3042 nt, synthetic construct
  misc_feature 1..3042: note = Description of Artificial Sequence: Synthetic coding sequence
  source 1..3042: mol_type = other RNA
atgggactgggtaccttgagtccaaggatgctggtatggctcgtggcaagcggtatcgtgttctacggcgaattgtgggtctgcgccggtctggattacgattacactttcgacggtaacgaggaagataagactgagacgatcgattacaaggatccatgcaaggcagcagttttctggggggatattgccttagatgacgaggatctgaatatctttcagatcgatagaaccatagacctgacacaaaacccgttcggaaacctgggacacactacgggagggctaggtgatcacgctatgtccaagaagaggggcgccctttaccagctcatcgacagaatccgcagaatcgggtttggactagaacagaataacaccgtcaaaggaaaggttcccttacaattttcaggccagaatgagaagaatagagtgccccgggcagccacatcccgtacagaacggatctggcctggaggtgtgattccatacgtgatcggcggaaattttactggctcccagcgggccatgttcaaacaggccatgagacactgggaaaaacacacttgcgttaccttcattgagcgctccgacgaggaaagctacatcgtttttacgtaccgcccctgtggatgctgctcttatgtcggaagaagagggaatgggccccaagccatttctatcggtaaaaattgcgacaagttcgggattgtggtccatgagctcggacatgtgatcgggttctggcacgagcacactagacccgaccgggataatcatgtgaccatcatcagagaaaatattcagccgggtcaggaatataattttctgaagatggaaccaggcgaggtgaacagtttgggggaacgctacgacttcgactccatcatgcactacgcccgtaataccttctcacgtggcatgtttctggacacaatcctaccctccagggacgataatggtatcagacctgccattggccagcgcactcgactctcgaaaggcgatattgctcaggctaggaagttgtatcggtgccccgcatgcggcgaaactctgcaggagtccaacggaaacctgagctccccaggctttcctaatggttatcctagttacacacattgcatttggagagtgtccgttacacctggagagaaaatcgtgctcaacttcactaccatggatttgtacaagtcttcattgtgttggtatgattatattgaagtgcgagatggatattggagaaagagtccacttttgggacgtttttgtggggataagctgccagaggtcctgaccagcacagacagccgtatgtggattgaatttcggagcagttctaactgggtgggcaaaggtttcgccgctgtgtacgaggctatatgtggcggagaaattagaaagaacgaagggcagattcaaagtcccaactatcctgacgactataggcctatgaaagaatgcgtgtggaaaataactgtgtcagagagttaccacgtcggcctcacctttcagtcctttgagatcgagaggcacgacaattgtgcctacgattatctggaggtgagagacggaacttccgagaacagcccactgattggacgtttctgtggatatgataagcccgaagatattcgatcaaccagcaacaccttgtggatgaaattcgtctcagatggcacagttaataaagcaggcttcgccgcaaacttctttaaggaggaggatgaatgtgccaaaccagacaggggaggctgcgaacaaaggtgcctaaataccctcggatcttatcagtgtgcatgtgagccaggctacgagctcggtcctgataggcgcagctgcgaggctgcatgtggcggcctgcttaccaagctcaacggtacaataactactcctgggtggccaaaagaataccctccaaacaagaattgcgtatggcaggtggtggctccgactcaatatagaatttccgtgaagttcgagtttttcgaactcgaggggaacgaggtgtgtaaatacgactatgtggagatatggtccggcttgtcatccgagtccaagctgcacggaaagttttgcggcgcagaagtcccggaagtcatcacaagtcaattcaacaatatgcgaatcgagtttaaatccgacaacactgtgtctaagaaagggttcaaagcccactttttcagtgataaggacgaatgtagcaaagacaatggtggctgccagcacgagtgcgtgaacaccatggggagctacatgtgtcagtgccgaaatgggttcgtgttgcacgataataagcacgactgtaaggaagccgagtgtgaacagaagattcattctccgtcaggcctgataacgagccccaactggccagacaagtacccctccagaaaagaatgcacgtgggaaatctccgctacaccaggacatcgcattaaactagccttctctgaattcgagattgaacagcaccaggagtgcgcctacgaccacctggaagtattcgatggtgaaacagaaaagagcccaattctaggacgcctctgtgggaataagataccagacccgttggttgctaccggcaataaaatgttcgtgcggtttgtgtcagatgcgagcgtgcagagaaaggggtttcaagccacccactctacagagtgtgggggacggctgaaggctgaatcaaagcctcgggacttatactctcacgctcagttcggggataataactatccaggtcaagttgactgtgaatggctgctcgtttctgaaagaggatcacgccttgaactgtcttttcaaacctttgaagtggaagaggaagcagactgtgggtacgattatgtggaactctttgacggactcgattctacagctgttggactggggcggttctgtggttcaggacccccagaggagatttattctattggcgatagtgtgttgatccatttccacaccgatgataccattaacaagaaggggttccacatccggtataagtctattcgatatcctgacaccacgcacactaaaaaatag

SEQ ID NO: 248557 - RNA, 1596 nt, synthetic construct
  misc_feature 1..1596: note = Description of Artificial Sequence: Synthetic coding sequence
  source 1..1596: mol_type = other RNA
atgatctcccctgacccacggccgagccccggattagcacgctgggctgagtcatacgaagcgaaatgcgaaagaaggcaagaaatccgagagagtaggagatgtcgccccaacgttaccacctgccgccaagtggggaaaacgctgcggatccagcaaagagaacagttacagagggccaggttgcaacagtttttccgccgccgcaatcttgaacttgaagagaaaggtaaggcccagcatcctcaagcccgcgaacagggcccttctaggcgccccggccaggtgacaggtacctccagtgaagtgttcccagcccagcatccgcccccaagcgggatctgtagggacctgagcgatcacttatcctctcaggcaggcgggctgcctcctcaagatacaccaattaaaaagccgcccaagcatcatcgcgggacccagacaaaggcagagggccctacaatcaaaaacgacgcttctcaacagactaattacggtgttgccgttcttgacaaagaaatcatacagctgtcagactatctgaaggaagctttacaacgagagctggtgctgaagcagaagatggtcatattgcaagacttattgtcaaccctaattcaagctagtgatagctcatggaaaggacagctcaacgaggataaactgaaaggtaagctgcggagtctggagaaccagctttacacctgtacccagaaatacagcccttgggggatgaaaaaagtgttattagaaatggaggaccagaagaactcatacgagcagaaagccaaggagagcctgcagaaagtgcttgaggagaagatgaatgcggaacagcagctccagtccacgcagcgctctctggcccttgccgaacaaaagtgtgaagaatggcggtctcagtatgaagcactcaaggaggactggcgcacactaggcacccagcatagagagctagagtcccaattacacgttctacagtccaagctccagggggctgactcccgggaccttcagatgaaccaggctctccggttcctggaaaacgaacaccagcagttgcaggctaagattgagtgcctgcagggagaccgagatctgtgctcacttgacacccaggatttgcaagaccagctgaagaggtccgaggcagaaaagctgactcttgtgactcgggtgcagcaacttcaggggctattgcaaaatcagagtctacagcttcaggagcaggagaagcttttaaccaaaaaagaccaggccctacctgtctggagccccaaatcttttccgaacgaggtggaacctgagggcacgggcaaggagaaggactgggatctgagagaccagttgcagaaaaagacattgcagctgcaggcaaaggaaaaagaatgtcgtgaacttcactcagagcttgacaatctgagcgacgagtatctatcctgcctccggaaactgcagcactgtcgagaggaacttaatcaatcgcagcagctgccacctcggcgccagtgcggaaggtggctgcctgtactcatggtggtgatcgctgcagcactcgcggtattcctagcaaataaggacaaccttatgatctag

SEQ ID NO: 248558 - RNA, 1359 nt, synthetic construct
  misc_feature 1..1359: note = Description of Artificial Sequence: Synthetic coding sequence
  source 1..1359: mol_type = other RNA
atgtcgaccacttttccaggcctggtgcacgacgccgaaattcgtcacgacgggagcaacagttaccgccttatgcagttgggttgtttagagtccgtggcaaatagtacagttgcttattcatcttctagtcctttgacctattctactacgggaacagagtttgctagcccgtacttctctactaaccatcagtacaccccgttgcaccatcaatctttccactatgagtttcagcatagtcaccccgctgtgactcctgacgcatacagcctcaatagccttcaccactctcagcaatactaccaacagattcatcacggcgaaccgaccgacttcattaaccttcacaacgccagagcactgaagtccagctgcctcgatgagcagcgaagggagctggggtgcctggatgcataccggagacatgatctgtctctgatgtctcacggctctcagtatggaatgcaccctgatcaacgcctattgccaggcccgtccctaggcctggctgcagcgggcgctgatgatctgcagggctccgtcgaagcccagtgtggactcgtgctcaatggacagggaggagttattagaagaggaggaacttgtgtggtgaaccccaccgaccttttctgttccgttccagggagattaagcctactcagttcaaccagcaaatacaaagttacaatcgccgaagtcaagagacgactgtctcctcctgaatgcctgaacgcctcacttcttggagggatcctgcggagggcgaagagcaaaaacggaggccgatgcctccgggaaaaacttgaccgcctgggcctgaacttacctgctgggagaagaaaagctgcaaatgtaactctcttgaccagtctcgtcgaaggggaagcgctgcatctggctagggactttggttacacgtgcgagacggagttccccgcaaaagccgttggggagcaccttgcacgacagcatatggaacagaaagagcagacagctaggaaaaagatgatcctggctaccaagcaaatctgcaaagagtttcaggaccttctttcccaggacagatctcccctgggctctagtcgccctacgccaattcttgaccttgacatacagagacacctgactcatttttctcttatcacccacggtttcggaactccggcaatctgcgccgcactgtccaccttccagactgtcctgagtgaaatgctgaactacctagagaagcacacaactcacaagaatggaggtgccgctgacagtggacagggccatgctaattcagagaaagcccctcttaggaaaacatcagaagccgctgtaaaagaagggaagaccgaaaagactgattag

SEQ ID NO: 248559 - RNA, 2244 nt, synthetic construct
  misc_feature 1..2244: note = Description of Artificial Sequence: Synthetic coding sequence
  source 1..2244: mol_type = other RNA
atggccgacgaggctgccctggctttgcagcctggggggagcccttcagccgcgggcgcagatcgggaggcggcctcgtcacctgctggtgaaccgctccgcaaaagaccaaggagagatggcccaggcttggaacgaagtccaggtgagccgggaggcgccgccccagagagagaagtgccagctgctgctcgcggatgccctggagccgccgcagctgcactgtggcgggaggccgaagccgaagccgcagccgccggaggggagcaggaggcccaggctacggcagctgcaggagagggcgacaatggcccagggctccaggggccctcgcgagagccacccctcgcggataatttatatgacgaggacgacgacgatgaaggagaggaagaggaggaggctgccgctgctgccatcggctaccgggacaatctgctattcggtgatgagatcattactaatgggttccacagttgcgagagcgacgaggaggatcgcgcatcacatgcttcttcgtccgattggacacctaggccacgaatcggcccctataccttcgtgcagcaacatctcatgataggaacagacccccgcaccattctaaaagatctacttcccgagaccataccacctccagaactggatgatatgacactgtggcaaatcgtgatcaatattctctctgagccccctaagaggaaaaagagaaaggatatcaacacaatagaagatgcagtgaaactcttacaggaatgcaagaagattattgtgcttactggggctggggtttccgtctcctgtggaattccagactttcgttcaagagacggcatttatgcacgcctggccgtggactttcctgatctgcccgatcctcaggccatgtttgatattgaatacttcagaaaggacccacggccatttttcaagtttgcaaaagagatatatcctggccagtttcaacctagcctgtgccataaatttatcgcactgtcagacaaggaaggtaaactcttacgcaactatacacagaacatcgataccctcgagcaggtggccggcattcaacgaataatccagtgccacggctccttcgcgacagcatcttgtctgatctgtaaatacaaagtcgattgtgaggctgtcaggggagatatcttcaatcaggttgtccctagatgtcctcgatgcccagcagacgagcctctggccattatgaagcccgaaatcgtcttctttggggagaatttgcctgagcagtttcatcgggccatgaaatacgataaagatgaagttgatctcctaattgtgatcggatcatccctgaaggttaggccagtggcccttattccctcctctatcccccacgaagtgccacagatcctgatcaacagggaacctctcccccacttacatttcgatgtggagttgctcggggattgcgacgttattataaacgaactgtgccaccggttaggcggcgagtatgccaagctgtgctgcaacccagtcaaactctctgaaataaccgagaagccacctcgaacacagaaagaacttgcctacctctccgaactccccccaactcctctccacgtctcggaagacagttcatcccccgagcgcacatccccacccgactcttccgtgatcgtgactcttcttgaccaggccgcaaaatcaaatgacgaccttgacgtgagcgaaagcaaagggtgcatggaggagaaaccacaagaagtccagactagtcgaaatgttgaatctattgcagagcagatggagaaccccgacctaaagaatgtgggcagctccactggagagaagaacgagagaacatctgtagccggtacagtcagaaaatgttggcccaatcgcgttgcaaaagagcagatttctcgccgactggatggcaatcagtatctgtttctcccgcccaatcggtacatattccatggagccgaggtgtacagcgatagtgaagatgacgtactgagttcaagcagctgtggaagcaactccgattctggtacatgccagtcaccatccctggaggagccaatggaagacgaaagtgaaatagaggagttttacaatggtctggaagacgagcctgacgtccctgaaagggccggcggggccggatttggtaccgatggcgacgaccaagaggcgatcaatgaagctatctctgtgaaacaggaggttacagacatgaactatccaagtaacaagagttag

SEQ ID NO: 248560 - RNA, 3498 nt, synthetic construct
  misc_feature 1..3498: note = Description of Artificial Sequence: Synthetic coding sequence
  source 1..3498: mol_type = other RNA
atgcaagacgtgcagggccctagaccgggatcacccggcgatgccgaagatcgtcgggagctcgggcttcacaggggtgaagtgaacttcggaggttccggtaaaaaaaggggtaagttcgtgcgcgtgccatcaggcgttgcaccatctgtactgtttgacctgttgttagcagaatggcatcttccagcacccaatctagttgtaagcttggtaggcgaagaacagccatttgcaatgaagtcatggttacgggacgtgctgcggaaaggtcttgtgaaggctgcccagtccacaggggcctggattctcacatcagcactgcgcgtgggtctcgctaggcatgtcgggcaggctgttagagatcattcgctcgcatctacctcaactaaagtccgtgtcgtcgctgtgggcatggcctcactggggagggtccttcatcggcgcatactcgaagaagcgcaagaagactttcctgtccactaccctgaagatgacggagggtcccagggacccttgtgcagcctggactccaaccttagccattttatcctagtcgagcctggtcccccagggaagggcgatgggctgactgagctgagactcagactcgaaaaacacatcagtgagcagagggccggatatggaggtacaggatccatcgagattccagtgttgtgtctcctggtgaatggtgatcccaacacccttgaaaggatttccagggccgtcgagcaggctgcgccttggttgatccttgttggctcaggaggaattgcagacgtactcgccgccctggtgaaccaaccccatttgcttgttccaaaagtcgcagaaaaacaattcaaagagaaatttccctcaaagcattttagttgggaagacattgtgcgttggaccaaactgctgcagaacatcacaagtcatcaacatctcctaacagtgtatgactttgaacaagaaggatccgaggagctcgataccgtgattcttaaagcgttggtgaaggcatgtaagagccactcccaggaaccacaagattaccttgacgagctcaagctggcagtagcttgggacagagtggatattgccaagtcagagatctttaacggtgatgtagagtggaagtcctgtgaccttgaagaagttatggttgacgccctcgtgagtaacaaacctgaattcgttaggttattcgttgacaatggcgccgatgtggcggattttctgacttacggtagactccaggaactgtacagatcggtgtctagaaaaagccttctgttcgatctgctgcaaaggaaacaggaggaagccaggctgaccttggcagggctgggcacccagcaagccagagagcctcctgcaggaccaccagccttctcccttcacgaggtgagccgggtcctgaaggatttccttcaagacgcctgcagaggattctatcaggacggcagacccggggataggagacgcgccgagaaagggcccgcaaagcgacccaccggccagaagtggctgctcgacctcaaccagaaaagcgagaacccctggcgcgacctcttcctgtgggcagtgctccagaacagacacgaaatggctacttatttttgggcgatgggacaagaaggtgtcgctgctgcactcgcagcctgtaagatcctgaaggaaatgtcacacttagaaaccgaggctgaggccgcgcgagccacaagggaagccaagtacgagaggctggccctggatctgttcagcgagtgctacagtaattccgaggctcgagccttcgccttactcgtgcgcaggaaccgctgttggtctaagacaacttgcctgcatcttgctacagaagccgacgccaaagccttttttgcccacgacggcgtgcaggccttcctgacaaggatctggtggggggacatggctgctggaaccccgatcctgagactgctgggtgcatttttgtgtccagccctcgtgtacacaaatctcattaccttttccgaggaggcacctctgcggaccggcctggaagacctacaggacctggattccctggatacagaaaagtccccactctacggactacagtcacgagtagaagaactggtcgaagcacctagagctcagggtgacagaggcccacgggcagtgttcttgctcacacgatggcgcaaattctggggggcgcccgtgacggtgttccttgggaatgtagtgatgtatttcgcctttctctttctatttacctacgtgctcctggtggactttcggccccctccacagggccctagtgggcctgaggtaacactgtacttctgggtgtttacactggtgcttgaggagatcaggcaaggcttctttactgacgaagacacgcatctcgtgaagaaatttactctgtacgtgggcgataattggaacaaatgtgacatggtggctatctttctgtttattgtgggcgtcacctgccggatgctcccatccgcatttgaagccggccgcacggtgttggctatggatttcatggtgttcaccctaaggctcattcacatattcgccattcacaagcagctaggcccaaaaattatcgtcgtcgagagaatgatgaaagatgttttctttttcctgttcttcttaagtgtgtggctggtggcttacggggtgaccacacaagcacttctacacccccacgacggtagactagagtggatctttcgacgggtcctttatcggccctacttacagatttttggacaaattcctctggacgaaattgacgaagccagagtgaactgctcgactcaccccctgctgctggaagactcccccagttgtccgtccctctatgccaactggctggttattcttctcctagtgaccttcctactggtgactaacgttctactaatgaacctcctgatcgcgatgttcagctatacgttccaggttgttcaggggaacgccgacatgttctggaaatttcagcgctacaacctgattgttgagtaccatgagagacccgccttggcaccaccttttattctactgtcacacctctcgctcacgcttcgccgggtgtttaagaaagaggcagagcacaagcgcgagcatctggaaagggacctgcctgaccctctggatcagaaggtggtcacctgggaaacagtgcagaaagagaatttcctcagcaaaatggagaagagaaggagagatagtgagggcgaggtcttgcggaagacggcgcacagagtggattttatagccaaatatctcggaggacttcgcgagcaggagaagcggattaagtgcctagaaagccagattaactactgcagtgtcctcgtttcctccgtcgccgatgtgctggcacagggaggcgggccaagatcctctcaacattgcggtgagggcagccagctggttgccgccgatcaccgaggggggctggatggatgggagcagcccggagcaggtcaacctccaagcgatacctag

SEQ ID NO: 248561 - RNA, 828 nt, synthetic construct
  misc_feature 1..828: note = Description of Artificial Sequence: Synthetic coding sequence
  source 1..828: mol_type = other RNA
atgttgaacctccttcttctggccctgcccgttctcgcttcccgcgcgtatgctgcaccagcgccaggacaagcattgcaaagagtagggatcgtgggcggtcaggaagcgccccgatcgaagtggccttggcaggttagtttgagagttcacggtccatactggatgcatttctgcggcgggagtttgatacatccccaatgggtgctgactgccgcacactgtgttggtccagacgttaaagacctggccgctctccgggtgcagttgcgggagcagcacctgtactatcaggaccaactgctgcccgtcagccgtattatagtacatccacagttttacaccgctcagattggcgcagacattgctcttctggaattggaagaacccgttaatgtatcaagccacgtccataccgtaactcttcctcccgcttccgaaacctttcccccaggcatgccatgctgggtaacagggtggggggatgttgataatgatgaaaggctcccacccccatttcccctcaagcaggtgaaggttcccataatggaaaaccacatatgtgatgccaagtaccacctgggcgcatacaccggcgatgatgttcgcatcgttcgggatgacatgttatgcgcgggcaatacaaggagagattcttgccaaggagacagtggtggccctctagtgtgtaaggtcaacgggacttggctgcaagcgggcgtcgtgtcatggggagaagggtgcgcccagcccaacaggcctggcatttacaccagggttacatactatctcgactggatccatcattacgtgccaaagaagccatag

SEQ ID NO: 248562 - RNA, 849 nt, synthetic construct
  misc_feature 1..849: note = Description of Artificial Sequence: Synthetic coding sequence
  source 1..849: mol_type = other RNA
atgctgctccttgctcctcagatgttaaacctcctcctcctcgccctgcccgtattagcgtctcgtgcgtatgccgcgcccgctcccggacaggcacttcagagggtcggaattgtgggcggccaagaagcaccccgatccaaatggccttggcaggtttcactgcgggtgcacggcccatactggatgcatttttgcggtggctccctgattcatccccagtgggtcttgacagcggcgcactgtgtaggtcccgatgttaaagacctggctgccctaagggtacagcttcgcgagcagcatctttactaccaggaccaactgctccccgtctcacgtatcatcgtccatccccagttctacaccgcacaaatcggggccgatatcgccctactagaattggaagaaccagttaatgttagttcccatgttcatactgtcaccctgccaccagccagtgagacttttcctcctgggatgccgtgctgggtcactggctggggagatgtggataacgacgagaggctgcccccgccattccccctgaagcaagtgaaagtcccaatcatggagaatcacatttgcgacgctaagtatcacctgggggcttacaccggtgatgatgtgcgcattgtgcgagatgatatgctctgcgccgggaacacaagacgggacagttgccagggcgattcgggtggcccactagtctgcaaggttaatggcacttggctgcaagccggcgtggtttcttggggcgagggctgcgcccaacccaaccgccctggtatttacactagagttacgtattacctagactggatccaccactatgtgcccaagaagccctag

SEQ ID NO: 248563 - RNA, 492 nt, synthetic construct
  misc_feature 1..492: note = Description of Artificial Sequence: Synthetic coding sequence
  source 1..492: mol_type = other RNA
atggccgagggaggggggcaaaaccaccatgaagtggtcaaatttatggacgtttaccagcgtagctactgccaccctatagagacccttgtagatatcttccaggagtatcctgatgagatcgagtatatattcaaaccgagttgcgttccattgatgaggtgcgggggttgttgcaacgacgaaggcctcgagtgcgtgcccaccgaagagtcaaacatcacgatgcagataatgagaattaagccacaccagggtcagcacatcggtgagatgagtttcctgcagcataataagtgtgaatgcagacccaagaaggaccgagcccgacaagagaatccttgtggcccatgtagcgagcgccgtaaacacctttttgttcaggacccacagacttgcaagtgcagctgtaaaaacactgatagcaggtgtaaggccagacaactagagctgaatgagcgcacgtgtagatgtgacaaaccacgacgatag

SEQ ID NO: 248564 - RNA, 555 nt, synthetic construct
  misc_feature 1..555: note = Description of Artificial Sequence: Synthetic coding sequence
  source 1..555: mol_type = other RNA
atgttacagatggcggggcagtgctcccagaatgagtatttcgacagcctgcttcatgcgtgtatcccctgtcagctgagatgttctagtaatacacctccactcacttgtcagagatattgtaatgcatccgtgacgaattcagtgaaagggacaaatgctatcctgtggacatgcctcgggttgagtctgataatcagcctggccgtgttcgtcttaatgtttcttctgcgcaaaataaattctgaaccacttaaagatgagttcaaaaatacaggttcagggcttctggggatggctaatatcgatttggaaaagtctaggacaggagatgagattatcctacctaggggactggaatataccgtggaagaatgcacatgcgaggactgcattaagagcaagcccaaagtggactccgatcactgctttcctctgcctgcaatggaagagggagccacaattctggtgaccacaaagacaaacgattattgcaaatcccttcccgccgccctttccgccacagaaatagagaagagtattagcgcaagatag

SEQ ID NO: 248565 - RNA, 567 nt, synthetic construct
  misc_feature 1..567: note = Description of Artificial Sequence: Synthetic coding sequence
  source 1..567: mol_type = other RNA
atgattatctacagagacctcattagccacgatgagatgtttagcgatatctacaagatacgagaaatagcagacggcctgtgccttgaggttgaaggcaagatggtaagtcggactgaaggaaatattgacgattccctgatcggggggaatgcatctgccgaggggcccgaaggagagggaacagaatcaactgtgatcaccggggtcgacatcgtcatgaatcatcacctgcaggagacctcttttacaaaggaagcctacaaaaagtacatcaaggactatatgaaatcaattaagggcaaattggaagaacagaggccagagagggtgaaaccattcatgactggggccgcagaacagatcaagcacattttagccaatttcaaaaactaccagtttttcatcggagagaatatgaaccctgatggcatggtggctctgctggactaccgagaggatggagtgaccccatacatgatattcttcaaggacggactcgagatggaaaagtgcgtgtctactagaaagtgggtaaaaatcaataacgtgaaaaagactttctag

SEQ ID NO: 248566 - RNA, 417 nt, synthetic construct
  misc_feature 1..417: note = Description of Artificial Sequence: Synthetic coding sequence
  source 1..417: mol_type = other RNA
atggtgtctaggactgaaggaaacatagatgatagcctcataggggggaatgcatctgctgagggtcccgaaggtgagggcaccgagagcacagtgattacgggtgtagatatcgtgatgaatcaccaccttcaggagacctcgttcaccaaagaggcatataaaaaatacatcaaggactacatgaaatctattaaaggcaaactggaggagcaaagaccagaaagagtcaagccgtttatgacaggtgcagccgaacagatcaaacacatacttgccaatttcaagaattaccaattttttataggtgagaacatgaatccagatggaatggtagcgttgctagactacagggaagatggggtgactccgtacatgatttttttcaaagatggcctcgagatggaaaagtgctag

SEQ ID NO: 248567 - RNA, 417 nt, synthetic construct
  misc_feature 1..417: note = Description of Artificial Sequence: Synthetic coding sequence
  source 1..417: mol_type = other RNA
atggtgtcacggactgagggaaacatcgacgacagtttaattgggggtaacgcaagcgcggaggggccagaaggcgaaggaacagagtccactgtcattactggtgtggatatcgtgatgaatcaccacctacaggagacatcatttacaaaggaagcctataaaaaatatatcaaagattacatgaagtctattaagggaaagcttgaggagcagcgccctgagcgagtgaagccatttatgacaggtgccgccgaacaaattaagcatatcctagcaaatttcaaaaattatcagttttttattggagaaaacatgaatccagacggcatggtcgccctgctggactaccgggaagatggggtcacaccttatatgatctttttcaaggacggtctcgaaatggaaaaatgttag

SEQ ID NO: 248568 - RNA, 483 nt, synthetic construct
  misc_feature 1..483: note = Description of Artificial Sequence: Synthetic coding sequence
  source 1..483: mol_type = other RNA
atgtttagcgatatctataagattcgggaaatcgcggatggactgtgtctcgaagtcgaaggtaagatggtttcaagaacagagggtaatatcgatgatagtctgatagggggcaatgcaagcgccgagggtcctgaaggagagggcactgagtcaaccgtgattacaggcgtcgacatcgtgatgaatcatcacctgcaggaaacttctttcaccaaggaggcttacaagaaatacattaaagactacatgaaaagtattaagggcaaattagaagaacagaggcccgagagagtgaaacctttcatgacgggcgccgcagaacagatcaagcacatccttgcaaactttaagaactaccagtttttcattggcgaaaacatgaatcctgacgggatggtggctctgctcgactaccgtgaagatggcgtgactccatatatgattttttttaaggatggactggaaatggagaaatgttag

SEQ ID NO: 248569 - RNA, 519 nt, synthetic construct
  misc_feature 1..519: note = Description of Artificial Sequence: Synthetic coding sequence
  source 1..519: mol_type = other RNA
atgattatttatagagacctaatctcacatgacgagatgttctctgatatctacaaaatccgcgagatcgcagacgggctgtgcctggaagtcgaaggcaagatggtgtcccggaccgagggcaatatagatgactcattaattgggggtaatgcctctgcagagggtcctgaaggtgaggggacagagagtacagttattactggcgtggatatcgtcatgaaccatcatcttcaagagacttcatttactaaagaggcctataaaaaatatatcaaggactatatgaaatctatcaaaggtaaactagaagagcaacggcctgaaagagtgaaaccctttatgactggcgctgccgagcagataaagcatatcttggcaaactttaagaattaccagtttttcattggcgaaaatatgaacccagatggaatggtggccctattggattacagggaggacggagtgaccccgtacatgatttttttcaaagacgggttagagatggaaaagtgctag

SEQ ID NO: 248570 - RNA, 1278 nt, synthetic construct
  misc_feature 1..1278: note = Description of Artificial Sequence: Synthetic coding sequence
  source 1..1278: mol_type = other RNA
atggcaggtgccgaaggagctgccggtcgtcagagtgagttggaacctgtggtctcactcgtcgatgtcctcgaggaggatgaagagctcgagaacgaggcctgcgctgttctgggaggctccgatagtgaaaaatgcagttactctcagggttccgtgaagagacaagcactctatgcctgtagtacttgcacccctgaaggcgaagagcctgccggcatatgtctagcctgttcctacgaatgccacggatcacacaagctgtttgaattgtatactaaacggaacttcaggtgcgattgcgggaacagcaaattcaagaacctggaatgcaagttactacctgacaaggccaaagtgaatagtggaaataagtataatgataattttttcggactgtattgtatctgtaagcgaccttatcccgacccggaagacgagatccccgatgagatgatacagtgtgtagtatgcgaagattggtttcacggaaggcatctgggggctatcccacccgaaagcggagacttccaggaaatggtgtgccaagcatgtatgaagaggtgctctttcctgtgggcctatgccgcccaactggcagtgactaagatttcaacagaggacgacggtctcgtgcggaacattgacggcataggtgaccaagaggtcatcaaacctgaaaacggcgaacatcaggactctaccctaaaggaagacgtacctgaacagggaaaggacgatgtgcgcgaagttaaggtcgagcaaaactccgaaccctgcgctggctctagcagcgaaagtgatctccagacagtctttaagaacgaatccttgaacgctgaaagtaaaagcggttgcaagctacaagaactgaaagccaaacaactgattaaaaaggataccgccacgtactggccccttaattggaggtccaaattgtgcacctgtcaagactgtatgaaaatgtacggagatcttgatgtgctctttctcaccgatgagtacgacacggtcctggcctacgagaataagggtaaaatcgctcaggcaacggatcgcagtgatcccctgatggatacacttagctcaatgaatcgggtacagcaggtggaactgatttgtgaatacaatgatctgaaaaccgagctaaaagattatctgaagcgatttgccgatgagggtaccgtggtgaagcgagaagatatccaacaattctttgaggaatttcagtcgaagaagagacgaagggtcgatgggatgcagtactactgctcgtag

SEQ ID NO: 248571 - RNA, 3234 nt, synthetic construct
  misc_feature 1..3234: note = Description of Artificial Sequence: Synthetic coding sequence
  source 1..3234: mol_type = other RNA
atgaccgccgaactgcaacaggacgacgctgctggcgccgccgatggacatgggtcaagttgtcaaatgttgcttaatcagcttagagaaatcactgggatacaggacccttcatttctgcatgaggcccttaaggcttccaatggcgacattacccaagctgtctctttattaacggatgaaagggtcaaggaacccagccaagacacagtggccaccgagccctcagaggtcgagggctctgcagctaataaggaagtattggccaaagtgattgatttgacccacgacaataaagacgatttgcaagctgctattgccctcagtttactggagagtcctaaaattcaggccgacgggcgagatttaaacaggatgcacgaagctacctctgctgagacaaagcgttccaagcgcaagagatgcgaagtgtggggggaaaaccccaatccaaacgactggcgtcgggtggatggctggccagtggggttaaagaatgtaggcaacacatgttggtttagtgcagtcattcagtccctgttccaactcccagagttccgtcggctcgttctatcctacagccttccccaaaacgtgctagagaactgtcggagtcacactgagaagagaaacataatgtttatgcaggagctgcaatacctgtttgcattaatgatgggctccaatagaaagttcgtagacccctctgccgctctcgatctcctgaaaggagcgttccgtagttccgaagagcaacaacaggatgtctcagagtttacacataaattactcgactggctggaggatgcctttcagctggcagttaatgtgaacagccctaggaacaagagcgagaaccccatggtgcaactgttctacggcacattccttaccgagggtgtgcgagagggcaaaccattttgtaataatgagaccttcggacaataccccctacaagttaatggatatcggaacctggatgaatgtcttgaaggggcgatggtggagggcgacgtggaactgctacccagcgatcattccgtgaaatacggccaggaaaggtggttcacaaaacttccaccggtgttgacattcgagctctctcggttcgagttcaaccaatcgctcggacagcctgagaagattcataataagttagaatttccccaaatcatttatatggaccgctatatgtacagaagcaaggaactgatccgtaacaaacgcgaatgtatccgtaaactcaaggaagagattaagatcctccaacagaagttggagaggtacgtgaaatatggctcgggcccagccagattcccactgccagatatgctgaaatatgtcattgagttcgcaagcaccaaaccagcaagtgagtcgtgcccacccgagtctgatacccacatgactttgccactgagctcagtgcattgcagtgtgtctgaccagacttctaaagaatcaaccagcacagaatcctctagccaggatgtagaatctacgtttagttcacctgaggactcattaccaaaatctaagcctcttacatcctccaggagttctatggagatgccttcccagccggcaccgcgcaccgtcaccgacgaagagataaatttcgtgaaaacgtgcctacaacggtggcggtccgagatcgagcaggacattcaggacctaaagacgtgtatcgcaagcacaacccagactatagaacagatgtattgtgaccctttactgcggcaggttccttacagattgcatgccgttctggtgcatgagggtcaggcaaacgcaggacattattgggcctatatatataaccagccacgccagtcatggctgaagtacaatgacatctcggtgaccgagtcaagttgggaagaggtagagcgggatagctatggcgggctccgcaacgtctccgcttactgcctgatgtacatcaacgacaagctcccatactttaatgcggaggctgctcccaccgagagtgaccagatgagtgaggttgaggccttatctgttgaactcaagcattacatccaagaggacaactggcgtttcgaacaggaggtcgaagagtgggaagaggaacagtcctgtaaaattccgcagatggagtcctccacaaattcatcttcacaagattactccacctcgcaggagccctccgtcgctagttcacatggggtcaggtgcctgtccagtgaacacgccgtaatagtgaaggaacagaccgcgcaggcgatcgccaacacggctagagcttacgaaaaatctggtgtcgaggccgcgctcagcgaggtcatgctgtcacctgctatgcagggggtcatccttgccatagccaaagcacgccagactttcgacagggatgggtctgaagcgggccttatcaaagcatttcacgaagaatatagtaggttatatcagcttgccaaagaaacacccacctctcatagcgacccccgcttacagcacgttttggtgtatttcttccaaaacgaggccccgaagcgggttgtcgagcgcaccctactagaacagttcgcagacaaaaacctttcctacgacgagaggtcaataagtatcatgaaagtcgctcaagcaaaactgaaagaaatcgggccggacgacatgaacatggaagagtataaaaaatggcacgaagattattctctcttccggaaagtgagcgtttatctcctgactggcctggaactctatcagaagggcaaataccaggaagctctgtcctatctagtgtacgcttaccagtctaacgccgccctgctgatgaaaggaccccggaggggtgttaaagaatcagttatcgcgctgtaccgacgcaaatgtctgctggagctcaacgctaaggcagccagcctcttcgagacaaatgatgaccatagtgttacggaaggaatcaatgttatgaatgaactgataataccttgtatccacctgatcatcaataacgacattagcaaagatgaccttgacgccatagaggtaatgcgcaaccattggtgttcttacctggggcaggacattgcagaaaatctccagctgtgcctgggtgaattccttcccaggctgttggatccctctgccgagatcatcgtcctcaaggaaccgcccacgatcaggcctaattccccttacgacctttgtagccgctttgctgccgtcatggagagcatacagggggtctccaccgtcaccgtcaaatag

SEQ ID NO: 248572 - RNA, 2274 nt, synthetic construct
  misc_feature 1..2274: note = Description of Artificial Sequence: Synthetic coding sequence
  source 1..2274: mol_type = other RNA
atggttccagacactgcctgtgtgctgctcctgaccctggccgcactgggagcgagtggccaggggcaaagtccgctgggaagtgatctcggtccacagatgcttcgcgaactacaggaaacaaacgctgctctgcaggatgtgcgagaactgctcaggcagcaggtcagagagatcacttttctgaagaatacagtgatggaatgtgacgcctgcggaatgcagcagtccgtccgcacggggctccctagtgtcagacccctgctccactgcgcccctggcttctgttttcccggagttgcctgcattcagacagagagtggtgcaagatgtggcccctgtccagccggctttacaggcaatggctcacattgtactgacgttaatgagtgcaatgcgcacccttgctttcctagagtccgctgcatcaatactagccctggctttcgatgtgaagcatgtcctcccggttactcgggccccacacaccagggggtaggtctcgcttttgcgaaggccaataaacaggtgtgcaccgatataaatgagtgcgaaactggacagcacaactgcgttccaaactctgtttgcatcaatacaaggggatcattccagtgcgggccatgtcagccagggttcgtcggagatcaggcctccggctgtcagagaagggcccaaagattttgcccagacggaagcccaagtgaatgccatgagcatgccgattgcgtgttagaaagagatggctcgagaagctgcgtctgcgccgtcgggtgggcaggtaatgggatcctgtgtggaagagacaccgacctggacggatttcctgatgagaagctcagatgtccagagcggcaatgccggaaggataactgtgtgacagttccaaactctgggcaagaagatgtcgacagagacggcattggggatgcatgtgacccagacgcggacggcgacggagtgccgaatgaaaaggataactgtccactcgtgcgaaacccagaccagaggaatactgacgaagataagtggggcgatgcatgcgacaattgccggagccagaaaaatgacgaccagaaggacactgaccaggacgggcgtggtgatgcatgtgacgacgatatcgacggggaccgcattcgtaatcaagccgataactgcccccgggtcccaaattctgatcagaaggacagcgatggcgatggtatcggcgatgcctgtgacaactgccctcaaaagagcaatccggatcaagccgacgtggatcacgacttcgtcggggatgcctgcgacagcgaccaggatcaagatggcgatggtcaccaggactctagagataactgtcccactgtgccaaactccgcacaggaggatagcgatcatgatggtcagggcgacgcctgtgacgacgacgacgacaacgacggggttccggacagcagagacaactgccgcctagttcccaatccaggtcaagaggacgctgacagggatggcgtgggagacgtgtgccaggacgactttgatgcggataaggtcgtagacaagattgacgtctgtcctgagaatgctgaagtgaccctcaccgatttcagagccttccaaaccgtcgttctggaccccgaaggcgacgcccagatcgaccctaattgggtggttcttaatcaaggtagggagatcgtgcagacaatgaactccgacccaggactcgctgtggggtacaccgccttcaatggtgtggatttcgaggggactttccacgtgaacaccgtgaccgatgatgattatgccggcttcatctttgggtatcaggacagctcttcgttttatgtcgtaatgtggaaacagatggaacagacatactggcaagccaacccgtttcgtgcagtggccgagcccggcattcagttaaaagctgtcaaatcatctaccggcccaggtgaacaactgaggaatgcactgtggcacacaggtgataccgagtcccaagtgcggctgttgtggaaagatcctagaaacgtcggatggaaggataaaaagagttacaggtggtttctacaacatcgccctcaggtcggctacattagagtgcgcttctacgaaggccccgagctggtggccgactcaaatgtagtactggacaccaccatgcgagggggaaggctgggtgtcttctgtttttctcaggaaaatatcatatgggcaaacctgcgataccgatgtaacgatactatccccgaagactacgaaacacaccagctccgccaagcttag

SEQ ID NO: 248573 - RNA, 2700 nt, synthetic construct
  misc_feature 1..2700: note = Description of Artificial Sequence: Synthetic coding sequence
  source 1..2700: mol_type = other RNA
atggatcgaaaggtagccagagaatttcgtcataaagtagatttcttgattgagaacgacgccgagaaagattacttgtatgatgttctgagaatgtatcaccaaacaatggacgtggctgtgcttgtgggggatttgaagctggtgatcaacgaaccctcccgcctgcccctgtttgacgcgatacgacctctaatcccgctgaagcaccaggtggagtacgaccaacttacccctcggcggagtcgtaagttaaaagaagtgaggctcgacagactccacccggagggtctggggttgtccgtgcgaggcggactagaatttggttgcggcttgttcatcagtcacttaatcaaaggcggacaggccgactcggtggggctgcaggtcggcgatgaaatcgttcgcataaatgggtactcaatttctagttgtacccacgaggaggtgattaacctgatccgaactaagaagacagtcagtattaaagttcgacatatcggccttatcccggtcaaaagtagtccagacgagcccctgacctggcagtatgtggaccagttcgtcagtgagtctgggggcgtgaggggatcactcggctctccgggcaatcgggaaaacaaagagaaaaaggtcttcatttctttagtgggtagccggggactagggtgttcaataagttccggacctattcagaagcctggaatctttatctcacatgtgaagccaggcagtctcagtgctgaggtcgggctagagatcggggaccagatcgtcgaggttaacggggtcgacttctctaacctggaccataaagaagccgtgaatgttctaaagagtagtcgatccttaacgatctccatcgtggccgccgccggcagggagctattcatgaccgacagagagaggctggctgaggcccgccagagagagctgcagcgacaagagttactgatgcagaagcgcctggcaatggaaagcaacaagatactgcaagaacagcaggagatggaacgtcagagacgcaaggaaatcgcccaaaaagcagctgaagaaaatgagcggtacaggaaagaaatggagcagatagttgaagaggaagaaaaattcaagaaacaatgggaggaggattggggtagcaaagaacagctcttgctcccaaagacgattacggctgaggtacatcctgttcccttgagaaaacctaaaagctttgggtggttctatcggtacgatggtaagttcccaaccattagaaaaaagggaaaagacaagaaaaaagcaaaatatgggtcactgcaggacctgcggaaaaacaaaaaagagctggagttcgagcagaagctgtacaaagaaaaagaggaaatgttagagaaagagaagcagctaaagatcaaccggttggcccaggaagtctcggaaactgaacgggaggacttagaagagtcagaaaagatccaatactgggtggagaggctgtgccagactcgattggaacaaatttcatccgctgataacgagatctccgagatgactacagggccgccccctcccccaccctcagtttcccctctggccccacccctccgaaggttcgcaggtggtctgcatctgcacactaccgacctggatgacatacccctggacatgttttactatccccccaagacaccgtcggctttaccagtgatgcctcaccccccgccctctaaccccccacacaaggttcctgcccctcccgtgcttccactatcaggccacgtgtctgccagcagctctccgtgggtccaacgcactcccccacctataccaatcccaccaccacccagtgtccccactcaggatctgaccccgactcgcccattgccaagtgccctagaggaagccttgtccaatcatccctttcgcaccggtgataccggcaaccccgtggaagactgggaagcaaaaaaccactccggaaagcccaccaattcccccgtcccagagcaatcattcccacctaccccgaaaacattttgccccagccctcagccgccaagaggacctggggtctccaccatctccaaacctgtcatggtgcaccaagagcccaatttcatttatagacctgccgtgaaatccgaagttctgccacaggagatgcttaagagaatggtagtgtaccagaccgcgttcaggcaggattttcgcaaatacgaggaagggtttgacccttatagtatgttcactcccgagcaaattatgggcaaggatgtgcgtttactgcgaatcaagaaggagggttccctggaccttgccctggagggcggcgtggactccccaatcggcaaggttgtggtgagtgcagtttatgaacgaggcgcagccgagcggcatggcggtatagttaaaggagatgagatcatggccatcaatggcaaaatagttactgattataccctagccgaggcagaggcagctttgcagaaggcttggaaccagggcggcgattggattgacttggtcgtagctgtgtgccctccaaaagagtacgacgacgaactagccagtttgccgtcctcagtggcagagtcaccacagcccgtccggaagttactagaggaccgcgctgcggtacacaggcacggatttctgctccagctcgagcctaccgatttgttgctaaaaagtaagcgggggaatcaaatccacagatag

SEQ ID NO: 248574 - RNA, 825 nt, synthetic construct
  misc_feature 1..825: note = Description of Artificial Sequence: Synthetic coding sequence
  source 1..825: mol_type = other RNA
atgataatctcccattttccgaagtgcgttgcagtattcgcattgctggcactgagcgtgggcgcattggatacatttattgccgctgtgtacgagcacgccgttatcttaccgaaccgtacagaaacacctgtatctaaggaagaggcactgctgttaatgaacaagaatattgacgtactggaaaaagccgtaaagctggctgccaagcaaggcgcacatattatagtcacacctgaagacggaatctacggatggatcttcacccgcgagtcaatttatccttacttagaggatattcccgacccaggcgttaattggatcccgtgtcgggacccctggagatttggaaacactcccgtacaacagcgtttatcatgcctggccaaggacaactccatttatgtggtcgcgaacataggtgacaaaaaaccctgcaacgccagcgattcacagtgtccaccagatggcaggtaccagtacaacacggacgttgtgtttgattctcaaggcaaactcctggcccgctatcataaatataatctgttcgcacccgaaattcagtttgacttccctaaggactcagaattagtgacattcgatacgccgtttggaaaatttggcatattcacttgttttgatattttttcacatgatcctgccgtcgtcgtcgtggatgaatttcagcttaccgctttctcaactccccagcatggcacgacacgctgcccctcgtctcggctcttcccttccatccagcatggaccgagaccctgggaatccatataccttttacagatccccaccacacccgcatgcacttag

SEQ ID NO: 248575 - RNA, 444 nt, synthetic construct
  misc_feature 1..444: note = Description of Artificial Sequence: Synthetic coding sequence
  source 1..444: mol_type = other RNA
atgataatctcgcactttcccaaatgtgttgccgtctttgccctcctggccctgtctgtgggggcactcgatactttcattgcggccgtgtacgagcatgctgttatattacccaacagaaccgagacgcccgttagtaaagaagaagctttgcttctaatgaataaaaacatcgacgtactggagaaggccgtgaaattggccgccaagcagggagcccatattatagtcaccccagaagacggcatctatggttggattttcacaagagagtcaatctatccctacctcgaagacattccagaccctggagtaaattggattccttgccgggatccttggcgtaagagcaagaaaatgaacgagccagtctcaaaagaactttgctatcactgtcactctgaatgtaaccaatatggtcaatggaagttgtacagaacctag

SEQ ID NO: 248576 - RNA, 624 nt, synthetic construct
  misc_feature 1..624: note = Description of Artificial Sequence: Synthetic coding sequence
  source 1..624: mol_type = other RNA
atgattatctcacatttccccaagtgcgtagcggtgtttgccctcctcgctttgtccgtcggagcactggataccttcatcgctgcagtgtacgaacatgccgtcatcctaccaaacaggacagagacccccgtgtcaaaggaagaggctctcttactcatgaacaagaatatcgatgttctcgaaaaagctgtcaaattggctgccaagcaaggtgcacacatcatcgtgacccccgaggacggcatctatggttggatttttacccgtgaaagtatttatccctatttggaggacatacctgatccaggtgtcaattggattccgtgtcgcgacccttggcgctttgggaacactccggttcagcaacggcttagttgccttgccaaggacaacagtatttacgtggtagctaacataggcgacaagaaaccatgcaacgccagcgactcccaatgcccaccagacggacggtaccagtataatactgacgttgtgttcgactcccagggaaagctccttgccaggtatcacaagggcgtggaatctacacctcagaagcaaagtaggtgtacaacaatgacatggaagcaacgtgtggtatcttgctgttatcagaattag

SEQ ID NO: 248577 - RNA, 303 nt, synthetic construct
  misc_feature 1..303: note = Description of Artificial Sequence: Synthetic coding sequence
  source 1..303: mol_type = other RNA
atgtcgaccggcccaaccgctgccacaggctccaatagaagactgcagcagacacagaaccaggttgatgaagttgttgacattatgagggtcaatgtggacaaggtattagagagagatcaaaagctatctgagctcgatgatcgggccgacgctctgcaagctggcgcgtcccaattcgaaacttccgccgcaaagctgaaacgaaagtactggtggaaaaactgcaagatgtgggcgatcggcatcaccgtcctggtaattttcatcatcataatcatcgtatgggtagtttcatcctag

SEQ ID NO: 248578 - RNA, 1110 nt, synthetic construct
  misc_feature 1..1110: note = Description of Artificial Sequence: Synthetic coding sequence
  source 1..1110: mol_type = other RNA
atgcgagcttgcattagtctggtacttgctgtcctgtgcggtctagcctgggctgaggatcacaaagagtcagagcccctgcctcagttagaggaggagacagaagaggctcttgcaagcaatctatactccgctcccacctcttgtcagggaaggtgttatgaggccttcgacaagcaccatcagtgccactgtaatgcccgctgtcaggagttcgggaactgttgcaaagatttcgagtccttatgttcagatcacgaggtgtctcatagctctgacgcaataactaaggaagagatacagtccatctctgagaaaatttatagagccgacaccaacaaagcccaaaaagaggacattgtgctgaactcacaaaattgcataagtccttctgagacccgtaaccaagtagatcgctgccctaagccactcttcacttatgtcaatgagaaactttttagtaaacctacgtatgctgctttcattaacttgctgaataactatcagagggccaccgggcatggcgaacactttagcgcccaggagctggcggagcaggatgcttttctgagggaaatcatgaaaaccgcagtgatgaaagaactttacagctttctgcaccaccagaacagatatggctccgaacaagaatttgtggacgacctaaagaatatgtggtttggcctttactcacgtggaaacgaggagggagattctagtggatttgagcatgtgttctccggggaggtcaaaaagggtaaagtcaccggattccataattggattagattctacctcgaagagaaagagggtttagtggactactactcccatatttacgatggaccttgggatagctacccagatgtactggccatgcagttcaactgggacggatactataaggaggtgggaagtgccttcatcggatcgagcccagaattcgaattcgccttgtattccctttgttttatagctcggcctggcaaggtgtgccagcttagcctgggcggataccctcttgcggtgagaacctacacgtgggataagagcacatacgggaacggcaaaaagtatatagccactgcttacattgtgtcctccacttag

SEQ ID NO: 248579 - RNA, 852 nt, synthetic construct
  misc_feature 1..852: note = Description of Artificial Sequence: Synthetic coding sequence
  source 1..852: mol_type = other RNA
atgtgcaatactcctacatattgcgaccttggaaaagctgcgaaagacgttttcaataaggggtatggctttggcatggttaaaatcgatcttaagacaaagtcttgctctggcgtggagtttagtacttcgggacatgcctacaccgatacaggcaaggcctctggtaacctggagactaagtacaaggtctgtaattatggcttaaccttcacgcagaaatggaacactgacaatacgcttgggaccgagatttcatgggagaataaactggcagaagggttgaaactgacattggacactatattcgtcccgaatacaggtaaaaaatccggcaagctcaaagcctcatacaaaagggattgcttttccgtcgggtccaacgtggatatagatttctctgggccaaccatctacggctgggccgtcctcgccttcgagggctggctggcgggctatcagatgtcatttgatacagccaaatctaagctgtcacagaacaacttcgcccttggatacaaagctgctgatttccagctacatacccacgtcaacgatggcacagagtttggcggatcaatataccaaaaagtgaatgagaaaatagaaacaagcataaacttggcctggacagccggcagcaacaacacaaggttcggcatcgctgctaaatacatgttggattgcaggacgtcccttagcgcaaaagtcaacaacgcctccctgattggacttggctatacccaaactctccgtcccggtgtgaaactcactctctccgctctcattgatggaaagaatttttcggcaggcggacacaaagtaggacttggatttgaactcgaagcatag

SEQ ID NO: 248580 - RNA, 621 nt, synthetic construct
  misc_feature 1..621: note = Description of Artificial Sequence: Synthetic coding sequence
  source 1..621: mol_type = other RNA
atggctgcaaataagcctaagggacaaaacagcctggccttgcacaaggtgataatggtaggctcaggaggcgtgggaaagtccgcacttacattgcaattcatgtacgacgaatttgtggaagactacgagcctacaaaagcagatagctaccggaaaaaagtggtgcttgatggtgaggaggtgcaaatagacatactcgacaccgctggccaagaagattacgccgcaattcgcgacaactacttccggtctggagagggcttcctgtgtgtgttcagcattaccgaaatggagagcttcgccgcaaccgcagactttcgcgaacagattttacgggtaaaggaagacgaaaatgtgccctttcttttggtaggaaacaagagcgatctggaggacaagaggcaggtttctgttgaagaggcaaagaatcgggcagagcagtggaatgtcaattacgttgagaccagcgctaagaccagggcaaatgtggacaaggttttcttcgacctcatgagggagattagagcacggaagatggaggattctaaggaaaagaacggtaaaaaaaagagaaagtcacttgccaaaaggatacgcgagagatgctgcatattgtag

SEQ ID NO: 248581 - RNA, 1170 nt, synthetic construct
  misc_feature 1..1170: note = Description of Artificial Sequence: Synthetic coding sequence
  source 1..1170: mol_type = other RNA
atgcttgaggaaccacgtcctcgccctccaccttctggcctggcaggattgctcttcctggctctgtgttccagagccttgagtaacgagatccttggactgaaactgcccggagaaccacccctgacagccaataccgtgtgcctcacattgagcgggctttcaaaaagacaattgggactgtgtctgcgaaaccctgatgtgacagcgtccgcattacaagggctgcacatagccgtgcatgaatgccagcaccagctccgggatcagcgctggaattgtagcgccctagaggggggaggcaggctgccacaccattcagccattctaaaacggggatttagagaatctgcattttccttttcaatgctggccgctggagtgatgcatgctgttgccaccgcttgcagcttggggaaactggtgtcttgcgggtgcggttggaagggcagcggggagcaagacagactacgagccaagcttttacagctgcaggctctgtctaggggaaaaagctttccccatagcctgccaagtcctggacctggcagcagtccctctcctggcccacaggacacctgggagtggggcggctgtaatcatgatatggattttggagaaaagttttcccgagatttcctggatagccgagaagctcctcgtgacattcaagctcgaatgagaatacacaataacagggtcggccgacaggttgtgaccgaaaacctgaagcgtaagtgcaaatgccatggaacatctgggtcttgtcaattcaagacatgctggagagccgcaccagagttcagagccgtgggagccgccttacgagaacggctgggtagggcaatcttcatagacacccataacaggaatagtggagcctttcagccacgccttcgccccaggagactctccggggagctggtgtacttcgaaaagtccccagatttttgtgagcgagatccgacaatgggcagccctggaactagagggagggcctgcaacaaaacatcccgattgctcgacggatgcggatctctgtgctgtggcagaggtcacaatgtcctcaggcaaacacgtgtagagaggtgccactgcaggtttcactggtgttgttatgtgctctgtgacgagtgtaaggtcaccgaatgggtcaacgtttgcaagtag

SEQ ID NO: 248582 - RNA, 576 nt, synthetic construct
  misc_feature 1..576: note = Description of Artificial Sequence: Synthetic coding sequence
  source 1..576: mol_type = other RNA
atgttagaggaaccacggccccgaccccctccctctggcttggcgggacttttgttccttgccttgtgctccagagccctgtcgaatgagattctgggtctgaaactgcctggcgaacctcccctcacggccaataccgtgtgtcttacattgtccggcttatccaaaaggcagctcggtttatgcctgcgcaaccctgacgtaactgcatcagctctgcagggactgcatatcgccgtccacgagtgtcagcatcagttaagagaccaaaggtggaattgctccgcgcttgaaggaggcggccgtctgccccaccactctgctattctaaaaaggggctttcgggagagtgctttttccttcagcatgctcgccgctggggtgatgcacgccgtggccaccgcttgcagcctcgggaagttggtttcttgcggatgtggctggaaagggagtggtgaacaagaccggctgagagctaagctactacagcttcaagcactttcccggggaaaacttcctggaaccagccggcacgaatgcgagtctaccaccacgggatggggcgcccggtggtag

SEQ ID NO: 248583 - RNA, 309 nt, synthetic construct
  misc_feature 1..309: note = Description of Artificial Sequence: Synthetic coding sequence
  source 1..309: mol_type = other RNA
atgctggaggagccacgaccgcggccacctccgtccgggttagctggactgctatttctcgcactgtgtagccgcgccttgagtaatgagatcctggggctgaaactgccgggcgagcctccactgactgcaaacactgtctgccttacactgtcaggccttagcaaacgacagttgggcctgtgcttaagaaatcctgacgtaacagcttctgcactgcaaggattgcacatagctgtacacgagtgtcaacaccagctccgagaccaacgttggaactgcagtgctttggaaggcggggggcgctag

SEQ ID NO: 248584 - RNA, 1050 nt, synthetic construct
  misc_feature 1..1050: note = Description of Artificial Sequence: Synthetic coding sequence
  source 1..1050: mol_type = other RNA
atgcatcgtaatttcaggaagtggatcttctacgtttttctgtgttttggtgtactttatgttaagctcggagctctatcgagcgttgtcgcactgggcgcaaatatcatctgcaacaaaatccctggccttgcaccaaggcagcgagcaatttgccagtccagacccgacgcaattatagtgattggagagggcgctcagatgggaattaacgaatgtcaatatcagtttaggtttgggcgatggaattgctcggcgctcggagagaagaccgtgttcggccaggaattgcgagtcggctcacgtgaagccgctttcacctacgccatcaccgccgcgggggtggcccatgctgttaccgctgcgtgttcccaaggaaatctgagcaactgtggttgcgaccgcgaaaaacaaggttactacaatcaggcagagggttggaaatggggtggatgttccgcagacgttagatatggcattgatttctcgagaaggttcgtcgacgcccgtgaaattaagaaaaacgctaggagactgatgaatcttcacaacaacgaggcaggcaggaaggtgctggaggacagaatgcaacttgagtgtaagtgtcacggcgtgtctggcagctgtacaacaaaaacatgctggactacactgcccaaatttagagaggtagggcatttgctgaaagaaaagtacaacgccgccgtgcaagtggaggtggttcgagcaagccggctgcgccagccgacttttttgcggattaagcagctccgatcatatcaaaagcccatggagaccgaccttgtgtacatcgagaagagccccaactactgtgaggaagatgcagccacgggatctgtggggacccagggaaggctgtgtaaccgaacttcacctggcgctgacggttgcgacaccatgtgctgtggacgcgggtacaacactcaccaatataccaaggtgtggcaatgcaattgcaagttccattggtgctgcttcgtcaaatgcaacacctgttcggagagaactgaggtttttacatgcaaatag

SEQ ID NO: 248585 - RNA, 1062 nt, synthetic construct
  misc_feature 1..1062: note = Description of Artificial Sequence: Synthetic coding sequence
  source 1..1062: mol_type = other RNA
atgcttctactgagtccccgaagtgcactcgtgtctgtgtactgtccccaaatctttcttcttttatcctctggatcttaccttgccctgtccagtgtggtggctttgggagctaacataatctgtaacaagatacccggccttgctccgcgacaacgcgcaatttgccaatcccgccctgacgctatcattgttatcggagaaggtgcccagatgggcatcaatgaatgtcagtatcagtttaggttcgggaggtggaactgctctgcactaggtgagaaaaccgtgttcggacaggagctgcgggtcggcagccgggaggccgctttcacctatgccattaccgccgctggagtggcccatgctgtgacggcagcttgcagccaaggcaacctcagcaactgtgggtgcgatcgtgaaaagcaaggatattacaaccaagcagaaggttggaagtggggtgggtgtagcgccgacgttcggtacggaatcgatttttcaagacggttcgttgatgcacgcgaaatcaagaagaatgctcgccgcttaatgaacctgcacaacaatgaggccggccggaaagttctagaggatcgaatgcagctcgagtgtaagtgtcatggagtctctgggagctgtacaaccaaaacgtgctggacaacactccccaagtttcgggaagtgggacatctgttaaaggagaagtataatgccgccgtgcaggttgaagtggtccgagcatctagactcagacagcctaccttcctgcgtatcaaacagctgcgctcatatcagaagccaatggagaccgaccttgtctacatcgaaaaaagtcctaactattgcgaagaggatgcggctaccgggtcagttggcacccagggaaggctctgcaacaggacgagcccaggcgcagatggatgcgacacaatgtgttgtggaagggggtataatacccatcagtataccaaggtgtggcaatgtaactgcaagtttcactggtgttgctttgtgaagtgcaatacttgttctgaaagaaccgaagtgtttacatgtaagtag

SEQ ID NO: 248586 - RNA, 618 nt, synthetic construct
  misc_feature 1..618: note = Description of Artificial Sequence: Synthetic coding sequence
  source 1..618: mol_type = other RNA
atgcatcgaaacttcagaaagtggattttctatgtctttctttgttttggtgtgctgtatgtgaagctgggagctttgagtagtgtggttgccctcggtgcgaacattatctgcaataagatacccggcttggccccgcgacagcgtgctatctgtcaatcgagacccgacgcaattatcgtcatcggtgagggggcccagatgggcattaatgagtgtcagtatcagttcaggttcggcagatggaactgtagtgccttgggtgaaaaaactgtgtttggccaagagttaagggttggcagcagagaggccgctttcacttacgccatcaccgctgctggagtagctcatgccgtcaccgccgcctgctcccaagggaatctttcgaactgcgggtgcgatcgcgaaaaacagggctactataatcaggccgaaggctggaagtgggggggctgcagcgcggacgttaggtacggcatcgatttttcccgccggtttgtggatgctcgcgagataaaaaaaaacgccagacgccttatgaacttgcataataatgaagcaggacgtaaaggcctgctaggtcagccccgcgtcacatcatcccccttgttcccttag

SEQ ID NO: 248587 - RNA, 1002 nt, synthetic construct
  misc_feature 1..1002: note = Description of Artificial Sequence: Synthetic coding sequence
  source 1..1002: mol_type = other RNA
atgtctgctcctccattttatcgggccctttcctcggtggtggcgctgggagccaacataatctgcaacaaaatccctggacttgctccccgtcaaagagccatttgtcagtccagaccagacgctattattgtgattggcgagggtgctcagatgggaataaacgaatgccagtaccaattcaggttcggacggtggaattgctctgccctgggggaaaaaactgtctttggccaggagctgcgtgtggggtcaagggaggcagcattcacatacgctatcaccgccgcaggagtggcccacgctgtcactgcagcttgctctcaaggcaacctttctaactgcggctgcgatcgagaaaaacagggttattacaatcaggcagaaggctggaaatgggggggctgctccgccgatgtgaggtacggaattgacttttctagaaggttcgtagatgcacgggaaatcaaaaaaaacgctcgcaggctgatgaacctgcataacaacgaggccggtcgcaaagttttggaggacaggatgcaattagagtgcaaatgccacggagtgtctggatcatgtaccacaaaaacatgttggacgacactgcctaagtttcgtgaggtcggtcatctgctgaaagaaaaatacaatgccgccgttcaggtggaagtcgtaagggcaagccgcttgcggcaaccaactttcctccggataaagcaactcagaagctaccagaaaccaatggaaaccgacttagtttacattgagaaaagccccaattactgtgaagaggatgctgcaacaggttcagtgggaacccaaggcaggttatgtaaccgcacctcgccgggggctgatggttgcgacactatgtgctgtggtcgaggttataatacgcatcagtataccaaggtgtggcagtgtaattgcaaattccactggtgttgtttcgtgaagtgcaacacctgttctgaaagaactgaggtgtttacctgcaaatag

SEQ ID NO: 248588 - RNA, 174 nt, synthetic construct
  misc_feature 1..174: note = Description of Artificial Sequence: Synthetic coding sequence
  source 1..174: mol_type = other RNA
atgggtatcaatgaatgccaatatcagtttagattcggtagatggaattgctctgcactgggcgagaaaacggtctttggtcaagagttgagagtgggatccagagaagcagcttttacatacgcaataacggcagccggagtggcccacgccgtgactgctgcttgctcctag

SEQ ID NO: 248589 - RNA, 1119 nt, synthetic construct
  misc_feature 1..1119: note = Description of Artificial Sequence: Synthetic coding sequence
  source 1..1119: mol_type = other RNA
atgaacaaaaggcggcttctatatcctagtggatggctgcatggccccagtgacatgcagggcctcttatttagcacactcttattagctggattggcacaattttgctgccgggtccaaggcactggaccccttgacactactccggaaggacgccctggcgaggtatctgatgcacctcagagaaagcagttttgtcattggccatgcaaatgccctcagcaaaaaccgcggtgccccccaggggttagcctcgtaagagacggctgtgggtgttgtaaaatatgtgccaagcaaccaggagaaatttgcaacgaggcagatctgtgcgatccccataaaggcttatattgcgactacagcgtggaccgcccacgctacgaaactggagtttgtgcctatctggtcgcagtgggctgcgaatttaaccaggtgcactatcacaacggacaagtgttccaacccaatcccttgtttagctgcttgtgtgtctcaggcgccattggctgcacgccactgttcatacccaagcttgccggctcccactgctcgggagcaaaagggggcaagaaatccgatcagtctaactgttctctggagcccctgctccagcagctctctaccagctacaaaacgatgccagcctatcgaaacctccccctgatttggaagaaaaaatgcctagtgcaggcgaccaagtggactccatgtagtcggacctgtgggatgggtatctccaaccgggtcacgaacgagaattccaactgcgagatgagaaaagagaagcgactgtgctacattcaaccctgcgattctaacatactcaagaccatcaagatacccaagggaaagacttgccagcccacgttccagctgtccaaggccgagaaatttgtcttttccggttgtagcagtactcagtcctataaacctactttctgcggaatctgtttagacaaaaggtgttgcatacctaataaatccaaaatgatcaccatccagttcgattgtcccaatgaggggagcttcaagtggaaaatgctttggatcacttcatgtgtgtgtcaaagaaactgccgcgagccaggagacatcttttctgaattgaagatcctttag

SEQ ID NO: 248590 - RNA, 996 nt, synthetic construct
  misc_feature 1..996: note = Description of Artificial Sequence: Synthetic coding sequence
  source 1..996: mol_type = other RNA
atgaagattagcaggggccgggtatgtcttgaatccgagaacaaggacgcaggcgtcgctggtcggaagcaattctgtcattggccatgcaagtgccctcagcagaaacccaggtgcccacccggagtgtccctggttagagatggctgtgggtgctgcaagatctgtgcgaagcagcccggtgagatctgcaacgaggcagatctgtgcgatccccacaaggggctttactgcgactattcagtggatcgaccccggtacgagacaggagtgtgcgcctgcaaaagcgttggctgtgaatttaaccaggtgcattatcacaacggtcaggtctttcaacccaaccccctcttctcatgcctatgcgtttctggggcaattggctgtactccactattcatacctaagcttgcggggagccactgcagtggagccaagggcggcaagaaatcagaccagtccaattgctcgctcgaaccattactccagcaactgtctactagctataagacgatgcccgcctatcgtaacttacccttaatctggaaaaagaaatgtttagtgcaggctacgaagtggacaccctgttcaagaacctgcggtatgggtatttccaacagagttaccaatgaaaacagtaattgtgagatgagaaaggagaagcgattatgctatatacagccctgcgactcaaacatcctcaaaacaattaaaattccaaaaggtaagacatgccagcccacattccagctcagtaaagcagaaaaatttgtgtttagtggatgcagttctactcagtcatacaaaccaactttttgtggaatctgcttagataaacgctgctgcattccaaataaatccaaaatgattactattcagttcgactgtccaaacgaaggctctttcaaatggaaaatgctgtggattacaagttgcgtttgtcagagaaactgccgggagccgggtgacatcttttcggaactcaagatcctgtag

SEQ ID NO: 248591 - RNA, 1065 nt, synthetic construct
  misc_feature 1..1065: note = Description of Artificial Sequence: Synthetic coding sequence
  source 1..1065: mol_type = other RNA
atgcagggcctgctcttctccactctcctattagctggtctcgcacaattttgctgcagagtgcagggaaccggacccctggataccacaccagaaggtaggcccggggaggtttctgacgccccgcagagaaagcaattttgtcactggccatgcaagtgcccccagcagaagccacggtgtccccctggagtttcccttgtccgggatggctgcggctgctgcaaaatttgtgccaagcagcccggcgagatatgtaacgaggccgatctttgtgacccccataaggggctctactgtgattatagcgtagaccgacctagatacgaaaccggagtgtgcgcatacttagtggcagtagggtgtgagtttaaccaggttcactaccataacgggcaggtgttccagccaaaccctttgttttcatgcctttgtgtcagcggcgctatcggttgtacacccttgttcataccaaagctggccggttctcattgctccggggcgaagggagggaaaaaatccgaccaatctaactgctcacttgaaccgctgcttcaacaactgtccaccagctataagacgatgcccgcttaccgtaacttaccactcatctggaagaaaaagtgtttggttcaggcaacaaaatggaccccgtgcagcaggacctgcgggatgggaatttcaaacagggtgacaaacgagaattctaattgcgaaatgcgcaaagagaagcgcctctgttacatccaaccttgtgatagcaacattctaaagacgataaaaatcccaaaaggcaagacatgccaaccaacattccaactgtcaaaagccgaaaaattcgttttctctggatgttccagtactcagagctataagcccaccttttgcggaatttgcctggataagaggtgttgcatcccaaataaaagtaagatgattactatccagtttgattgcccaaatgagggaagtttcaaatggaaaatgctgtggataacatcgtgtgtttgccagaggaactgccgagagccaggagacatcttctccgaactgaaaattctgtag

SEQ ID NO: 248592 - RNA, 693 nt, synthetic construct
  misc_feature 1..693: note = Description of Artificial Sequence: Synthetic coding sequence
  source 1..693: mol_type = other RNA
atgcagggacttcttttcagtacgttgttattggcagggttagctcagttctgctgccgcgtgcagggcaccggaccattggataccacccccgagggacgtcctggcgaggtgtctgacgcaccccaacgcaagcaattctgtcactggccctgcaagtgccctcagcagaaacctaggtgtcctcccggagtctcactggtgcgggacgggtgtggctgctgcaaaatatgtgcaaaacagcccggcgagatctgtaatgaggccgatctctgcgatccccacaaaggactgtattgcgattactcagtcgacaggcctagatatgaaacaggcgtctgcgcgtatcttgtcgcggtaggttgcgaattcaaccaggtgcactaccataacgggcaagtgttccagcccaatcctctattctcttgtctgtgtgtaagcggcgcaataggttgtactcctctgtttattcctaaattggcaggctcccattgcagcggcgctaaaggaggtaaaaaaagcgaccagtcaaactgctcactggagccactgctgcaacaactgagtacgtcttataagaccatgccagcctaccggaacctaccactgatctggaagaagaacgttctatgtaaacagcaaaacgggcttcctgctccagagcatgtcggatgggagtacttgaccggctag

SEQ ID NO: 248593 - RNA, 393 nt, synthetic construct
  misc_feature 1..393: note = Description of Artificial Sequence: Synthetic coding sequence
  source 1..393: mol_type = other RNA
atgggaatttcgaatagagtgaccaacgagaattctaactgcgagatgcggaaggagaaacgcttgtgctatatccaaccttgcgactctaatatattaaagaccattaaaattccaaagggaaagacctgtcagccaaccttccaactttcaaaagccgaaaagtttgtgtttagcggatgctcgagcacacagagctataagcccactttctgcggaatttgtctcgataaaaggtgttgtattcccaataagtccaagatgatcaccatccaatttgactgtcctaacgaagggagcttcaaatggaaaatgctctggattactagttgcgtgtgtcagcgaaactgcagagaacctggcgatatctttagtgagctgaaaatactctag

SEQ ID NO: 248594 - RNA, 462 nt, synthetic construct
  misc_feature 1..462: note = Description of Artificial Sequence: Synthetic coding sequence
  source 1..462: mol_type = other RNA
atgtaccgtatgcagctgctttcttgtattgccttatctctggctctggtcaccaatagtgcccctacttcctcctccactaagaagacacaattgcagttagaacatcttctgctcgatttacagatgatcttgaacggcatcaacaattacaaaaatcctaagcttacaagaatgctcacatttaaattttatatgccaaagaaggctaccgaacttaaacatctgcaatgcctagaggaagagttaaagcctctagaggaggtcttaaaccttgctcaatcaaaaaatttccatttgcgtccccgcgatttaatctccaacatcaatgttatagtactcgagctcaaaggctcagagacaacctttatgtgcgaatatgccgacgaaaccgctacaatcgttgaattcctcaatcgctggataaccttttgtcaaagtattatttcaacgctgacctag

SEQ ID NO: 248595 - RNA, 984 nt, synthetic construct
  misc_feature 1..984: note = Description of Artificial Sequence: Synthetic coding sequence
  source 1..984: mol_type = other RNA
atgtttccctcccgacgaaaggccgctcaactaccctgggaggatggaagatctggcctgctgagcgggggtttaccacggaagtgcagcgtattccacttgtttgtggcatgcttatccttgggtttcttttcactgctctggctgcagctgagttgttccggcgatgtggctcgggccgttcggggccaggggcaagaaacaagtggtccgcccagagcctgtccccctgagccgccccctgagcactgggaggaggacgcaagctggggtccccatcggctggctgttctggtgccctttagagaacgattcgaggagctgttagtgttcgttccacatatgagacggtttctctcacgtaaaaagatccgacaccacatatatgtgctcaatcaagtggaccacttccgattcaatcgtgccgcccttattaatgtaggattcctggagtcttcaaacagcactgactacattgctatgcatgacgtcgacctgcttccccttaacgaggagttagattacggtttccccgaggctggcccttttcatgtcgcaagccccgagttacatcctctctatcactacaaaacttacgtgggaggtattctgttactgtcgaagcagcattaccgcctgtgcaatggcatgagtaatcgcttttggggctggggtagggaggacgatgaattttataggcggatcaaaggggctggactccagctctttaggccctctggaatcacaacaggctataaaacatttcggcacttacacgacccggcatggagaaaacgcgatcagaaaagaattgccgcccagaagcaagaacagtttaaggtggaccgggaaggcggactcaatacagtgaagtatcacgtggcaagtcgcacagcattatccgtcggaggggccccctgtacagtgctaaacatcatgctggattgcgataagaccgctacaccttggtgcactttcagctag

SEQ ID NO: 248596 - RNA, 2598 nt, synthetic construct
  misc_feature 1..2598: note = Description of Artificial Sequence: Synthetic coding sequence
  source 1..2598: mol_type = other RNA
atggtagcatccgccagagtgcagaaactggtgagacgctacaagttggctattgctacagcactggctattctgctcttacagggcctggtggtttggtctttcagtggactagaggaggacgaagcaggggagaagggacggcagaggaagccgagacctctggatccaggggaagggtcgaaggacactgacagtagtgctggaaggaggggatcaactggacgccggcacggaaggtggaggggccgcgcagagtcccccggggtgcctgtcgctaaggtcgtgcgtgccgtaacatcccgtcaaagggcttctagaagggtgcctccagcccctcctcccgaggctcccggaagacagaatctgagtggcgctgcggcaggtgaggctctcgtgggggcagcagggtttcctccacacggagacaccggcagtgtagaaggcgctccccaacccaccgataatggtttcacacctaagtgcgagatcgtaggcaaggatgccctctcagcattagcgcgcgcctctaccaaacagtgtcaacaggaaatcgcaaacgtcgtatgtctccaccaggccgggagcctgatgccgaaggctgttccgcgccactgccagctcacgggtaaaatgtctccgggtattcagtgggacgagagccaggcgcaacaaccaatggacggtcctccagtacgtattgcgtacatgttggtggtccatggcagggctatccgacagttaaagcggctgctaaaagcagtctatcatgagcagcacttcttctatattcacgtcgacaagagatccgattacctccacagggaggttgtggagctagcgcagggttacgacaatgttcgtgtgacaccctggagaatggtcactatttggggcggcgctagtctgctgcgcatgtacctccgttcaatgcgtgatcttctagaagtgccaggttgggcctgggattttttcataaatctgagcgctacagactatccaacaagaacgaacgaagagctcgtggccttcctgagtaagaacagagataaaaactttttgaagagccacggacgagacaacagccggtttattaagaagcaaggccttgatagacttttccatgaatgcgattcacacatgtggcgccttggagagcgccaaataccagccggaatcgtcgtggacggcgggtcagattggtttgtcctgactagaagtttcgtcgagtacgtcgtgtacaccgacgatccgttagttgcccagctgaggcagttctatacttacacacttctccctgccgaaagcttctttcatacagtgctggagaattccttagcctgtgagactctagtggataataatctgcgtgttacaaactggaatcggaagttgggatgtaagtgtcagtataaacacatcgtggactggtgtgggtgcagccccaatgacttcaagccgcaggattttcttagattgcagcaggtatctaggccaacattctttgcaaggaaattcgaatcaactgtgaatcaagaggtgcttgagatcctcgacttccacctgtatggtagctatccccccggcactcccgcactgaaagcctattgggaaaatacatacgatgccgctgatggccctagcggactgagcgatgtcatgttaactgcatatacagcctttgcaaggctgtccttacaccacgctgcaaccgccgctcctccgatgggtactcccctttgtcggttcgaacctcgcgggctgccctcctcggtgcacctgtacttctatgacgaccactttcaggggtacttggtcacgcaggctgtccaaccaagtgctcaagggcccgccgaaaccctggagatgtggctcatgccccagggatctcttaagctccttggacggtccgaccaagcaagcagactccaatctttggaggtcggcacagactgggaccctaaagagaggctttttcggaacttcggcggtttgctggggccactggatgagcctgtcgcagtgcagcgctgggcgaggggccccaacctgacagcgacggtggtgtggattgatcccacatatgtggtggcgacatcatacgatatcacagtcgacactgagaccgaagtcactcagtataaacctcctttgtcaagacctttaagacctggcccttggaccgtacgactactgcagttttgggagcctttgggcgagactcggtttttggtcttgccacttacatttaacagaaagcttccccttagaaaagacgacgcaagctggctgcatgcaggacccccacacaacgaatatatggagcaaagtttccagggattgtccagcattttaaatcttccgcagcctgagctagccgaggaggctgcccagaggcatacacaactaaccggccctgctctcgaggcttggaccgatcgggagctcagcagcttctggtctgttgccggattgtgcgcaattgggcccagtccatgcccctctcttgagccatgcaggttaacctcttggtcgagcctttctccagatcctaagagtgagctcggacctgtgaaggccgacggacgactgaggtag

SEQ ID NO: 248597 - RNA, 1503 nt, synthetic construct
  misc_feature 1..1503: note = Description of Artificial Sequence: Synthetic coding sequence
  source 1..1503: mol_type = other RNA
atgattattagccatttccccaaatgtgttgccgtatttgcgcttctcgcactcagcgtaggcgctcttgacacgttcatcgcggcggtgtatgaacacgctgtcatcttgcccaaccgcacagagacccccgtgagcaaagaagaagccctgcttctcatgaataagaatatcgatgtcctagaaaaagccgtaaagctggccgcgaaacagggcgcccacattatcgtgacacccgaggatggtatctacggctggatatttacacgcgagagcatctacccctacctcgaagatatcccagaccctggcgtgaattggatcccatgccgtgatccttggaggttcgggaacacacctgttcaacagcgactttcttgtttggccaaggacaatagcatttatgtggttgctaacatcggggataagaaaccctgcaatgcttccgatagtcagtgtccacccgacggaagataccagtataacaccgacgtggtgtttgactctcagggtaaattgctggctcgatatcataagtacaacctctttgcccccgaaattcagtttgatttcccaaaggacagcgaactcgtcacattcgataccccatttggaaagttcggcattttcacttgctttgatatattctctcacgatccggcagtcgtggtggtggacgaatccattgactccatcctgtatcccactgcctggtacaacactcttcccctattaagcgcagtaccatttcacagtgcctgggctaaggcaatgggagtaaacctcctcgcagccaacacccataacacttcaatgcacatgaccggctccggcatctacgcacccgaagcagtgaaagtatatcattacgatatggagaccgaaagcggacagttgctgctttccgagctgaaaagtagaccccggcgggaaccaacctaccccgcagccgtggactggcacgcctacgcatcgtctgtcaaaccattctccagtgagcaatctgattttctgggcatgatctacttcgatgaatttacctttacgaagctaaaaagaaacacagggaattacaccgcctgccagaaggacctttgttgccatttgacttacaagatgtctgagaagaggacagacgagatttatgctctgggtgcattcgacggacttcataccgtcgagggacaatactatttacagatttgtgctttactaaagtgtcagaccacagacttggaaacctgcggagaacctgtgggctcagcctttacaaaatttgaggacttttctctctccgggacattcggcacacgatatgtgttcccccagatcatcctgtctggcagtcagctggctcccgaacgacactatgaaatcagccgcgacggtcggctgcgatctcgatccggagcacctctgcccgttcttgtcatggccctttacggccgggtcttcgaaaaagacccgccgagactcgggcagggaagcggaaaattccaatag

SEQ ID NO: 248598 - RNA, 10704 nt, synthetic construct
  misc_feature 1..10704: note = Description of Artificial Sequence: Synthetic coding sequence
  source 1..10704: mol_type = other RNA
atggaaacatgtgattcacctcctatcagccggcaagagaatggccagtctacaagcaagctatgtgggacgacccagcttgataatgaggtgcccgaaaaggttgcaggaatggaacccgatcgagagaattcttctaccgacgataacttaaagactgatgaaagaaaatcggaggccctgctcgggttcagtgtggaaaacgcagccgccactcaggtcactagtgctaaggaaatcccgtgtaatgaatgtgccactagctttccatcccttcaaaagtatatggaacaccactgccccaatgctaggctgccggttctcaaagatgataacgagagtgagatctcagagcttgaggattctgacgtagagaatctaaccggcgaaatcgtgtaccagcccgatggttctgcatacatcatcgaagactctaaggagagcggacaaaacgcccagactggcgctaattccaaacttttctctacagcaatgtttttagactctctggccagcgcgggggagaagagtgaccaatcggcttccgctcccatgtctttctatccccaaattattaacacgttccatatcgccagctctctcggaaagccctttactgcggaccaagcattcccaaatacctccgcccttgcgggagtgggcccagtactgcactccttcagggtgtatgacctgagacataagcgagagaaggactacctcaccagtgatgggagcgctaaaaacagttgtgtgagtaaggacgtgccaaataatgtagacctgagtaaattcgacgggtgcgtatcagacggtaagcgtaaacccgtacttatgtgtttcctgtgtaaactgtcttttggatatatacgcagcttcgtgacgcatgcagtccatgatcaccgtatgaccctaaatgacgaagaacagaagctactgagcaataagtgcgtgtcagctattattcaaggtataggtaaggataaggaacctctcatcagctttctggagcctaagaagtcaacaagcgtgtacccacatttttccaccactaacctgataggacctgacccgacttttcgcgggctctggagcgccttccatgtggagaatggggacagcttgccggcgggatttgccttcttaaaaggctccgcttctacgtcctcctctgccgagcagcctttaggcatcacgcagatgcccaaggcagaggtaaacctcgggggactaagctcactcgtcgtaaatacccccattacttcagtctccctgagtcactctagctctgagtcctccaaaatgtctgagtccaaggaccaggaaaataactgtgaacggcccaaagaatccaatgtcctacacccaaacggggaatgtccagtaaaaagcgagccaactgagcccggggatgaggacgaggaggatgcgtattcaaacgaactcgacgacgaggaggtgctgggcgaactgacggacagtatcggcaacaaagattttccgcttctaaatcagtccatcagtccccttagttcaagtgttctgaagttcatcgagaaaggcacaagctcatcatcagccacagtgagcgatgacaccgaaaagaaaaaacagacagctgctgtcagggcgagcggatccgtcgcctcgaattatggcattagcggaaaagatttcgccgatgcttctgcttccaaggacagtgcaactgccgctcacccgagcgaaatcgcacgaggagatgaagactcatccgccaccccccaccaacatggctttactccaagtacccctggaactcctgggccagggggcgacgggagccctggctcagggattgagtgccccaagtgtgataccgtgctgggatcctctcggagccttggagggcacatgacaatgatgcatagtaggaatagctgtaaaaccctcaagtgtcccaagtgcaattggcactacaaataccaacagacactggaagcccacatgaaggaaaagcatcccgaacccggagggtcttgcgtgtattgcaaaaccggacagccccaccccagactggcgcgtggagaatcttatacttgtggctacaaacctttccgctgcgaagtctgcaactactccacaacaacaaaaggcaatctgtccatacatatgcaatcagataagcacctgaataatgtccagaaccttcaaaatggaaatggagagcaggtgtttgggcactccgctccagcacccaacacctcactgtccggatgtggcaccccgagtccttcaaagccaaaacaaaagcccacatggcggtgtgaagtctgtgactacgaaacaaacgttgcgcgtaatctccgaatccatatgaccagtgaaaagcatatgcataatatgatgttgctgcagcaaaacatgaagcagatccagcacaacctgcacttgggcttagcccccgcagaggccgaactgtatcagtactatctcgcccagaacatagggctcacaggcatgaagctggagaacccggcagacccccagctgatgattaatccatttcaactcgatcccgccaccgccgcagctctggcccccggtttaggcgagctgtcaccgtatatcagcgacccagcattgaagctgtttcaatgtgcagtctgcaacaagttcacgtctgattcattagaggccctcagtgtgcacgtctcttccgagagatccttgccagaggaggagtggagagctgtcatcggggacatctatcaatgcaagctttgcaactataacacgcagctcaaggccaatttccaactgcactgcaagaccgataaacatatgcagaaatatcaactggttgcccacattaaagagggcgggaaatctaatgagtggaggctgaagtgtattgcaatcggcaatccagtccacttgaaatgcaacgcgtgcgattactacactaacagtgtggacaagctgcgtctacacacgacaaaccaccgacacgaggccgccctcaaactatacaaacacttgcaaaagcaggaaggcgctgtgaacccagagtcttgctactactactgcgcggtgtgcgactacaccaccaaggttaagcttaatttggtccagcatgtgcggtccgttaagcaccagcagactgaggggctccgaaagctgcaactacaccagcagggactcgccccagaggaagataacctgagcgagatattcttcgtgaaagattgcccccccaacgagctcgagaccgcctcactgggtgccaggacctgtgacgacgatttgaccgagcagcatgaggaggctgagggggcgatcaagcctacggccgtcgcggaggacgatgagaaagatacctctgagagagataattctgagggcaagaactctaacaaagattcagtcagtgttgccggcgggacacaacccctcttgttagcaaaagaggaagacgtcgccacaaaacgatccaagcctacagaggacaacaaattttgtcacgagcaattttaccagtgtccatactgcaattacaactctagagaccagtcacggatacagatgcatgttctcagccagcactcagtacagcctgtgatctgttgcccattgtgtcaagacgtgctgagcaacaagatgcaccttcaattacatctgacccacctacactccgtctcgccagactgtgtggaaaaattgctgatgaccgtgcctgtcccggacgtcatgatgcctaactccatgctgctccctgcagccgcctcagaaaagagtgagagagacacccccgctgctgtaacagccgaaggctccggtaagtacagcggcgagtcaccaatggatgataagagcatggctgggctcgaggacagcaaagctaacgtcgaagtgaagaatgaggagcagaagcccaccaaagagcccttggaggtatcagagtggaacaaaaacagtagcaaagacgtgaagatccccgatactctgcaagatcagctgaatgaacagcaaaagcggcagcctttatcagtcagcgacaggcatgtgtacaaatacagatgtaaccattgcagcctggctttcaaaaccatgcagaaactgcagatccattctcagtatcacgctattcgcgcagccaccatgtgcaacctgtgccagcgctcctttaggaccttccaagcattgaagaagcacttggaggcaggtcaccctgaactctctgaagctgagttacagcagttgtatgcctccctgcctgttaacggagaactctgggctgagtctgagactatgtcacaggatgatcatggcttagaacaggagatggagcgggagtatgaagtggaccacgagggcaaggcaagcccagtggggtccgattcctccagtatccccgacgacatgggttctgagcccaaaaggacccttccctttagaaagggccctaacttcaccatggaaaaattcctcgatccatcaaggccatacaagtgcacagtgtgcaaagagtcttttacccaaaagaacatactgctggtccattacaacagtgtctcacacttacataagctcaaaaaagtattacaggaagcctccagcccagtgccacaggagactaactcgaacactgataataagccctacaagtgtagtatttgcaacgtcgcctactctcaatccagcactctcgaaatccacatgaggagcgttctccaccagactaaagcaagagcagccaaacttgaaccaagtggacatgtggccggcggtcacagcatagctgcaaatgttaattctccgggtcaggggatgttggactctatgtccctcgccgctgtcaatagtaaggacactcatctggatgccaaagagttgaacaaaaaacagacaccggatctgatctcggctcagccagctcatcaccccccacagtcccctgcccaaatccagatgcagttacagcacgaactgcagcagcaggctgcctttttccagccccaatttttgaacccagccttcctgccacacttccccatgacccccgaggccctactacagtttcaacaacctcagtttctgttccccttttacattcctggaacagagttttccctggggcctgacctgggcctgcccggatcggcgaccttcggcatgcccggaatgactggtatggcaggctccctgttggaagacctgaaacagcagatccaaacccaacatcatgtcggacaaacccagctacagattttgcagcaacaagcccagcaataccaagctacacagcctcagctgcaacctcagaagcagcaacagcagccccctcctccacagcagcagcaacagcaacaggcatctaagctcctgaaacaagaacaatctaatattgttagtgcggactgccagattatgaaggacgtgcctagttacaaggaagccgaggatattagtgaaaagccagaaaagcccaagcaggaattcatctccgaaggagagggcttaaaggaaggtaaagacactaaaaaacagaagtccctggagcctagcatcccgccgccaaggattgcttcaggcgcacgaggcaatgctgccaaagctctgctggaaaacttcggattcgagctggtcatccagtacaatgaaaatcgacagaaagtacagaagaagggaaagtcaggcgagggcgagaacactgataagctggaatgtgggacctgcggtaagttgttctctaatgtattaattctcaaaagccatcaggaacacgtccatggacagttcttcccctatgcagccttggagaaattcgcccggcagtaccgcgaagcttatgacaaactgtaccctatcagtccatccagccctgaaacaccgccccctccgcctccaccacctcccctgccaccagcacccccccagccctcatctatgggaccagtcaagatcccaaacaccgtcagcaccccactccaagctccccccccaacccctcctccaccaccgccaccacccccacctcccccaccccctccccctcccccccccccttcggctccccctcaggtgcaactcccagtttctctagatctgcccctcttcccaagcatcatgatgcaaccagtgcaacacccggcattacctcctcagcttgccctccaattgcctcagatggatgctctgagtgcggacttaacacagttatgccagcagcagttaggtctggaccctaacttcctgcgccattcacagttcaaacgacctcgcacacgcattaccgatgatcaattgaagattctcagagcctatttcgatattaataattcaccttccgaagagcagatacaggaaatggctgagaagagtggcctgagtcaaaaggtcattaagcactggttcaggaataccctattcaaggaaagacaaaggaataaggactccccctacaacttctcaaatccccccatcacagtcctcgaggacattaggatagacccgcagcccacatcattggagcattacaagtccgacgctagcttctcaaagaggagctcacggacacgctttacagattaccagttgcgggtcttgcaggacttctttgacaccaatgcttatcccaaggacgatgagatcgagcagttgagtacagtcctgaacttgccaacccgtgttatcgttgtgtggttccaaaacgcccgtcagaaggcaaggaaatcatatgagaaccaggccgagaccaaagataacgagaagcgggaactcacaaacgaaaggtacattaggacatcaaacatgcaataccagtgcaaaaagtgcaatgtggtctttccacgaatatttgatctcatcacccaccagaagaagcagtgctataaagacgaggacgatgacgcgcaagatgagagtcagactgaagactctatggatgctacagaccaagtcgtgtacaagcactgcactgtcagcggccagaccgatgccgctaagaacgctgcagctccagctgcctcctccggctctggcacaagcacacctctgatccccagcccaaaacctgagccggaaaagacttctcccaaacccgagtaccccgccgagaagcctaagcaatccgacccaagtcctccctcccaaggaacaaaacccgcccttccacttgctagcacctccagcgaccccccccaggcatccaccgcccagccccagcctcagccacagccccctaagcagccccagttaataggccgccccccttcagcttcccaaactcctgtgccaagtagtcccctgcaaattagcatgacgtcgcttcaaaactcactgcctccacagttgctacagtatcagtgcgaccagtgtactgtagccttccctacgctggagctgtggcaggagcaccaacatatgcatttcctcgctgctcaaaaccagttcctccattctccttttcttgaaaggccgatggacatgccttacatgatcttcgatcccaacaaccctcttatgaccgggcagcttttgggctcctctctcactcagatgccccctcaggcctcttcaagtcatactactgcacccacaaccgttgcagcatcactcaagcgcaagctcgacgacaaagaagataataactgttctgaaaaggaggggggcaactcaggcgaagatcagcatagggacaagcgattgcggacaactattacccctgagcagctcgagatcctttatgagaagtacctgctggactctaaccctacgaggaaaatgctggaccacattgccagagaggtgggcctaaaaaaaagggtcgttcaggtctggtttcagaatacgcgcgcccgcgaacgaaagggccagtttagagcagtcggtccagcccagtcccacaaaagatgccctttctgtcgcgccctcttcaaagcaaaatctgcgctggagtcccacattaggagtcggcattggaacgaaggtaagcaggcaggatactctcttcctccatcaccacttatttccaccgaagatggcggcgagagtccccagaaatacatctacttcgattatccatccttgcccctcaccaaaatcgacctctccagtgagaatgagctggccagtaccgtaagcacccccgtatctaaaacagcggagctgtctccaaaaaacctgttgagtcctagctcttttaaagccgaatgcagcgaagacgtcgagaacctgaacgcccctcctgccgaggcagggtatgaccagaataagaccgacttcgacgagacctcatcaatcaatacagctatttcggacgcaaccacgggagacgagggtaacaccgagatggaatctacgacaggcagttccggagacgttaaaccagccctttccccaaaggagcctaagaccctagataccttacctaaacccgccaccactccaacaacggaagtttgcgacgacaagttcctcttttctttaacatctccttccatccatttcaatgacaaggacggagaccacgaccagtccttctacattacagatgacccagacgacaatgcagaccgatccgagacatcatcaatagccgaccccagttcaccaaatccctttggtagctctaatcccttcaagagcaaatcaaacgatcgtccagggcacaaaaggttcagaacacagatgagcaatctgcagctaaaagtcctcaaagcatgcttttcagattacaggacccccacaatgcaggagtgcgaaatgctcggcaacgaaatcggccttccaaagcgagtggtacaggtgtggttccaaaacgccagggcaaaggagaaaaaattcaaaatcaatatcggcaagccatttatgatcaaccaagggggaactgagggaacgaaacctgaatgcacgttgtgtggcgtgaaatatagtgcaagactgagtatcagagatcatatattctccaagcagcacatatcgaaggtgcgcgaaaccgtgggcagtcaattggaccgcgagaaagactacttggcgcccactacagtccgccagttgatggcccagcaagaattggataggattaagaaggcttctgacgttctcggacttacagtacaacagccaggtatgatggactcatccagcctccacgggatctcactcccgacagcatacccgggattaccaggccttccccctgtcttgctgcccggcatgaatggcccaagtagtctgcctggctttccccagaatagtaacatcgccagcggaatgctcggtttccctacttcagccacatcaagtccagccctgtccctcagcagtgcaccaacaaagcccctgcttcaaaccccgcccccacccccacccccccctccaccaccaccatcctcgagcctctcaggtcagcagacagagcaacaaaataaagagtccgagaagaagcagacaaaaccaaacaaggttaagaagatcaaagaggaggaactggaggccactaaaccagaaaaacatcctaaaaaggaagagaagattagctccgccctcagtgttcttggcaaggttgtgggtgagacccatgtagacccaatccaactccaggcattacagaacgcaatcgcaggcgacccagcaagtttcattggggggcagtttcttccgtactttattcccgggttcgcctcttattttactccacagttacccggcactgtgcaaggtggctattttccacccgtttgcgggatggaatctttgttcccctatgggccaacaatgcctcagaccttggcggggctttccccaggagcactgctgcaacagtaccagcagtaccagcagaaccttcaggaaagcctgcaaaaacagcagaaacagcaacaagagcagcagcagaagcccgtgcaagccaagactagtaaggttgagtctgaccagccgcagaattcaaacgacgcatccgagacaaaggaggacaagtccacagcgaccgagagcactaaggaagagccccagctggagtccaagagcgcagacttttcagacacatacgtggtcccatttgtgaagtacgaatttatttgcaggaagtgccaaatgatgttcacagacgaagatgctgcggttaatcaccagaagagcttctgttactttggacaacctctgatcgatccccaagaaacagtgttgagggtacctgtgagtaaataccaatgcctcgcctgcgatgttgccattagcggtaatgaggctctctcacagcatctacagagctcgctgcacaaggagaagacaattaagcaggccatgagaaacgccaaggaacacgtacggctcctgccacactcagtatgttctcctaaccctaacactaccagtacgtcacagagcgccgccagtagtaacaacacctaccctcacctgtcttgcttttccatgaagagttggcccaacattttgtttcaagcgtccgcccggcgcgccgcatcaccaccaagcagtccccctagcttgagccttccgtccactgtcacttccagtctctgctctacaagcggcgtgcagacaagcctacccaccgagtcgtgctccgatgaatccgattcagagctgtcccaaaagctcgaggacctggataacagtttggaagtgaaagccaagcccgcgtctggcctagacggcaacttcaattctatcagaatggacatgttttctgtctag

SEQ ID NO: 248599 - RNA, 1821 nt, synthetic construct
  misc_feature 1..1821: note = Description of Artificial Sequence: Synthetic coding sequence
  source 1..1821: mol_type = other RNA
atgaccctcctcacttttagggacgtcgctatagagttctcactggaagaatggaagtgcctagatttagcacagcaaaatctgtaccgagatgtgatgctcgaaaactataggaatctattttctgtcgggcttaccgtctgtaaacccggcctcataacttgcctcgagcagagaaaggagccttggaacgtcaagcgacaggaagccgcagacggccacccggaaatgggttttcaccacgccacccaagcctgcctagaactgctcggatcctccgatctgccggcctcagcctctcaaagtgccggaattactggcgtgaatcatagagctcagccgggcctcaatgtgagcgttgacaagttcacagccatgagctcacattttactcaagatctgctgccagaacagggtatccaggacgcattcccgaagcggatactcagggggtacggcaattgcggccttgacaatttataccttcggaaagactgggaatcattagatgaatgcaagctgcaaaaggactacaacgggctcaaccagtgctcctccaccacccattccaaaatttttcaatataacaagtacgtgaagattttcgacaactttagtaacctgcacaggagaaatattagcaacaccggcgagaaaccttttaagtgtcaggagtgcggaaaaagttttcagatgttgtccttccttacggaacaccagaagatccacaccggtaaaaaattccagaagtgtggtgagtgtggcaaaacctttatccagtgctctcattttaccgagcctgaaaacatcgacacaggcgagaaaccatacaagtgccaggagtgcaacaatgtcattaagacatgctcagtgctgacaaagaatagaatctacgccggaggggaacattaccgttgtgaagagttcggaaaggtgttcaatcagtgtagtcacttgacagagcacgaacacgggacagaagagaaaccttgtaagtacgaggagtgctcatctgtgttcatctcctgcagtagcctatctaaccaacaaatgatattggcaggcgagaagctgagcaaatgtgagacctggtataaaggcttcaaccatagtcccaacccctccaagcaccaaaggaacgaaatcggcggcaaacctttcaaatgcgaggaatgcgattccatatttaagtggtttagcgatctgactaagcacaagcgtattcacaccggagagaagccttacaaatgcgacgagtgcgggaaagcttacacccagtcctcccatttgagcgagcacaggaggatccataccggggaaaagccttatcaatgcgaagagtgtggaaaggtgttccgtacttgttcctctttgtcaaatcacaaaagaacacacagcgaagaaaaaccctacacctgcgaagaatgtggtaacatttttaaacagctcagcgatctgacaaaacacaagaagacccacactggcgagaaaccctacaaatgtgacgaatgcgggaagaatttcacccaatcatctaatctgatcgttcacaaacgtatccatacaggtgagaaaccctataagtgtgaggaatgcggccgtgtgttcatgtggttttctgacattactaaacacaaaaagactcataccggtgagaagccttacaaatgcgacgagtgcggaaagaattttacccagtcaagcaacctaatagtgcataagagaattcacactggagaaaagccctacaagtgtgaaaaatgcggcaaagcctttacccagttttcccacctcactgtgcacgagagtattcacacctag

SEQ ID NO: 248600 - RNA, 3804 nt, synthetic construct
  misc_feature 1..3804: note = Description of Artificial Sequence: Synthetic coding sequence
  source 1..3804: mol_type = other RNA
atgggcgatatgaagactcctgatttcgacgatctgctcgccgccttcgacataccggatccgacgagtcttgacgctaaagaagccatccagacgccttcggaagagaacgagtcgcccctcaaacccccaggtatatgcatggacgaaagcgttagtctatctcactcggggtctgctcccgatgttcccgcagtttctgtcatcgtcaagaacacctcacgccaggagtcttttgaagctgagaaagatcatataacacccagtctcctgcacaacggcttcaggggatcagatctccctcccgaccctcacaattgtggcaagttcgattccacattcatgaatggcgactctgctcgaagctttcctggcaagctggagcctccaaaaagcgagcctttaccgacgttcaatcagtttagcccgatttcatcgccggagcccgaggatcccattaaagataatggatttgggatcaagcccaagcatagtgacagctatttcccccctcccctgggctgcggagctgtgggggggcccgtgttggaggcactggctaagtttccagtcccagagctgcatatgttcgaccatttctgcaagaaggaacctaaaccagagccattgccactcgggtctcagcaagagcacgaacagtccggacagaacacagtggagcctcataaggatcctgacgctactcgttttttcggcgaagcactcgaattcaactcacacccgagcaatagtataggagagtcaaaaggcttagctcgcgaattgggaacctgttcctcagtccctcctcgacagcgacttaagccggcacactccaaactgtcttcatgcgttgcagcattagtagccctgcaggcaaagcgcgtggctagcgttaccaaagaagaccagcccgggcatacaaaagacctcagtgggcccactaaagaatcctccaaagggagtcctaagatgcctaagtctcctaagagccccaggagcccattggaggcaacacgtaaaagcatcaaaccatctgactcaccgagatccatttgcagtgactcaagctccaagggcagcccatctgtggccgcaagctcaccgccggcaattccaaaagtgaggattaaaactatcaagacatcatcaggagagattaaacgaacagtgacccggattctgcctgaccccgacgatccttcaaaaagcccagtgggttctcccctcgggtcggccattgccgaagctccttccgaaatgcccggcgacgaggtcccagtcgaggaacactttcctgaagctggaaccaacagcggcagtccccagggagcacgtaagggggacgagtcaatgactaaggcttctgacagtagttctccttcgtgcagcagtggtccacgggtgccaaagggagccgcacccggctcacagactggtaagaaacagcaatccaccgctctgcaagccagcaccctagcaccagccaatctcctgcccaaggcggtccaccttgccaacctcaatctggttccccattctgtcgctgccagtgtgaccgccaagtcttccgtgcaaagacgcagccaacctcagctgacacaaatgtccgtgccacttgtccatcaggtgaaaaaggcagccccccttattgttgaggtattcaacaaagtgctccattcctctaatccagtgccactctatgcccccaacctttctcctcctgcggattcccgcatacatgttcccgccagtggttactgttgcctcgaatgtggcgatgcctttgcactggagaaatctcttagtcagcactatggtcgcagaagtgtgcatattgaggtgctgtgcactctttgcagcaagacgctcctgttcttcaacaaatgcagcctgcttcggcatgctcgggaccataagagcaagggactcgtcatgcagtgctctcagctcctcgtgaagcccatcagcgccgatcagatgttcgtgtcagctccagtgaatagcactgctccggccgcccccgctcctagctcaagcccaaagcacggcttaacttccggttcagcaagcccccctccacccgcgcttcccttataccccgatccagtgagattaatccgatacagcataaagtgtctggaatgtcacaagcagatgagagactacatggtgctggctgctcactttcagagaactacagaggaaaccgagggacttacctgccaggtctgccaaatgctgctgccgaaccagtgtagcttttgcgcacaccagcgtattcacgctcataagtccccctactgctgccctgagtgcggagttctgtgtcgaagtgcctattttcaaactcatgtcaaggagaattgcctccactatgcacggaaggtgggttatcgatgtattcattgtggtgtggtgcatttgactcttgctcttctgaagtcccacatccaggaacggcactgccaagtcttccataaatgtgccttctgtcctatggccttcaaaaccgccagcagtaccgccgaccattcagctacacagcaccccactcagccgcatcgcccaagccaactgatctacaagtgtagttgcgagatggtctttaataagaagagacatatccaacagcacttctaccaaaatgtgtctaagacacaggtaggcgtgtttaaatgccctgagtgtcctctcttgtttgtccagaagcccgagctgatgcaacacgttaagtccacccacggagttccgcgtaatgtggacgaactatcgtctctgcagagttcagctgatacttcaagcagcagacccggctctcgagtgcctacagagccccctgctacaagcgttgccgcccggtctagttcactgccaagtggacggtggggccggccggaagcccacagaagagtggaagctaggcctagactcaggaacacggggtggacctgccaggagtgccaggaatgggtccccgatcgcgaaagctatgtgtctcacatgaaaaagtctcacggacggacacttaaacgatacccttgccggcaatgtgaacagtcttttcatacacccaatagcctgcgaaagcatataagaaacaatcacgataccgtcaaaaaattctatacttgtgggtactgcaccgaagacagccccagcttcccgcgcccctccctccttgagtcacatattagcctgatgcacggcataagaaacccagacctgtcacagaccagcaaagtaaaaccccctggtggtcattcaccacaggtgaatcatctcaagagaccagtttctggcgttggagacgcgccgggcacatccaacggggccactgtatcttctacaaaaagacataagtctctgtttcagtgtgccaaatgttccttcgctacagactccggccttgagttccagtctcacatcccacagcatcaagttgattctagcactgcccagtgccttttatgcggcctttgttacacttctgccagtagcttatccagacacctattcatcgtgcataaggtccgagatcaggaagaagaagaggaagaagaagcggctgccgcagagatggccgtggaagtggctgagcccgaagaggggagcggggaagaagtgccaatggagacgcgcgagaacggcctggaggagtgtgcaggcgaaccacttagtgccgaccctgaagcccggagactcctcgggcccgctccagaagatgacgggggacacaacgaccacagtcagccccaggcatctcaagaccaggattcccacaccttaagtccccaggtgtag

SEQ ID NO: 248601 - RNA, 2406 nt, synthetic construct
  misc_feature 1..2406: note = Description of Artificial Sequence: Synthetic coding sequence
  source 1..2406: mol_type = other RNA
atggatgaggatgagtttgagcttcagccacaagagcccaactccttttttgatggaatcggagcagacgctacccacatggacggagaccaaatagtggttgagatacaggaggccgtgtttgtgagcaacatcgtggatagcgatatcacggttcacaactttgtgcccgatgatcctgacagtgttgtcattcaagatgtagttgaggatgtggtgatcgaggaagacgttcaatgttctgacatcctggaggaggccgatgtctctgaaaatgtgattatcccggaacaagtcctcgattctgacgtgacggaggaagtctctttgccccactgcaccgtccccgacgacgttctggcttctgatattacgagtacatccatgtccatgcccgaacacgtcctgacctctgagtctatgcatgtttgcgacattggacacgtggagcatatggttcacgattctgtggtagaagccgaaataatcactgacccattaacaagtgacatcgtgtcagaagaggtgcttgtggcagattgtgccccagaggccgtcatcgacgcttccgggatcagcgttgatcagcaggacaacgacaaggcatcctgcgaggactacctgatgatttctttggatgatgctggcaagatcgagcacgacgggtccactggagtgacaatcgatgccgaatccgaaatggatccctgtaaggttgactccacatgtcctgaggtcatcaaagtatatatttttaaggctgaccctggcgaagacgacctcggaggaaccgtggatatcgtggagagtgagccagaaaatgatcatggcgtggagctgctggaccagaacagttcaattcgagtacctcgggaaaagatggtgtatatgacagtgaacgattcgcagcaggaagatgaggatttgaacgtagctgagatagctgatgaagtgtatatggaagtgattgtaggcgaggaggatgctgccgtggccgccgctgcagcagccgtccacgagcagcagatagacgaagacgagatgaagacttttgttcctattgcatgggccgcagcttacggtaataacagcgacgggatagaaaacagaaacgggacagctagtgcgttactgcacatagacgagagcgcaggtctgggacgcctcgcaaagcagaagcccaagaaaaaacggcggcccgactcaagacagtaccagaccgccatcatcattggacctgatggtcaccctttaactgtgtacccctgcatgatctgcggtaaaaagttcaaatctaggggatttctgaaacgccatatgaaaaaccaccctgagcacctcgccaaaaagaagtatcactgtacagattgtgactacactactaacaagaagatcagtctccataatcatctggaaagccacaagcttacatctaaggccgaaaaagcaatcgaatgtgacgagtgcgggaaacactttagccatgctggggctctatttacccataaaatggtccataaggagaaaggcgccaacaagatgcataaatgcaaattctgcgagtacgagactgctgagcagggactgcttaatcgccatcttcttgccgtgcattcaaaaaactttcctcatatttgtgtcgaatgcggtaagggcttccggcacccaagcgagttaaggaagcacatgcgaattcatactggtgaaaagccctaccaatgccagtactgtgagtaccgcagtgccgatagtagcaatctgaaaacacacatcaaaacaaagcattctaaagaaatgccttttaaatgtgatatatgtctgctcaccttctccgacaccaaggaggttcagcagcataccttggttcaccaagaaagcaagacccatcagtgcctgcactgtgatcacaaatcttcaaattcaagcgatctgaagaggcatgtgatttccgtgcacactaaggattatccccacaagtgcgaaatgtgtgagaaaggatttcacagaccttccgaacttaaaaagcatgtcgcagttcacaaaggaaagaagatgcaccaatgtcgtcattgcgactttaagattgcagaccccttcgtattgagtcgccacatattatctgtgcacactaaggatctgccttttagatgcaagcggtgtagaaaaggatttaggcagcagaatgaactgaaaaaacacatgaagacccactccgggcgaaaggtgtaccaatgtgagtattgtgagtactccactacggatgcttctggctttaaaaggcacgttatctctatccatacgaaagattaccctcatcgttgcgagtactgtaagaagggctttcgaagaccaagcgagaagaatcagcacatcatgagacaccacaaggaagtgggactgccatag

SEQ ID NO: 248602 - RNA, 1419 nt, synthetic construct
  misc_feature 1..1419: note = Description of Artificial Sequence: Synthetic coding sequence
  source 1..1419: mol_type = other RNA
atgaaattccttatcttcgcatttttcgggggagttcacctgttatcactttgttcaggcaaagctatctgtaaaaatggcatcagcaaacgaacatttgaggaaattaaggaggaaatagccagctgcggggatgtggccaaagcaatcattaatttagcagtctatggaaaagcgcagaatcgcagttacgagcggctagcccttttagtggatactgtggggccgcgcctgtcaggcagtaaaaatttggagaaagccatacagataatgtaccaaaatctgcaacaggatggcctggaaaaagtccacttagagccagttcggatccctcactgggaacgcggggaggagagcgcggttatgctggaaccaagaattcacaaaatagccatactcggcttgggaagctctatcgggactccaccagagggaatcactgcagaggtgctcgttgttactagtttcgacgagcttcagagacgcgctagcgaggcacggggtaagatcgtcgtttacaatcagccatatataaactattctaggacagttcaatatcgaacgcagggcgcagtggaagctgcaaaggttggcgcactagcctctttgattcggtctgttgcctcattttctatttactcaccacataccggaatacaggagtaccaggatggtgtacccaagatccccaccgcatgtataacagtggaggatgccgaaatgatgtcacggatggctagccatggtattaagatcgtcattcagctgaaaatgggcgctaagacatatccagacaccgactcattcaatacggttgccgagatcaccggctctaaataccccgaacaggtagttttagtaagcggccacctggacagctgggatgtggggcagggtgctatggatgacgggggcggtgcattcatcagttgggaagccctctcccttattaaagatttaggcttaagaccaaaaaggacactgaggttggtactgtggacagccgaagagcagggcggggtgggcgcattccaatactaccagctacacaaggtgaatatatcaaactactctcttgtgatggagtctgacgccggcacattcctgcccactggcttgcagtttacaggtagtgaaaaagcacgcgccataatggaggaagtaatgagtctgctgcagcccttaaacattactcaggtgctgtcacatggagagggcaccgatattaacttttggatccaggccggagtgcctggcgctagtttattggatgatttatacaaatatttttttttccaccattcccatggggataccatgacagtaatggacccgaaacaaatgaacgtagccgcagccgtatgggccgtcgtctcttatgtcgtggctgacatggaagaaatgttacctaggagctag

SEQ ID NO: 248603 - RNA, 5724 nt, synthetic construct
  misc_feature 1..5724: note = Description of Artificial Sequence: Synthetic coding sequence
  source 1..5724: mol_type = other RNA
atgcagtttgttagttgggccacattactgactcttctggtgcgagatctggccgagatgggtagccctgacgccgcagcagcggttcggaaagatcgcctgcatccacgccaggttaaactcctagagactctctctgaatacgagattgtaagcccaataagagtgaacgctttaggtgagccttttccaaccaacgtccacttcaaaagaacccgacgcagcatcaactccgcaacagacccctggcctgcctttgccagcagctctagctcctctacttcatctcaagcccattacagactgagcgcattcggacagcagttcctgttcaatttaactgctaacgctggatttatcgccccgctcttcacagtaactctgctggggacaccgggggttaaccagacaaaattttacagcgaagaagaggcagagctaaaacactgtttttacaaaggatacgtgaataccaatagcgaacacacggctgtgatttccttatgctcagggatgcttggaacttttcgatcacacgatggggattactttattgagcccttgcaatcaatggacgagcaagaggacgaagaagagcagaataagccacacatcatttacaggaggtcagccccacaaagggaacccagcactggaagacatgcatgtgatacatccgagcataaaaatcggcatagcaaggataagaaaaagacccgtgccagaaagtggggcgagagaattaatttagcaggggatgtcgccgcactcaatagtggactggctactgaagcattctcagcatacggtaataagactgacaacacaagggagaaaagaacacatcggcggaccaaaagatttctcagctacccccgattcgtagaggtcctagttgtagcggataaccgcatggtttcctatcacggagagaacttgcagcactacatcctcaccctcatgagcatcgatggaccatctatatcttttaacgcgcaaactactctgaaaaatttttgccaatggcaacactctaaaaattcaccgggcggaatacaccacgataccgccgtgctgctcactaggcaggatatttgtcgcgcccatgataagtgtgacaccctcggactggccgagttgggaaccatctgcgacccctaccgttcctgctcaatttctgaagatagtggcttatcgactgctttcactatcgctcacgagcttggacatgtcttcaatatgccgcatgatgataataacaaatgtaaagaggaaggcgttaagtcaccccagcacgtaatggctcccacactgaacttttacacaaacccctggatgtggagcaaatgttcaaggaagtacataactgaatttctcgacacgggttatggagagtgcctcttgaatgagccggaaagcaggccctatcccctgccagtgcagttacctggaatcctgtataacgttaacaagcagtgcgaattgatcttcggcccggggagccaagtttgcccctacatgatgcaatgcagaagactatggtgtaataacgtgaatggcgttcataagggctgtcgaactcagcataccccatgggctgatggaaccgaatgcgaaccgggcaaacactgcaagtatggattctgcgtgcccaaggagatggacgtgcccgtgaccgacgggagttgggggtcatggagtcccttcggtacttgtagtcgaacatgtggagggggcatcaaaacagccatcagagaatgtaatcgccccgagcctaaaaatggcgggaagtactgcgtcgggcggagaatgaaatttaagagttgcaacaccgagccgtgtttgaaacaaaaaagggactttagggacgagcaatgtgctcatttcgatggaaaacactttaacattaatggccttctccccaacgtgcggtgggtgccaaagtatagcggcattctgatgaaggataggtgtaagctattctgtcgtgtggctggaaatactgcctactaccaacttcgggatcgcgtcatcgatggaactccgtgtggacaggacactaatgatatttgcgtacaggggctgtgtcgccaggcgggatgcgatcacgtccttaatagcaaggcccgtcgcgataagtgtggcgtgtgtggcggtgataactcctcctgtaaaacggtcgcagggacctttaacacagttcactacggatacaacactgttgttcggattcctgccggagcaacaaatatagatgttcgtcaacattcctttagcggcgagaccgatgatgacaactatttggcactatcctctagtaaaggtgaattcttgcttaacggaaactttgttgtcacgatggccaaaagagaaatcaggattggaaatgccgtagtcgagtactccggctctgagaccgccgtcgaacggattaactctacagatcgtatcgagcaggaactgttgctccaagtcctaagcgtcggaaaactgtataatccggacgtcagatatagtttcaatattccgatagaagataaacctcagcagttctattggaactctcacggaccatggcaggcttgctcaaaaccttgtcaaggagaacgaaaaaggaagctcgtctgcacgcgcgagagcgatcagctgactgttagcgatcagaggtgtgacagactcccacagcccggccatattaccgagccttgtggaactgactgcgatctgcgttggcatgttgcgtcgcggagtgagtgcagcgctcagtgtgggcttggataccgaaccttggatatctattgtgctaaatattctagactcgatggcaagaccgaaaaagtggatgatggattctgttcatctcatcctaagcctagtaaccgggaaaagtgtagcggagagtgcaacaccggcggatggcgatacagtgcgtggaccgaatgcagcaagagttgcgatggaggcacccagagacggagagccatttgtgtgaatactcgaaatgacgtgcttgacgattcaaagtgcacacaccaggaaaaggttacaattcaaagatgtagcgagttcccttgtccccaatggaaatccggtgactggagcgaatgccttgtcacgtgtgggaagggacacaagcaccgacaggtatggtgccagtttggggaagacagattaaacgacaggatgtgtgatcctgaaactaaaccaacttcaatgcagacatgtcagcaaccagaatgcgcaagttggcaagccggaccctggggacaatgcagcgtgacttgtggccaggggtaccagttgcgagccgtcaagtgtatcattggaacctatatgagcgtggtcgacgacaatgactgcaacgccgcaacacggccgaccgatactcaagactgcgaactgcctagttgtcacccacccccggctgctccagagactcggagaagtacttattcagcgccacgtacccaatggaggttcggttcttggacaccttgttctgccacctgcggcaaagggactaggatgaggtatgtttcttgtagggacgaaaacggatcagttgcagatgagtccgcatgtgccaccttaccacggcctgtagcgaaagaagaatgctccgtgactccatgcggacaatggaaagccctggactggtcaagctgttctgtgacctgtgggcaaggtagagccacaagacaggtcatgtgcgtaaactacagtgaccatgttatcgaccgctctgaatgtgatcaggattatatcccagaaacagatcaggattgttcaatgagtccttgcccccagcggactccagattctggactagcccagcatcccttccaaaatgaggactaccgacccagaagcgctagcccatcccgaactcacgtgcttgggggaaaccagtggcgtaccggaccgtggggggcgtgttcatcgacctgtgcaggaggctcccagaggcgggtggtagtctgccaagacgaaaacggctacacagcaaacgactgcgtggagagaatcaaaccagacgagcagcgagcatgcgagtccggcccatgtccgcaatgggcgtacgggaattggggtgagtgtactaaactgtgcggaggaggaataaggactcggttagtagtttgtcaaagatccaatggggaacggtttcctgacctctcttgcgagatactggacaagcccccagacagggaacagtgcaatactcatgcctgtccacacgacgctgcatggagcacaggaccttggtcttcttgttcagtaagctgtgggcgcggtcataaacagcgaaatgtgtattgtatggcaaaagacgggtcccacctagaaagcgattactgtaagcacttggctaagccacacggtcatcggaagtgcagaggaggtcggtgtcctaagtggaaggcaggggcatggtcacaatgcagcgtttcttgcggccgaggtgttcaacagcggcatgtgggatgtcagataggaacccacaaaattgccagagaaacagaatgtaacccatacacacggcccgagtcagagcgggattgtcagggcccaagatgtccactgtacacatggagggctgaagaatggcaagaatgtaccaagacatgtggtgaggggagtagatatcggaaagtggtgtgcgttgatgataacaagaacgaggtgcacggagcaaggtgcgacgtgtctaagagaccggtggatagggagtcttgtagtctgcaaccttgcgagtatgtatggattaccggtgaatggtccgaatgctcagttacatgtggcaagggctacaagcaaagactagtgtcctgctccgagatctataccgggaaggagaattacgaatatagctatcagacgacgatcaactgtccaggaactcagcccccaagtgtgcacccttgttaccttagagattgcccagtgtcggccacatggagagtgggtaattgggggtcttgcagcgtgtcttgtggcgttggggtcatgcagcgtagcgtacaatgcttaactaacgaagaccaaccctctcatttatgtcacacagatctgaagccagaagaacggaaaacatgccgcaatgtttacaattgtgaattaccgcagaattgcaaggaagtcaagcgattgaagggtgcatctgaagacggagaatattttctgatgattagggggaagctgttgaaaatattttgcgccggtatgcactccgaccacccaaaagaatatgttaccttagtgcacggagactccgaaaacttctcagaggtctacggacatcgccttcacaacccgaccgaatgcccttataacggctcacgccgagacgattgtcaatgcaggaaagattacactgcggccggcttttcgagctttcagaaaataagaatcgatttgacatctatgcaaattataaccacagatttacagtttgctaggactagtgagggtcaccccgtgccatttgcgacggccggagattgctactcagccgctaagtgccctcagggtcgatttagcatcaatctctatggcacaggcttatctctgacggaatctgctagatggatctcgcagggtaactatgccgtttctgacattaaaaaatcaccagacggcacaagggttgtggggaaatgtggaggctactgtggtaagtgtacaccctctagcggtaccggacttgaagtacgcgttttgtag

SEQ ID NO: 248604 - RNA, 2976 nt, synthetic construct
  misc_feature 1..2976: note = Description of Artificial Sequence: Synthetic coding sequence
  source 1..2976: mol_type = other RNA
tgagagtgcagtgctcagtgcgggttgggatacagaacgcttgacatctattgcgccaaatatagtaggcttgatggtaagacagaaaaggtggatgacggtttttgctcctcgcatccgaagcctagcaatcgggaaaaatgcagtggagaatgcaacaccgggggttggaggtacagtgcttggacagaatgttctaagtcttgcgacggtgggacacagaggcgacgtgcaatatgtgtgaacactcgcaacgacgttttagatgattcgaagtgcactcaccaggaaaaagtgaccatccaaagatgttccgaattcccatgtccacagtggaaaagcggcgattggtcagagtgtctggtgacatgtgggaaaggtcacaagcatagacaggtatggtgccaatttggcgaggaccgattgaatgaccggatgtgtgatcctgaaacaaaacccacctcgatgcaaacctgtcagcaaccggagtgcgcgtcctggcaggctggaccatgggggcagtgtagcgtgacttgcggacagggctaccaactcagagcagtaaaatgtattattgggacctatatgtctgtggtcgacgataacgattgtaacgccgcgactaggcctacggatactcaggattgcgagcttccttcctgtcacccaccacccgctgcaccagagacgagacggagcacctacagcgccccccggacacagtggaggtttgggagttggacaccatgcagcgcaacctgcggaaaggggacgaggatgagatacgtttcatgtcgggatgagaacggcagtgttgctgatgagagtgcttgtgcgaccctccccagacctgtagcaaaagaagaatgttccgtcaccccctgcggtcaatggaaggcactagattggagttcctgcagcgtgacgtgtggtcaaggcagggccactcggcaggtgatgtgtgtcaactattccgaccatgttatagaccgcagcgagtgtgaccaagattacatccccgaaaccgatcaagattgtagcatgagtccatgtccccaaaggacccccgactctggtctcgctcaacatccgttccagaacgaagactaccgaccaagaagtgctagccccagccgtactcacgtgctcggaggtaatcagtggagaaccgggccttggggcgcgtgtagttcaacctgcgccggcggctctcagcgccgtgttgtggtgtgtcaggacgagaatggttacactgctaatgattgtgtagaacgaattaagccagatgagcagcgtgcatgtgaatcagggccgtgtcctcaatgggcctatggtaattggggggaatgcaccaagttatgtggaggcggtattagaacaagactcgtcgtgtgtcaaagatccaatggagaacggttcccagatctttcttgcgaaatactggacaagccaccggatagggaacagtgtaacactcacgcctgtccacatgatgccgcatggagcactggaccttggagctcttgtagcgtgtcctgcggaaggggtcataagcagcgcaacgtttactgtatggcgaaagatggttcccacctggaaagcgactactgtaaacacctggccaaacctcatggacaccgcaaatgtagaggagggaggtgtccaaagtggaaagcaggcgcctggagtcagtgtagtgtctcctgcggtcggggcgttcaacaaaggcacgttggttgtcagatcggcacacacaagatcgcaagagaaacagagtgtaatccttataccagacccgagagtgagagagattgccaggggcccagatgcccgctttacacgtggagagctgaagaatggcaagaatgtaccaagacctgtggtgagggcagtagatacagaaaggtggtctgcgtagacgacaacaaaaatgaagtccacggagccaggtgtgacgtctccaaacgcccagtagacagagagtcctgctcccttcagccttgcgaatatgtttggatcaccggagaatggagtgaatgctccgtgacctgtggcaaaggttataaacaacgattagttagctgtagcgaaatttatactggaaaagaaaattacgagtacagttatcagactacaatcaattgtcccggaacacaaccacccagtgtccacccgtgttatctgagagactgcccagtgagcgcaacgtggcgtgtcggcaattgggggtcctgcagcgtctcatgcggtgttggagtcatgcagaggtccgtacagtgtttgaccaatgaggatcaacccagccacctgtgtcatacagatctgaagcccgaagagaggaaaacatgcagaaatgtctacaattgcgaacttccgcaaaattgtaaggaggtgaagcggctgaagggggcaagtgaggacggtgaatatttcctgatgatcagaggtaagctgcttaagatattctgcgccgggatgcactccgaccatccaaaagagtatgttaccctcgtacacggtgattctgaaaactttagcgaagtgtatgggcataggttgcacaatcctactgaatgcccttataacggatcgcgacgagacgattgccagtgccgcaaagattataccgctgctggatttagttcattccagaaaattcgtattgatctaacaagtatgcaaatcatcactaccgatcttcagtttgcaaggaccagcgaaggacatccagtcccctttgctaccgcgggcgattgttactccgccgctaaatgcccacagggacgattttctatcaacctgtatggcaccggtctctctctaactgaatctgcccgttggatctctcaaggcaattacgctgtttctgacataaagaagtctcctgacggtacaagagttgtcggcaagtgtggaggctattgtggtaaatgcaccccttcatctggcacagggctggaagttcgcgtcttatag

SEQ ID NO: 248605 - RNA, 5808 nt, synthetic construct
  misc_feature 1..5808: note = Description of Artificial Sequence: Synthetic coding sequence
  source 1..5808: mol_type = other RNA
atgcagtttgtctcatgggccacactccttacactcttggtgcgggacctggctgaaatgggctctccagatgccgctgctgccgtgaggaaagaccgcctgcaccctcgccaggtgaagctcctggaaaccctctctgagtacgaaatcgtatccccaatccgtgtcaatgcgctgggggagcccttcccaactaacgtgcactttaaaagaacccgacgatccattaattctgctactgacccctggcctgctttcgcaagttcctcttcatcctcgacatcatcccaggcacattatcgcttgtccgcgttcggccaacaattcctttttaatcttacggcaaatgcaggattcatagcaccccttttcactgtgaccttgttggggacacccggagttaaccagacgaaattttattcagaggaagaggccgagttgaagcactgtttctataagggctatgtaaatactaactcagagcataccgctgttattagtctctgttcagggatgctcggcacctttagaagccatgatggtgattattttattgagccgctacagtccatggacgaacaggaagacgaggaggaacagaataaaccgcatattatctatagacgaagcgcaccccaaagggagccaagcaccggacggcatgcatgcgatacatctgagcacaagaaccgccacagcaaagacaagaaaaaaacacgagctagaaaatggggggagagaattaatctggcgggggatgtggccgctttgaactctggtctagccactgaggcatttagtgcctatggcaacaaaacagacaacacacgtgagaaaagaactcaccgaagaacaaagagatttctgagttatcctcggttcgtagaggttctggtagttgcagacaaccgaatggtttcatatcatggagagaaccttcaacattacatactgaccctgatgagtattgtcgcctccatctataaagatccttcaatcggaaatctcattaacatcgtgatcgttaatttaattgttatccataacgagcaggacgggcccagcatttcgtttaatgcccagacaactctgaaaaacttttgccaatggcaacattctaaaaattctccaggtggtattcatcatgacactgctgttctgctcactagacaggacatatgcagggctcacgacaaatgtgataccctgggactggccgaactgggaacaatttgtgatccctatcgatcttgcagcatttcggaagactcaggcctctctaccgcttttacaatagcacacgagcttggccacgtgtttaacatgccacatgatgacaacaacaagtgcaaggaggaaggggttaaatctccccagcacgtgatggcacctacccttaatttttacacaaatccatggatgtggtctaagtgcagtcgaaagtatatcaccgagttcctcgacacaggttacggagaatgcttgctaaacgaacccgagtcccgcccttacccccttcctgtacagctgccggggattttatacaacgtgaataagcagtgcgaactcatcttcgggcctggctcccaggtatgcccctatatgatgcagtgccgacgcctgtggtgcaacaatgtcaatggagttcacaaaggctgcagaacacagcataccccttgggctgatggcaccgaatgcgagcctggaaagcactgtaagtatggattttgcgtccccaaagagatggatgtgcccgtgactgatggatcttggggaagctggtcccctttcggaacttgcagccggacatgcggcgggggcatcaaaactgccattagagagtgtaacaggcctgaacctaaaaatggaggaaagtactgcgttggaagaagaatgaagttcaaatcttgtaacacggaaccttgcttgaagcaaaaaagggacttccgagacgaacagtgtgcccactttgacggtaaacatttcaatatcaatggccttctgcctaatgtccgatgggtcccaaagtactctggtatcctcatgaaagaccggtgtaaactgttttgtcgggtcgcaggaaatacagcctattaccaactgcgtgacagggtgatcgacggaactccctgtggtcaagataccaacgacatttgcgtccagggcctctgtagacaagcaggatgcgatcacgtgctgaattctaaggctcgtcgagataaatgcggggtttgtggcggagataattcctcctgcaaaactgtcgccggcacatttaacacagtgcactacgggtacaatacggttgtgaggataccagcaggggccacaaacattgatgtacgtcagcactccttctccggggaaacggacgacgacaactatctggctctatctagttcaaagggagagtttcttctgaacggaaacttcgttgtgaccatggccaagcgggagatcagaatcggtaatgctgtcgtagaatactctggatccgagactgccgtggaacgaataaatagtacagatagaattgagcaggagctcttgctgcaggttcttagtgtcggtaaactgtacaaccccgatgtccgatactcttttaacatccctattgaagacaaaccccagcagttctactggaactcacacggtccatggcaagcctgttcaaagccatgtcagggtgagcgcaagcgcaaactggtatgcacacgcgagtctgatcagttgacagtgagtgaccagagatgtgatagactcccccagccaggccatatcactgaaccgtgcgggactgactgcgaccttcgctggcacgtcgcaagccgctcagaatgttcagcgcagtgtgggttaggatataggaccttagacatttactgcgccaagtactctcgactggacggcaagaccgagaaagttgacgatggcttttgctcttcacacccaaagccttccaaccgtgagaaatgctccggtgaatgtaatacaggcggatggcggtatagtgcgtggacggaatgctccaagtcctgcgacggcggtacgcaaagaagacgggccatatgtgtcaatacgcggaacgatgtactggatgactccaagtgcacccaccaagagaaagtcactattcagagatgctcagaatttccctgccctcagtggaagagcggagattggtcagaatgtcttgttacatgcggaaaaggtcacaaacataggcaagtctggtgtcagttcggagaggacaggctcaatgatcggatgtgcgacccagaaaccaaacctacttctatgcaaacatgtcaacagcctgagtgtgcatcttggcaggccggcccgtggggccaatgttcagtgacctgcggccagggataccagctccgagccgtcaaatgcatcataggcacctacatgtctgttgtcgacgataatgactgcaacgcagctaccagacctaccgacacgcaagattgtgaacttccctcttgccaccctccacctgcagcacctgagaccaggaggtcaacctactccgcccctaggacccagtggcgctttgggtcgtggactccatgttcagctacatgcggtaagggaactcgtatgagatatgtttcctgccgggacgagaatggatcggttgccgatgagagtgcttgtgctacactaccccgccccgtggctaaagaggaatgttcagtgaccccatgcggacagtggaaagctttggactggtcttcctgctctgtcacatgcgggcaagggagggccacccgtcaagtcatgtgcgtgaactacagcgaccacgtaatcgacaggtccgaatgcgaccaggattacatccccgagacagaccaggattgcagcatgagcccctgtccccaacggacacccgactccgggctcgcgcagcatccctttcagaacgaagattaccggccaaggtcagctagcccttctagaacacatgtgctgggaggtaatcaatggagaacaggaccatggggcgcatgttcctcaacttgcgctggtgggagtcagagacgtgtcgtcgtttgccaggacgaaaacggctatactgctaatgactgcgtggaacgaatcaaacccgatgagcagcgtgcgtgtgaatcaggtccttgtccgcagtgggcatacggaaactggggcgagtgcaccaaattgtgcggtggaggaatcagaacacggcttgtggtatgtcagcgatctaatggcgagagatttccagacctgtcatgtgaaatactggataaaccgccagatagagaacaatgcaacactcacgcatgcccccacgatgctgcttggagtaccggcccatggtccagttgtagtgtgtcttgcgggcgaggccataaacagcggaacgtatactgtatggccaaggacggaagccacctcgaaagtgattactgtaagcacctggcaaaacctcacggacatcggaaatgccgcggaggtagatgccctaagtggaaagctggagcttggagccagtgtagcgtctcctgtggcagaggcgtccaacaacgccacgtaggttgtcagatagggacccacaagatagcaagagaaacagaatgcaacccctatactagaccagaatcagagagagactgccaggggccccgttgccccctgtatacttggcgtgctgaggagtggcaagaatgtacaaagacctgcggtgagggaagtagatacaggaaggtggtatgtgtggacgataataagaatgaagtacatggggcacgatgcgacgttagtaaacggcctgtagaccgagaatcctgttcccttcagccttgtgaatacgtgtggataactggtgaatggtcagaatgtagtgtgacatgcggcaaaggctataagcagcgccttgtatcgtgctcagaaatctatacaggaaaggagaattatgaatattcataccagacaaccatcaactgtcccggaacacaacctccgagcgtgcacccttgttatctcagagattgccctgtttctgctacatggcgggttggtaattggggatcatgctcagtttcttgtggtgtaggtgtgatgcaacggtccgttcagtgtctcaccaatgaagatcaacctagccacctgtgtcataccgatcttaaaccagaggaacggaaaacctgtaggaacgtttacaactgcgaactgccccaaaactgcaaagaggtgaaaagacttaaaggggcctccgaggatggggagtacttccttatgatacggggtaagcttctcaagatattttgcgctggcatgcattccgaccaccccaaggaatacgtaactctcgtacatggcgactccgaaaactttagtgaagtgtatggccatagattacataatcctactgagtgcccctataacggatcccgaagggatgattgtcagtgccgcaaagactatacagccgctggattctccagttttcaaaagataaggatagatcttactagcatgcagataataactacagatctgcaatttgccaggacatcagagggtcatcccgttccctttgccactgctggagattgctattctgccgccaaatgcccccaaggtcgattttctattaatttgtatgggacgggacttagccttaccgaaagtgcaaggtggatatcacagggcaactacgccgtctcagacatcaagaaaagccctgatggcacacgggtagtggggaagtgtggaggatattgtggtaagtgcaccccgagtagcggcaccggcttagaagtcagagtcctatag

SEQ ID NO: 248606 - RNA, 2052 nt, synthetic construct
  misc_feature 1..2052: note = Description of Artificial Sequence: Synthetic coding sequence
  source 1..2052: mol_type = other RNA
atggaatgctgcaggagagcgacaccaggaactctcctgctatttctggccttcctactgctctccagtagaacagccaggagtgaggaagatagagatgggttatgggacgcctggggaccctggtctgaatgctcccggacttgtggaggtggcgctagttattcattacggagatgtctaagttcaaagagttgtgagggcagaaacatccgttatagaacgtgctccaacgttgactgtcccccagaagcaggtgactttagggcccagcaatgctctgcacataacgacgtcaaacaccacggtcagttctatgaatggcttccagtttcaaatgaccccgacaatccatgctcattgaagtgtcaagcaaaaggaaccactctggtggtggaacttgcccccaaggttctggacggtactagatgctatactgaatctttggatatgtgtatctccggtctttgtcaaatagtgggatgtgatcatcagctgggttccaccgtaaaagaagacaattgcggcgtctgcaatggtgacgggtcaacttgtcgcctggtgaggggccagtacaaatcccagctatcagcaactaagtcagatgataccgtcgtcgctattccctacggctccagacacatccgccttgtcctcaagggacctgaccacctatatctcgagaccaaaactcttcagggcacaaagggagaaaacagcctctcaagcactggcacattcctagttgataactcgagcgttgattttcagaagtttcctgataaagaaatcctgagaatggcgggtcctctgacagccgactttatcgttaaaattaggaattctgggtccgctgactccaccgtacagtttatcttttaccaacccatcatacatagatggcgcgagaccgatttttttccttgcagtgctacttgtggcggcgggtaccagttgaccagtgccgaatgctatgatttaaggtccaaccgagtagtcgctgatcaatattgccattactatcccgagaatataaaacctaaacctaaactgcaggagtgtaacctcgacccatgtcctgctagcgatggctataagcagatcatgccctatgacctctatcaccccctacctagatgggaagcgaccccctggaccgcatgctcctcatcttgtggcggaggaattcagagcagggcagtgagttgcgtggaggaggatattcaaggacatgtaaccagcgtagaggaatggaagtgcatgtatacaccaaagatgcctatcgcccagccttgtaacattttcgactgcccaaagtggctggcccaggagtggagcccttgcaccgttacatgtgggcagggcctcagatatagagttgtactgtgcattgatcaccgcgggatgcataccggaggctgtagccctaaaacgaaaccccacattaaggaggagtgcattgttcccaccccctgttataaacccaaagagaagctgcctgtggaagcgaagttaccttggttcaagcaggcacaggagctcgaagaaggcgctgccgtgagtgaagagccgtcctttattcccgaggcttggagtgcttgcacagtgacctgtggcgttggcactcaggtgaggatcgtgagatgtcaggtgttactctcattcagccagagcgttgctgatctcccgattgacgagtgcgaaggaccaaaacctgcctcccaaagagcttgctacgctggcccttgctctggtgagatccctgaattcaatccagacgagacggatggactgttcggcggcttacaggacttcgacgaattgtatgattgggagtatgaaggtttcaccaaatgtagtgagtcctgtggcggaggtgtccaagaggcagtggttagttgcctgaacaaacagacaagagagcccgcggaagagaatctttgcgtgaccagtcgcagacccccccagctgttaaaatcctgtaacctggatccgtgccctgctcgatctagcatcgacagtgcctggaatgcttgtaacgtcttgtgttag

SEQ ID NO: 248607 - RNA, 1401 nt, synthetic construct
  misc_feature 1..1401: note = Description of Artificial Sequence: Synthetic coding sequence
  source 1..1401: mol_type = other RNA
atgtgtctgactgacgaatggggttttttctttttttttttcctgggggtgcccgaggcagaagtgacatggtttcgtaacaagtcaaagttaggctctcctcaccacctgcacgaaggttctctgctcctgacaaacgtgtcttcttccgaccaggggctatactcatgccgagccgctaatctccatggtgagttgacggaatccacccagctcttaatattagacccaccccaggtgccaactcaattagaagatatccgtgccctgcttgcagccaccgggcccaacctgccatccgttctgacgtcccctctcgggacccagttagttctagatcccggaaatagcgcactactcggatgcccgatcaaaggtcacccggttccgaatatcacctggttccacggaggacaacctatcgtcacagccaccggccttacacatcacatcctcgcagccggccagattctgcaggttgccaatctctccggtggcagccagggagagttttcctgcctcgctcaaaacgaagctggtgtactgatgcaaaaggcctctttagtgatccaggactattggtggtcagtggatcgcctcgccacctgttcggcgtcatgcggcaataggggggtgcagcaaccaaggctccgctgtctactaaactcaacagaggtgaaccccgcccactgcgccggcaaagtgaggcctgccgtccagccaatcgcctgcaataggagagattgcccctcccggtggatggtcactagctggtccgcttgcacgcgctcctgcgggggaggtgtccagacaagacgagtgacatgccaaaaattaaaagcttccggaatctcaactcccgtctcgaacgatatgtgcactcaggttgccaagagacctgtagacacacaagcttgcaatcaacagctctgcgtcgagtgggcgttctcatcatggggccagtgtaatggaccatgcataggaccccatctcgcagtccaacatcgccaggtgttttgtcagacccgtgacggcatcaccctcccctctgagcagtgttcagccttgcccaggcctgtgtcaacccaaaattgctggagtgaagcttgcagtgtacactggagggtctccctatggaccttatgcacagcaacatgtggaaattatggatttcaatcccgccgagtggaatgcgtacatgcacgcaccaacaaagccgttcctgaacatctatgctcttggggacccaggccagcgaattggcagcgttgcaacatcactccttgcgaaaacatggaatgtcgagatactacgcgctattgtgaaaaagtcaagcaactcaagctttgtcagctatcccaatttaagtcccgctgttgtggaacctgcggcaaggcatag

SEQ ID NO: 248608 - RNA, 1578 nt, synthetic construct
  misc_feature 1..1578: note = Description of Artificial Sequence: Synthetic coding sequence
  source 1..1578: mol_type = other RNA
atggagtgttgtagacgagcgacccccggaacacttcttctttttctcgccttcctactcctttctagtagaacagcgcgctcagaagaggatcgcgatggattatgggacgcttggggcccctggtcagagtgttcgcgaacctgtggaggaggcgcttcatacagccttcgtagatgcctctccagcaagtcatgcgagggcaggaatataagataccggacctgtagtaatgtggattgcccaccagaagccggggattttagggcccaacaatgtagtgctcataacgatgttaaacaccatgggcaattctatgagtggctacccgttagtaacgatcctgataacccatgttctcttaaatgtcaggcaaagggcactactttggtagtcgagctggcaccaaaagtcttggatggtaccaggtgttacactgaaagcctggatatgtgtattagcggattgtgtcagattgtcggatgtgaccatcagctgggctcaactgtgaaggaagataattgtggcgtgtgtaacggagatgggagcacctgccggctggtccgaggacaatacaaaagtcaactgagcgctacaaaatctgacgacacagtcgtcgctattccatacggctcccggcacatcagactcgtcttaaaagggcctgaccacctgtacctcgaaaccaagactctgcaaggaacaaaaggagagaatagcctgtcttcgacaggaactttcttggtagacaactcaagcgtggatttccagaaattcccagataaagaaattctgcgaatggctggccctttaacagcagatttcatcgtgaagattagaaatagcggaagcgccgactccaccgttcaattcattttctatcaacccattatccatcgatggcgagaaacagacttcttcccttgcagcgcaacttgcggcggcggataccaactgactagcgccgagtgttatgacttgcgcagtaatagagtagttgcagatcagtactgccactactatcccgagaacattaaacccaaacctaagctccaagaatgcaatctggacccctgcccagccagcgatggatataaacaaatcatgccatacgatctttaccatcccctgcctaggtgggaagccaccccctggaccgcctgctcttcctcgtgtggcggaggaatacagtctagagctgtaagttgtgttgaggaggacatacagggccatgtgaccagtgtcgaagaatggaagtgtatgtacacaccaaaaatgccaatcgcccagccctgcaatatattcgattgccctaagtggcttgcccaagaatggagcccttgcacggttacctgtggtcagggtttaagataccgggtcgtgctatgtatcgatcacagaggaatgcacacgggaggatgttctccaaaaactaagcctcacatcaaagaagagtgcatcgtccctacaccttgctacaagccgaaagagaagttgcctgttgaagcaaaactcccatggttcaagcaagctcaagaactggaagagggcgccgcggtttctgaagagcccagttag

SEQ ID NO: 248609 - RNA, 786 nt, synthetic construct
  misc_feature 1..786: note = Description of Artificial Sequence: Synthetic coding sequence
  source 1..786: mol_type = other RNA
atgtgcctcaccgatgaatggggcttcttctttttttttttcctcggagtgcccgaagccgaagtcacttggttcagaaataaatctaaactcggttctccacatcacctacacgagggatctctgttattgacaaacgtctcctcctcagaccaaggactgtattcatgccgggcggccaaccttcacggagaactgacagagtcaactcaactgcttattctggaccccccccaagttcccacacaattggaggacatccgagcgctattggcagcaactggtcccaacctaccctccgtactgacatcaccactgggtacccaactggtacttgatcctgggaacagtgctcttcttggctgcccaattaagggtcacccagtgcccaacatcacatggtttcacggaggccagcctattgtcactgccacgggcctgacccaccacatactcgcggccgggcaaatccttcaggtagcaaacttgtcaggcgggagccaaggggaattttcttgcctcgctcagaatgaagccggagtactcatgcagaaggcttctctcgttattcaggactattggtggtcagttgatcggctggctacttgttccgcttcctgcggcaacagaggcgtccaacaaccacggctaagatgcttattaaattccaccgaagtcaatcccgcccactgcgcaggtaaggttcggccagcagtgcagccaattgcgtgtaatcgtagagattgcccgagcagagccatgggactagcttctggcctgacctag

SEQ ID NO: 248610 - RNA, 5289 nt, synthetic construct
  misc_feature 1..5289: note = Description of Artificial Sequence: Synthetic coding sequence
  source 1..5289: mol_type = other RNA
atggagtgctgtcgaagagctacccctgggacattactgctctttctcgcttttctcctgctgtcaagtaggaccgcaagatcagaagaggatcgcgatggactttgggacgcctggggcccgtggagtgagtgctctagaacgtgtggaggaggtgctagctactccctgaggcggtgcctgagcagtaagagttgcgaagggcgaaacatcaggtatagaacttgttccaatgtggactgtcctcccgaagccggtgatttccgggcacagcaatgctcagctcataacgatgttaaacaccacgggcagttttatgaatggctcccagtgtccaacgatcccgacaacccttgtagcctcaagtgtcaggctaagggcaccaccctagtggttgagcttgccccaaaagtgcttgacgggactaggtgctacacggaatcactagatatgtgtatctctggcctttgccagattgtaggctgcgatcaccagctcggctcgacggtaaaagaggacaattgtggcgtgtgtaacggggacggatccacgtgtagactggttaggggacagtataaaagccaactgagcgctaccaagtcagacgacaccgtggttgctatcccatatggctcaagacatattaggcttgtactcaagggaccagaccacttgtatctcgaaacaaaaacactccaaggcacaaagggggaaaactcactgtccagtactggtaccttcctcgtggataattcttctgttgacttccagaaatttccggataaagagatactgcggatggccggacccctaaccgcagattttatagtgaaaatccgaaacagcgggagcgccgactctacagtacaattcatattttatcagcctatcatccaccgctggcgagagacggatttctttccttgttccgctacatgcggtggaggctatcaacttacttctgccgagtgttatgaccttaggtccaaccgcgttgttgctgaccagtactgccattattatcccgaaaatataaaacccaagcccaagctgcaggagtgcaacctggacccctgccccgcatctgacgggtacaaacaaatcatgccgtatgacctctaccatcccctgcccagatgggaagctactccatggacagcctgttcctctagctgcgggggcggaatccaatccagggcggtcagctgcgtggaagaggatatccagggtcacgttacctctgtagaagaatggaagtgcatgtatacgcccaagatgcccatcgctcagccttgtaatatcttcgattgccccaaatggctcgcccaggaatggagtccgtgcacagtcacatgtggtcaggggcttcgctacagggtcgtcctgtgtatcgatcatcggggaatgcataccggcggctgttcaccaaaaactaaaccgcacatcaaggaagaatgcattgtacctaccccttgctataagcctaaggaaaaattgccggtggaggcgaaattgccctggtttaagcaagcccaagagctggaggagggtgcggctgtatccgaggaaccctcttttatcccagaagcatggagcgcttgtaccgtgacatgtggtgtcggcacacaggttcggattgtccgttgccaggtcctgttatcattctcacaaagcgtagctgatctccccatcgatgaatgcgaagggcccaaacctgcttctcagagagcctgctacgcaggtccatgttccggagagatcccagaatttaatccagacgaaaccgatggcttattcggaggccttcaggacttcgatgaactatatgactgggaatatgaaggctttacaaagtgcagcgaatcttgcggcggtggcgttcaggaagctgtcgtttcttgcctgaacaaacaaactcgggagccggcagaagaaaatctctgtgtcaccagtagacgccccccacagctacttaagtcatgtaacctcgatccatgcccagcaagatgggaaatcgggaaatggtccccctgttcactgacctgcggagtaggcctccaaacacgggacgtgttctgcagccacctcctgtccagggaaatgaacgagacagtcatattggctgacgagctttgcagacagcccaagcccagcactgtccaggcctgtaacaggttcaattgtcctcccgcttggtaccctgcacagtggcagccatgcagcagaacttgcggaggcggcgtgcaaaaacgcgaggtactgtgtaagcagcgcatggcagacggtagctttctggaattgcccgagaccttttgttccgcgagtaaaccggcttgtcagcaggcatgcaaaaaagacgactgcccctccgaatggctactatcagattggactgaatgcagcacaagttgtggcgagggtacacaaacgaggtcagctatttgtaggaagatgctgaaaacaggcctctctaccgtggttaactctaccctttgcccccccctgcctttctcctcatcaatcagaccctgtatgcttgccacctgcgctagaccaggacgcccatcaacaaaacacagtccccatattgcagctgcgcgtaaggtgtacatccaaacgagacgacaacggaaacttcactttgtagtgggtggctttgcatacctgctgcccaagactgccgtagtgctcagatgcccagctcgtagagtgcggaagcccctgattacctgggagaaagatggtcaacacctcatctcctcgacccacgtcaccgtggccccttttggatatctgaagatccatcggttgaagccctccgacgccggcgtgtacacatgcagcgctggtcccgcacgcgaacacttcgtgatcaaactgatcggtggcaatcggaagttagtagctagacccctgtctccccgttcagaagaagaagttttggcaggacgcaagggcggacctaaggaggcattgcagacacataagcatcagaacggaatcttttctaatggaagtaaggctgaaaagagggggctcgccgcaaacccaggatcaaggtacgacgatttggttagcagacttctggaacaagggggttggcctggggagcttctggcctcctgggaagcacaagacagcgctgaacgcaatactacctctgaagaagatcccggcgccgaacaggtactccttcatcttcccttcactatggtgactgaacagcggcgcttagacgatatcctcggtaatttgtcacagcaacccgaagagttacgcgatctgtacagcaagcatctggtcgctcagctggcacaggaaatcttcagatctcacctggagcaccaagataccttgttgaaaccttccgaaagacgtacctcacccgttaccctgtcccctcacaagcacgtttcaggcttctcatctagtttacgcaccagttctacgggagatgcaggcggagggtctcgcaggccacatcggaagcccactatacttcgcaagataagcgccgctcagcagctatccgcgtccgaggtcgttacacaccttggtcagaccgtcgctctggcctctggcacactcagcgtgctgttacactgcgaagcaatcggacaccctcgccccaccatctcctgggcccgtaacggcgaagaggttcagttcagcgatcgaatattacttcaacccgacgattcactgcagatcttggcccctgtagaggcagacgtgggcttctatacgtgtaacgctacaaacgcacttggctatgattctgtttctatcgccgtaactttggccgggaagccccttgtgaagacatccagaatgacagttataaacacagaaaagcccgcagtaaccgtcgatatcggctcaactattaagaccgttcagggagtcaacgtcacaattaactgtcaagttgccggagttcctgaagccgaagttacctggttcagaaacaagagcaagctaggatctccccatcacctgcacgaagggagtttactcctcaccaatgtcagtagttctgaccaaggtttatattcctgtagagccgcaaatctccatggtgagttaactgagtcaacacagctcctgattctcgaccctccacaggtcccaacacagctggaggacatccgcgccctcttagccgccaccggcccaaatctgcccagcgttttgacctcacccctggggacccagctggttcttgaccctggcaacagcgcactgctgggatgcccgattaaaggtcacccagtgcccaatatcacgtggtttcatggcggtcagccaattgtgacagctaccggactgacgcaccatattctggcagcgggccagatcttgcaggtcgctaacttaagcgggggaagccagggtgaattttcatgtctcgcacagaatgaagcgggagttctcatgcaaaaggcctcactggttattcaggactactggtggagtgtggatcgcctcgcaacttgctctgcctcatgcggcaacaggggagttcaacaaccccggctcaggtgtctgcttaactcaacggaagtgaatccagcccactgcgccggaaaagtgcgcccagctgttcaacccatcgcctgtaatagaagagactgcccctcgagatggatggtgacatcttggtcagcgtgcacgcgttcctgcggagggggcgtacaaactcgtagagttacatgccagaagttgaaggcgtccggaattagtaccccagtctcaaatgatatgtgcacccaagttgccaagagacctgtggatacacaagcttgcaaccaacagctctgcgtagaatgggcttttagctcatggggacaatgcaatggcccatgcataggaccccacttggcagtacagcaccggcaggtcttctgccagactagggatgggattacgctaccttctgaacaatgttccgccctcccccggcctgttagcacgcaaaattgttggagcgaggcttgctccgtacactggagagtgagcttgtggacactatgtacagcgacatgcggcaactacgggttccagagtcgaagagtagaatgcgtccatgccaggacgaacaaagcggtgccagaacatctgtgttcatgggggccgagaccagcaaattggcaacggtgcaacattaccccttgcgagaatatggaatgccgtgatacgacacgatactgtgagaaggtcaagcagctgaaattgtgccagctcagccagttcaagtccagatgctgcggaacctgtgggaaggcgtag

SEQ ID NO: 248611 - RNA, 1320 nt, synthetic construct
  misc_feature 1..1320: note = Description of Artificial Sequence: Synthetic coding sequence
  source 1..1320: mol_type = other RNA
atggaatgctgccgaagagccacccctgggacattgctgttatttttggccttcctgctccttagctctcgaactgcccgatccgaagaggatagagatggcttatgggatgcctggggcccatggagcgaatgttcaagaacatgcggcggaggcgcgtcttactctttgcgcaggtgcttaagctcaaagtcttgtgagggcagaaatattagatatcgaacgtgctcgaacgtggactgtccacctgaggccggcgactttagagcccagcaatgtagcgcccataatgacgttaaacaccacgggcagttttacgagtggctgccagtgtcaaacgatcccgataatccttgttccttgaagtgtcaagctaagggtaccaccttagtagtcgaactcgcccccaaggtgctggatggtacgcggtgttacaccgagagccttgacatgtgcattagcggcctttgtcagattgtaggctgtgaccaccagctgggatccaccgtgaaagaggataactgtggagtgtgtaacggagatgggagtacctgtagactagtacgagggcagtataagagccagctttcagcgaccaagtccgacgacactgtcgtggctatcccctacggttccagacacatcagactggtgttaaagggccccgaccacttgtacctcgagaccaaaacactgcagggcacaaaaggagaaaactccctatcatctaccggcacgttcctggttgataattcctccgttgacttccagaagttccctgataaagagatcctgaggatggccgggccactcaccgctgactttatagtgaagattagaaacagcggctcagcagattccactgtccagttcattttctatcagcccataattcatcgttggcgagaaactgacttctttccgtgttctgcaacatgcggtggcggttaccaactgacaagtgccgagtgctacgatttaaggagcaaccgggtggtggccgatcagtactgtcactattatccggagaacataaaacccaagcccaaacttcaggagtgtaaccttgacccctgcccagcacgatgggaggccacaccatggacggcctgttcctctagttgcggtggcggtattcaatctagggcagtatcttgtgtcgaagaagacattcaaggtcacgtgacttccgtagaggaatggaaatgtatgtatacacctaaaatgcccatcgctcagccttgtaatatttttgattgtccaaaatggctcgcccaggagtggtcccccgtcacagttccgtctttcttcgtgcactag

SEQ ID NO: 248612 - RNA, 543 nt, synthetic construct
  misc_feature 1..543: note = Description of Artificial Sequence: Synthetic coding sequence
  source 1..543: mol_type = other RNA
atgggtttaactgtgagtgccctcttttctaggatttttggtaaaaagcagatgagaattctgatggtgggcctcgatgctgccgggaaaacaacaattctgtataagctcaaactgggggaaattgtgacaaccataccgaccatcgggtttaatgtcgaaacggtagaatacaagaacatttgttttaccgtgtgggacgttggtggccaagataaaatccgacctctctggagacattattttcaaaatactcagggattgatttttgtggttgattctaatgaccgtgagagagtgcaggaatcagccgacgaactgcaaaagatgctgcaggaagacgagctgagggacgccgtgttgctcgtcttcgccaataagcaagatatgcctaacgccatgccagtgagtgagctgactgataaattgggactacaacacctccgatctagaacttggtatgtgcaagccacctgcgctacacaaggtacaggactttatgacggcttggattggttatcacacgaattaagcaaacgttag
